United States Patent Application Publication US 2008/0050393 A1 - sequence listing, part 18

SEQ ID NO: 61673 - DNA, 2082 bp, Homo sapiens
  misc_feature (1)...(2082): n = a,t,c or g
ggaattcgggtgaggctctctcattccagatatggagactaaaaagttcaagatggaagtaatagcaaaaaaattacagtactaatcacaacagctaccatttctcagcattagacacagtaactgtatgaaagaagtatgattattaggtctgttttacagatgaggaaactgagacccagaaaggtggaagcacttgtctaaggtcacgcctccaggaagcagtgtgtccacgactccagtccaagtggtcaggctccagagcccacagtcccaggggtccatgatgccgagctgcaatcgttcctgcagctgcagccgcggccccagcgtggaggatggcaagtggtatggggtccgctcctacctgcacctcttctatgaggactgtgcaggcactgctctcagcgacgaccctgagggacctccggtcctgtgcccccgccggccctggccctcactgtgttggaagatcagcctgtcctcggggaccctgcttctgattgctgggtgtggcggctctgaccactggctatgcagtgccccccaagctggagggcatcggtgagggtgagttcctggtgttggatcagcgggcagccgactacaaccaggccctgggcacctgtcgcctggcaggcacagcgctctgtgtggcagctggagttctgctcgccatctgcctcttctgggccatgataggctggctgagccaggacaccaaggcagagcccttggaccccgaagccgacagccacgtggaggtcttcggggatgagccagagcagcagttgtcacccattttccgcaatgccagtggccagtcatggttctcgccacccgccagcccctttgggcaatcttctgtgcagactatccagcccaagagggactcctgagctgcccacatggcctaagatgtgggtcctggatccttcccccttctcaccataaccccctctcagtgtttccccaacttctcccttttagcagggtccctttagagcccaactccaggtcaaatctggagctcaaatcccagtgctccctccccaggagtggggccccaactcttccaagataccagcattcctcaagtcctcccaaaacttcctacccacaccctcttcccaaggccctcaggggcagaaaacatctccttcaacccgtccccactccttcctctgcatgaccttgggcaaacccttgccctttcaagccatcagctcctgcctctctgccatgagggctttggatcagattcctcttctcgccaggatgaggacacgcactgccctccatagacacagatgaaggggtgggggtcattcagctcgaatgggtcccagatgctcacttggcctttccctgcaggatgagtgaagacgtttgcctctcacagtgtgtcttctacctgcattttggcatcagagccccccagcccacccaccacaggcaattactagccctagttgataggtgaggtgggtgaagaaggctggaggtgacatgtccgaggtcacacaacaaagcagcatgcaggaactagaaacacatcttcagcctcctcctgggccagctcttgtgctacaggtggggcggagccagcccctcaccttcctggttccctgagggtcctcagggtggaggacaggtttggcccagaaagactagccagaggcctgatggtcccaggtggctctggatatactttggatatggatttaaatggtctctaagagccgggggtagggggcaggaaaagtgggttgtctttgcccctcaaagtccacctacctagaaaccaagcccacggtcttggccgtgaccctgataataaatgggctctctcagaggcgccagcccctccctccccagccggaggcgtcatctctcttctgtaccactagagggagctctgatgcagctggagagcagcgctcaaggctctcgcccctcccctccctaacccttaccttcagtctccgccagcgtgaagggcctcctaggggatcctcaggcgcctcgtccaangcttggcgttatgnagcgtcgaagtnccccagggncnnnncccgcacc

SEQ ID NO: 61674 - DNA, 1936 bp, Homo sapiens
ttttttttttttgctagttgtatataaaatttaatctcaccgaatgtacagttttcaaatttcacgtgtatattaaggaactgatgcatctgagcattgtcaaacaaacgggaagaagaagttaaagggcagcctggcattgatggctggtggagctctgaagcctgcctctgcaggtgcagacacatccacaaaagtaaccgcagtggaaataagaatcgtcctttcatttcctgagttggcctcaggaaaggaggatgaaattagatttgcagttacattgactattttggcctgtggattcagcagggatccgtatttagtccacttcacttctataaccaaagcccctgggagctggcaggaatccttcctgttgaatgactgggtgatgaagtggatgggcacccagtccagcatgtccctgggccctgggaatttccaaaaggggccacgtaatctgggaagccctggccccacagcaggctcttcaccttctgtgctacgagctgacacgggagagctccagtcagtcttagtttacagccagattgcatagtgtaaccaaataatactggggtccggaccccctccagtgctaagcagtcttgctcagttgtgctatgaagaatagtaagctgtccatatctatttgtggtctgaataatcccagaccccttatgaggctggaatccagcagctaatgggagccccacgacataaccagggtttccactgagagggactggctgggtattttcctgaagaaaatgaatttcaaacttttgctgcagtgggaccactacgctgctaactgtccccagaacgaatgagagatcagctttggtgacttcacctgcatctgtgtatgtgaggctgtactttacctcaagaacaacattcacgcaaaggctaaagtgtccagcgttgacgagagtcggctgcagcacatcagtgtcctcccgtcgggtgagcgttttatttagagactgaatgacgatggactgaacagtgatagggaccttttttcttgaatcaggtaccctcagaatttccgggctgctgtaaaaagccatgctgagggcttcaatttcttcacactgttctaaatttatttttctggtgcacttaacagcctggttcaccagaaacgctgcagggttattatcagtgcacagagatgatgtcagggacgaaggaaatctcagaaacgaatctgaagtctgcagaggaaccccatactcatatttagcagcagtaggaatatccagtttggttgtgaaggaaacatatgattcagcattcaatgtaaaaccatcagatgttttcatcaatgtatcaaaattgttttcatcaggtacttctggattaataaaggataatgcaggtttatagtttgtaatatgaatgcagaaaatagatggattaatctggtcaacaagttcaaatactctttgaggtgggtttgctgtaaaattcaatgaatagatgactgctttttgactacaaaactggctgtcgcccgtgacaactggaactgagcaggcagaaaagacactgaaatccacggagctgcagtcgggatcacagcagcagttgatgtcacactgtgctggggataagtcacagacacagagaacagcaacgtccgtgactggggtaggcctggggccggaggagggccctggagccctgggagtcccggggggcctggtcgacgggaaagttccgaaggtggccagggctgcctcggtggagttgaggccctctgtcgtcaccgccggggtggcatcggtctgggcgctcacggaggcccagcagcccaggagcaccaccaggagcggcgggagacctcgcggcctcatctcccagggagtcccagcgaggcccgcgacatggacagcgcgttgcccggcaaccgcgacagccaggcgcg

SEQ ID NO: 61675 - DNA, 2697 bp, Homo sapiens
caaggtgcggcgggtagtgtactcattcgaaggagaatacccccaattcactagacgagcccctaattgggggtgcggtgccgggcgcgctctttcctccccctttccaccagcactgccctcagttctgcttctagccacgccctttcgcgttcacgtccagcgccctggcgggattgatttgaggacgactggactgccattgcgcctgcgcagggagcccaaggcaagagccgctaggctgccctgcccgaagggctcaactgtcagtgagcctgcgcaggaggccaataggctgccaatactccttggactccccgccagggccctgctgtcagtgcgcctgcgcgcgggtccggcgccgaggttcttgactgctgtgccggacgccaggtgtagccatgcagcgagccgattccgagcagccctccaagcgtccccgttgcgatgacagcccgagaaccccctcaaacaccccttccgcagaggcagactggtccccgggcctggaactccatcccgactacaagacatggggtccggagcaggtgtgctccttcctcaggcgcggtggctttgaagagccggtgctgctgaagaacatccgagaaaatgaaatcacaggcgcattactgccttgtcttgatgagtctcgttttgaaaatcttggagtaagttccttgggggagaggaagaagctgcttagttatatccagcgattggttcaaatccacgttgatacaatgaaggtaattaatgatcctatccatggccacattgagctccaccctctcctcgtccgaatcattgatacacctcaatttcaacgtcttcgatacatcaaacagctgggaggtggttactatgtttttccaggagcttcacacaatcgatttgagcatagtctaggggtggggtatctagcaggatgtctagttcacgcactgggtgaaaaacaaccagagctgcagataagtgaacgagatgttctctgtgttcagattgctggactttgtcatgatctcggtcatgggccattttctcacatgtttgatggacgatttattccacttgctcgcccggaggtgaaatggacgcatgaacaaggctcagttatgatgtttgagcaccttattaattctaatggaattaagcctgtcatggaacaatatggtctcatccctgaagaagatatttgctttataaaggaacaaattgtaggaccacttgaatcacctgtcgaagattcattgtggccatataaagggcgtcctgaaaacaaaagcttcctttatgagatagtatctaataaaagaaatggcattgatgtggacaaatgggattattttgccagggactgccatcatcttggaatccaaaataattttgattacaagcgctttattaagtttgcccgtgtctgtgaagtagacaatgagttgcgtatttgtgctagagataaggaagttggaaatctgtatgacatgttccacactcgcaactctttacaccgtagagcttatcaacacaaagttggcaacattattgatacaatgattacagatgctttcctcaaagcagatgactacatagagattacaggtgctggaggaaaaaagtatcgcatttctacagcaattgacgacatggaagcctatactaagctgacagataacatttttctggagattttatactctactgatcccaaattgaaagacgcacgagagattttaaaacaaattgaataccgtaatctattcaagtatgtgggtgagacgcagccaacaggacaaataaagattaaaagggaggactatgaatctcttccaaaagaggttgccagtgctaaacccaaagtattgctagacgtgaaactgaaggctgaagattttatagtggatgttatcaacatggattatggaatgcaagaaaagaatccaattgatcatgttagcttctattgtaagactgcccccaacagagcaatcaggattactaaaaaccaggtttcacaacttctgccaagagaaatttgcagagcaggctgattcgagtatattgtaagaaggtggacagaaagagtttgtatgccggcaagacaatattttgttcagtgggtgtgcagacaggaaatttcacccaagccgcaggatgggcgatgttattagcccccaactccataacaccctcaaaaaaagggatgggaacgacagtaccttcagtcccaaaatcccaactcgcctcccgaggaggcttcccaaaagcagagtcccagctttttaaagatgacccaatgtgaatgtctgtagtcagttgtttacaaactccctctcctgcacaattcatttagaggcttcaatcataaaattctgcaaaataatgacaactcatgctttaattttgtattttgaatgtacacgcatgctgaagctaagtaacttttaatcaaagaaataagatggtattagggcaaatcttactatactatgaaaagcattaccttgcctatttttaatattattaaagcctttctccttcaaaaaaaaaaaaaagggcggggcgcttaaaagatccctcaggggggccaaaataaccccgagacgcccagctgtaagcttttcccttatgagggcctaattataaaccaaacttggacccttttggaaaggaccttaacttcgggggagcacaaaa

SEQ ID NO: 61676 - DNA, 3464 bp, Homo sapiens
  misc_feature (1)...(3464): n = a,t,c or g
atgcagtggtcagtgataatggaatacttgaaagtaatcccctcactccaggaactagtgctcagctagcagaactaatagccctcacttgggcactagaattaggagaagaaaaaagggcaaatatatatacagactctaaatatgcttacctagtcctccatgcccatgcagcaatatggaaagaaagggaattcctaacttctgagagaacacctatcaaacatcaggaagccattaggaaattattattggctgtacagaaacctaaagaggtggcagtcttacactgccggggtcatcanaaaggaaaggaaagggaaaatacttttgcctgcaactatccaatggaaattacttaaaacccttcatcaaacctttcacttaggcatcgatagcacccatcaaatggccaaatcattatttactggaccaggccttttcaaaactatcaagcaaatattcagggcctgtgaattgtgccaaaaaaataatcccctgcctcatcgccaagctccttcaggaaaacaaaaaacaggccattaccctgaaaaaaactggcaactgattttacccacaagcccaaacctcagggatttcagtatctactagtctgggtaaatactttcacgggttgggcaaaggccttcccctgtaggacagaaaaggcccaagaggtaataaaggcactagttcatgaaataattcccagattcggacttccccgaggcttacagagtgacaatagccctgctttccaggccacagtaacccagggagtatcccaggcgttaggtatacgatatcacttacactgcgcctgaaggccacagtcctcagggaaggtcgagaaaatgaatgaaatactcaaaggacatctaaaaaagcaaacccaggaaacccacctcacatggcctgctctgttgcctatagccttaaaaagaatctgcaactttccccaaaaagcaggacttagcccatacgaaatgctgtatggaaggcccttcataaccaatgaccttgtgcttgacccaagacagccaacttagttgcagacatcacctccttagccaaatatcaacaagttcttaaaacattacaaggaacctatccctgagaagagggaaaagaactattccacccttgtgacatggtattagtcaagtcccttctctctaattccccatccctaggatacatcctgggggaagggacccttacccagttcatttttattttaccccaattgcgggtttaaagtggctggagtggtcttggatacatcacacttgagtcaaatcctggatactgccaaaggaacctgaaaatccaggagacaacgctagctattcctgtgaacctctagaggatttgcgcctgctcttcaaacaacaaccaggaggaaagtaactaaaatcataaatcccccatggccctcccttatcatatttttctctttactgttcttttaccctctttcactctcactgcaccccctccatgccgctgtatgaccagtagctccccttaccaagagtttctatggagaatgcagcgtcccggaaatattgatgccccatcgtataggagtctttctaagggaacccccaccttcactgcccacacccatatgccccgcaactgctatcactctgccactctttgcatgcatgcaaatactcattattggacaggaaaaatgattaatcctagttgtcctggaggacttggagtcactgtctgtcggacttacttcacccaaactggtatgtctgatgggggtggagttcaagatcaggcaagagaaaaacatgtaaaagaagcaatctcccaactgacccggggacatagcacccctagcccctacaaaggactagttctctcaaaactacatgaaaccctccgtacccatactcgcctggtaagcctatttaataccaccctcactgggctccatgaggtctcggcccaaaaccctactaactgttggatatgcctccccctgaacttcaggccatatgtttcaatccctgtacctgaacaatggaacaacttcagcacagaaataaacaccacttccgttttagtaggacctcttgtttccaatctggaaataacccatacctcaaacctcacctgtgtaaaatttagcaatactacatacacaaccaactcccaatgcatcaggtgggtaactcctcccacacaaatagtctgcctaccctcaggaatattttttgtctgtggtacctcagcctatcgttgtttgaatggctcttcagaatctatgtgcttcctctcattcttagtgccccctatgaccatctacactgaacaagatttatacagttatgtcaatatcctaaagcccccgcaacaaaagagtacccattcttccttttgttattggagcaggagtactaggcggactaggtactggcattggcggtattacaacctctactcagttctaccacaaactatctcaagaactaaatggtgacatggaacaggtcgcccgactcccctggtcaccttgcaagatcaacttaactccctagcagcagtagtccttcaaaatcgaagagctttagacttgctaaccgctgaaagagggggaacctgtttacttttaggggaagaatgctgttactatgttaatcaatccggaatcgtcactgagaaagttaaagaaattcgagatcgaatacaacgtagagcagaggagcttcgaaacactggaccctggggcctcctcagccaatggatgccctggattctccccttcttaggacctctagcagctataatattgctactcctctttggaccctgtatctttaacctccttgttaactttgtctcttccagaatcgaagctgtaaaactacaaatggagcccaagatgcagtccaagactaagatctaccgcagacccctggaccggcctgctagcccacgatctgatgttaatgacatcaaaggcacccctcctgaggaaatctcagctgcacaacctctactacgccccaattcagcaggaagcagttagagcggtcgtcggccaacctccccaacagcacttaggttttcctgttgagatgggggactgagagacaggactagctggatttccttaggctgacctaaggantccctaaagccttagctggggaagggtggaccacatccacctttttaaaacacggggggctttgcaactttaggttcacaccttgaccaatcagagagctcactaaaatgcctaattaggcaaagacaggaggtaaagaaatagccaatcatctattgcctgagagcacagcaggagggacaatgatcgggatataaacccaagtcttcgaagcggcaacggcaaccccctttgggtcccctccctttgtatgggagctctgttttcatgctatttcactctattaaatcttgcaactgcaaaaaaaaaa

SEQ ID NO: 61677 - DNA, 7104 bp, Homo sapiens
tttcgtccgggcttgaggttgaattaagaatagtcaggtggtgagtggaacgtctcttggggtgtcggaattcaaaacggacctggaggatgttgatctccaagaacatgccctggcggcggctgcagggcatttccttcgggatgtattcggctgaagagctcaagaaattaagtgttaaatccattacgaaccctcgatacctggacagcctggggaacccatcggcaaacggcctgtacgatttagctttgggccctgcagattccaaagaggtgtgctccacctgcgtgcaggacttcagcaactgttctgggcacctgggccacattgagctcccactcacagtgtataaccctctcctcttcgataagctgtacctgctgcttcggggctcttgtttaaactgccacatgctgacttgtccccgggccgtgattcacctcttactctgccagctgagggttctggaagtcggggccctacaagcagtctacgagcttgagagaattctgagcaggtttctggaagaaaatgccgatccctctgcctctgaaattcgggaggaattagaacaatacacaactgaaattgtgcagaacaacctcctggggtcccagggcgcacatgtaaagaacgtgtgtgagagcaagagcaagctcattgctctcttctggaaggcacatatgaatgctaagcgctgtccccactgcaagaccgggcgatccgttgtccgaaaggaacacaacagcaagttgactatcacatttccagccatggtgcacaggacagctggccagaaggactctgagcccctgggaattgaggaagctcagataggaaaacgaggatacttaacacccaccagtgcccgcgaacacctttctgccctgtggaagaatgaaggattctttctgaactaccttttttcgggaatggatgatgatggtatggaatccagattcaatcccagtgtgttctttctagatttcttggtggtgccgccctcaaggtctcgcccagtcagtcgcctaggagaccagatgtttactaatggccagacggtgaacttgcaggctgtcatgaaggatgtagttctgattcgaaaacttctggcattgatggcccaagaacagaagttgccagaggaagtggccacacccactacagatgaggaaaaagactctttgattgctattgaccgatcctttttgagtacacttccaggccagtccctcatagacaaactttacaacatttggattcgccttcagagccacgtcaatattgtgtttgatagcgagatggacaaactaatgatggacaagtacccaggcattaggcagatcctggagaagaaagaaggcctgttccgaaaacacatgatgggaaagcgagtggactacgctgcgcgctcagtcatctgcccagacatgtacatcaacaccaacgaaattggaattcccatggtgtttgccacaaaactgacctacccacagccagttaccccatggaatgttcaggaacttaggcaagcggtcatcaacggccctaatgtgcacccaggagcctccatggtcatcaatgaggacggcagccgcacagccctgagcgctgtggacatgacccagcgagaggccgtggccaagcagcttctgaccccagccacgggggcacctaagccccaggggacaaaaattgtgtgccggcatgtgaagaatggggacattctgctactgaaccgacagcccacactgcacagaccctccatccaggcccaccgtgcccgcatcctgcctgaagagaaagtgctgcggctccactatgccaactgcaaggcctataatgccgactttgatggagacgagatgaatgcccatttcccccagagtgagctgggccgggccgaggcctacgtcctggcctgcactgatcagcagtaccttgttcccaaggatggccaaccattggcgggactgatccaggatcacatggtttcaggggcaagcatgactactcggggttgctttttcacccgggagcactatatggagctggtgtaccgaggactcacggacaaagtggggcgcgtgaagctcctttctccttccatcctgaagccctttccgctgtggacaggaaaacaggttgtgtcaacgctgctcataaatataatcccagaggaccacatcccactgaacttatctggaaaggcgaaaatcactgggaaagcctgggtgaaggaaactcctcgatccgttcctggctttaaccctgactcgatgtgcgagtcccaggtgatcatcagggaaggggagctgctctgcggagtgctggacaaggcgcactatgggagctccgcctacggcctggtccactgctgctatgagatctatggaggcgagaccagcggcaaggttctaacctgcctggcccgcctcttcaccgcctacctgcagctctacagaggcttcaccttgggcgtggaagacattttggtgaagccaaaggcagatgtcaagaggcaacgtatcattgaagaatccacccactgcgggccccaggctgtcagggctgcattaaacctgccagaagccgcatcatatgatgaggtccgaggaaaatggcaggatgcccatctgggcaaggaccagagggattttaacatgattgatctgaagttcaaggaggaagtgaaccattacagcaatgagattaacaaggcatgcatgccttttggcctacacagacagttcccagagaacacgctgcagctgatggtgcagtcgggagccaaaggttcaactgtgaacacgatgcagatctcgtgcctgctgggccagattgaactggaaggtcggagcaccccgctgatggcgtctggcaagtcactgccctgctttgagccttatgagttcacccccagggctggtggctttgtcactggcaggttcctcaccggcatcaaacctcctgagttcttcttccactgcatggcaggacgagagggcctggtggacactgctgtgaaaaccagccgctcaggctatctccaaaggtgcatcatcaagcacctagaggggctggtcgtgcagtatgatctcacggtccgtgacagtgacggcagtgtggtgcagttcctgtatggggaggatggcctggacatccccaagacacagttcctgcagcccaagcagttccccttcctggccagcaactacgaggtgataatgaaatcacagcatctccatgaagttttatccagagcagatcccaaaaaagctctccaccacttcagagctatcaaaaaatggcaaagcaagcaccccaacaccctgctgagaagaggcgccttcttgagttattcccagaaaattcaggaagctgtgaaagccctgaaacttgagagtgaaaaccgcaatggccgcagccctgggactcaggagatgctgaggatgtggtatgagttggatgaggaaagccgaaggaaataccagaagaaggcggccgcttgtcctgaccccagtctgtctgtctggcgtcctgacatctactttgcatcagtgtcagaaacatttgaaacaaaggttgatgactacagtcaagagtgggcagctcaaacagagaagagttatgagaaatcagagctttctctcgacaggttgaggaccttgctgcagctagaagtggcagcgctcactgtgtgagccgggcgaggctgtgggcctgctggctgcccagagcatcggagagccctccacccagatgaccctcaacaccttccactttgcaggcagaggcgagatgaacgtcaccctgggcattccaaggttgcgggagattctcatggtggccagcgccaacatcaagacacccatgatgagcgtgcccgtgctcaacaccaagaaagccctgaagagagtgaaaagcctgaagaagcaactcaccagggtgtgcttgggggaggtgttgcagaaaattgacgtccaggagtccttctgtatggaagaaaaacagaacaaattccaggtgtaccagctgcggtttcagttcctgccacatgcatattaccagcaggagaagtgcctgagacccgaggacatcctgcgcttcatggaaacaagattctttaaacttctgatggaatccatcaaaaagaagaataataaagcatcagctttcaggaacgtaaacactcgaagagctacacagcgggatctggacaacgctggggagttggggaggagtcggggagagcaggagggtgatgaggaagaggaggggcacattgtggatgctgaagctgaggagggagacgccgatgcctctgatgccaaacgcaaggagaagcaggaggaggaggttgattatgagagtgaggaagaggaggagagggagggcgaggagaacgacgatgaagacatgcaggaggaacgaaatccccacagggaaggtgctcgaaagacccaagagcaagatgaagaggtgggcttaggcactgaggaggacccgtcccttcccgccctcctgacgcagccccggaaacccacccacagccaggagccccaggggcccgaggccatggagcgccgggtccaggctgtgcgtgagatccacccgttcatagatgactaccagtacgacaccgaggagagcctgtggtgccaggtgacagtgaagctccctctgatgaagatcaactttgacatgagctccctggtagtatctttggcccatggtgccgtcatctatgcgaccaagggcatcactcggtgcctcctgaatgaaacaaccaacaataagaacgagaaggagcttgtgctaaacacagaaggaatcaacctcccagagctattcaagtatgcagaggtcctggatctgcgccgcctctactccaacgacatccacgccatagccaacacgtatggcattgaggccgcgctgcgggtgatcgagaaggagatcaaggatgtgtttgccgtgtatggcatcgcggtcgaccctcgccatctctccctggttgctgattatatgtgcttcgagggtgtttacaagccactgaatcgctttgggatccggtcaaactcttccccgctacagcagatgacatttgaaaccagcttccagtttctgaagcaagccaccatgctgggatcccacgatgagctgaggtctccttctgcctgccttgtggtcgggaaggtcgtcaggggcgggacaggcctgttcgagctcaagcagcctctgagatagcagctaccccggcaccatctgcccagctccaaggacccttggtgagggcgtggcccagcctgccttctgcatgagaggaccaggagactggaatccagggcagttccaagtgacagtacagagcacagcagcgaccttgggcctgaaagcagtgggcctctgagctgggccagcttcacctggaaagtgacagagttgctcatccttgcccctccctgtctctggatttttatcaaggtttaccaagtcttctgagtccccctgagatggctggggcttcacctgtgctgcaggaggcctctgtggcataacccctaaggagaagtcctgattcacgattcactgagaagaccaaggggaagccatgctttgctgctggggaccccaggcacctccagagtagggaagcggggttcttttgctgtgagtggccagggacaacagacaagattcctgggggctcccgatgagcaggaacgtggagcctgctgcccaaggcctgctccttccggctgctccagcccctgggggcagagtccacaaagagtccccatcaagacttcttccctgagtcaagtacagcgtagcatagtcctccacccacccaacctctctgcctggccagggtcctggccctgccactgtgtggcgaggtgtccttctagaccacatcagccccaaggctgggagcagtcgctccagggccgcagcagttcactcccacacatagaacccaggtcactgctggggcgattgaacaggttgcctggcttttctctgctgtcagtttggtgtggaggcctatgttctgccccatacaccccacaggccctgcttatgggaaggaacacaggcctccagcccagaggactgtgccgccctgttcttggccgtccacgtttcctctccctctagcaccagcaatacatttccctggcatggacagaaaagacagagaggacttatacaaaggttttgtaaaaccagaggctagcttctatctttgtctactgttatttcagctcagggcgggtaattaacatcattggaactagctattaggaaagaaaaaaaacttggttttttttacaacaattttttcccttggtttgcagtttctgcatttggatttgagaacccagggcggggattttcttggcacagtcaggtcttgggtccctcttcctgtgctttcttgtctgaggccttagggggaagagctcagcctctgcagcctcctccacctctgcccctggcctgcctctgctgtgacctccttccagagctagctgctggccctgtggccaggagaagcagaggggagaagcctttatgcagaagctgtgctagccttggtctggggtggggaggctgctgctgtgaccttaggggtagggttggggatcaagggaggctttgtcaagggagagtgaccatgttgctccctacatccatgcaataggacccagcctgcacctcctaggcctacactggggaaagcctgacagaaatcagtacctcctaacggggtctgccaggttcaccaaggcatgggcacagaggaatatgacagttttgaggcaggcaggaagggcccagcctgcagggtaagacattcattctttgagttaaaggccatattcacttgatgatttctacacacactagaattgtgagagtgtccttgaaggagatcacaaagtaacctggtgactgtggcacagggtccgtggattccatctctcccaggcactgagggcgcagaggcgaaggagcaagccctgcatattggcagggctgtgaccatcgcacttagatcagacccccgacctgtgttgggatgtgagggag

SEQ ID NO: 61678 - DNA, 5127 bp, Homo sapiens
tttcgtggcggcgtcgggtacgcgcacacgttgcatcttcttcctttcgcggggtcctccgtagttctggcacgagccaggcgtactgacaggtggaccagcggactggtggagatggcgacgctctctctgaccgtgaattcaggagaccctccgctaggagctttgctggcagtagaacacgtgaaagacgatgtcagcatttccgttgaagaagggaaagagaatattcttcatgtttctgaaaatgtgatattcacagatgtgaattctatacttcgctacttggctagagttgcaactacagctgggttatatggctctaatctgatggaacatactgagattgatcactggttggagttcagtgctacaaaattatcttcatgtgattcctttacttctacaattaatgaactcaatcattgcctgtctctgagaacatacttagttggaaactccttgagtttagcagatttatgtgtttgggccaccctaaaaggaaatgctgcctggcaagaacagttgaaacagaagaaagctccagttcatgtaaaacgttggtttggctttcttgaagcccagcaggccttccagtcagtaggtaccaagtgggatgtttcaacaaccaaagctcgagtggcacctgagaaaaagcaagatgttgggaaatttgttgagcttccaggtgcggagatgggaaaggttaccgtcagatttcctccagaggccagtggttacttacacattgggcatgcaaaagctgctcttctgaaccagcactaccaggttaactttaaagggaaactgatcatgagatttgatgacacaaatcctgaaaaagaaaaggaagattttgagaaggttatcttggaagatgttgcaatgttgcatatcaaaccagatcaatttacttatacttcggatcattttgaaactataatgaagtatgcagagaagctaattcaagaagggaaggcttatgtggatgatactcctggtgaacagatcaaagcagaacgtgagcagaggatagaatctaaacatagaaaaaaccctattgagaagaatctacaaatgtgggaagaaatgaaaaaagggagccagtttggtcactcctgttgtttgcgagcaaaaattgacatgagtagtaacaatggatgcatgagagatccaaccctttatcgctgcaaaattcaaccacatccaagaactggaaattaataccaatgttttatccaacatatgattttgcctgccccatagttgacagcatcgaaggtgttacacatgccctgagaacaacagaataccatgacagagatgagcagttttactggattattgaagctttaggcataagaaaaccatatatttgggaatatagtcggctaaatctcaacaacacagtgctatccaaaagaaaactcacatggtttgtcaatgaaggactagtagatggatgggatgacccaagatttcctacggttcgtggtgtactgagaagagggatgacagttgaaggactgaaacagtttattgctgctcagggctcctcacgttcagtcgtgaacatggagtgggacaaaatctgggcgtttaacaaaaaggttattgacccagtggctccacgatatgttgcattactgaagaaagaagtgatcccagtgaatgtacctgaagctcaggaggagatgaaagaagtagccaaacacccaaagaatcctgaggttggcttgaagcctgtgtggtatagtcccaaagttttcattgaaggtgctgatgcagagactttttcggagggtgagatggttacatttataaattggggcaacctcaacattacaaaaatacacaaaaatgcagatggaaaaatcatatctcttgatgcaaagttgaatttggaaaacaaagactacaagaaaaccactaaggtcacttggcttgcagagactacacatgctcttcctattccagtaatctgtgtcacttatgagcacttgatcacaaagccagtgctaggaaaagacgaggactttaagcagtatgtcaacaagaacagtaagcatgaagagctaatgctaggggatccctgccttaaggatttgaaaaaaggagatattatacaactccagagaagaggattcttcatatgtgatcaaccttatgaacctgttagcccatatagttgcaaggaagccccgtgtgttttgatatacattcctgatgggcacacaaaggaaatgccaacatcagggtcaaaggaaaagaccaaagtagaagccacaaaaaatgagacctctgctccttttaaggaaagaccaacaccttctctgaataataattgtactacatctgaggattccttggtcctttacaatagagtggctgttcaaggagatgtggttcgtgaattaaaagccaagaaagcaccaaaggaagatgtagatgcagctgtaaaacagcttttgtctttgaaagctgaatataaggagaaaactggccaggaatataaacctggaaaccctcctgctgaaataggacagaatatttcttctaattcctcagcaagtattctggaaagtaaatctctgtatgatgaagttgctgcacaaggggaggtggttcgtaagctaaaagctgaaaaatcccctaaggctaaaataaatgaagctgtagaatgcttactgtccctgaaggctcagtataaagaaaaaactgggaaggagtacatacctggtcagcccccattatctcaaagttcggattcaagcccaaccagaaattctgaacctgctggtttagaaacaccagaagcgaaagtactttttgacaaagtagcttctcaaggggaagtagttcggaaacttaaaactgaaaaagcccctaaggatcaagtagatatagctgttcaagaactccttcagctaaaggcacagtacaagtctttgataggagtagagtataagcctgtgtcggccactggagctgaggacaaagataagaagaagaaagaaaaagaaaataaatctgaaaagcagaataagcctcagaaacaaaatgatggccaaaggaaagacccttctaaaaaccaaggaggtgggctctcatcaagtggagcaggagaagggcaggggcctaagaaacagaccaggttgggtcttgaggcaaaaaaaagaagaaaatcttgctgattggtattctcaggtcatcacaaagtcagaaatgattgaataccatgacataagtggctgttatattcttcgtccctgggcctatgccatttgggaagccatcaaggacttttttgatgctgagatcaagaaacttggtgttgaaaactgctacttccccatgtttgtgtctcaaagtgcattagagaaagagaagactcatgttgctgactttgccccagaggttgcttgggttacaagatctggcaaaaccgagctggcagaaccaattgccattcgtcctactagtgaaacagtaatgtatcctgcatatgcaaaatgggtacagtcacacagagacctgcccatcaagctcaatcagtggtgcaatgtggtgcgttgggaattcaagcatcctcagcctttcctacgtactcgtgaatttctttggcaggaagggcacagtgcttttgctaccatggaagaggcagcggaagaggtcttgcagatacttgacttatatgctcaggtatatgaagaactcctggcaattcctgttgttaaaggaagaaagacggaaaaggaaaaatttgcaggaggagactatacaactacaatagaagcatttatatctgctagtggaagagctatccagggaggaacatcacatcatttagggcagaatttttccaaaatgtttgaaatcgtttttgaagatccaaagataccaggagagaagcaatttgcctatcaaaactcctggggcctgacaactcgaactattggtgttatgaccatggttcatggggacaacatgggtttagtattaccaccccgtgtagcatgtgttcaggtggtgattattccttgtggcattaccaatgcactttctgaagaagacaaagaagcgctgattgcaaaatgcaatgattatcgaaggcgattactcagtgttaacatccgcgttagagctgatttacgagataattattctccaggttggaaattcaatcactgggagctcaagggagttcccattagacttgaagttgggccacgtgatatgaagagctgtcagtttgtagccgtcagacgagatactggagaaaagctgacagttgctgaaaatgaggcagagactaaacttcaagctattttggaagacatccaggtcacccttttcacaagggcttctgaagaccttaagactcatatggttgtggctaatacaatggaagactttcagaagatactagattctggaaagattgttcagattccattctgtggggaaattgactgtgaggactggatcaaaaagaccactgccagggatcaagatcttgaacctggtgctccatccatgggagctaaaagcctttgcatccccttcaaaccactctgtgaactgcagcctggagccaaatgtgtctgtggcaagaaccctgccaagtactacaccttatttggtcgcagctactgagggatgaacgaaagccccctcttcaactcctctcactttttaaagcattgatattagtatcttctcagatacagaccattttatgattttttaaaaagtaaaagttctaaaatgaagtcacacaagacaattattcttatgcctaagttaacagtggataaaagacttttctgtaaacaactccagtaataaatatcatgaactaatatggtttttgtattcatttgtttctgaaaaatgtgcattatgtactatgaggaaatttctacaaagagatgaagacaattgaaagccagctatctgttattgatctaagcactcccaacatgtctcagaccctgaaccgccagttataccctacactgataggtctcgaagcactttctttccatagctcctaatacagaatctgaaattggcctaaatctttctggtttaaaaacaaagcaaacccacaaatggaaaaagcac

SEQ ID NO: 61679 - DNA, 1368 bp, Homo sapiens
agaaacccccaccccttctccgtgtctctactcttttctctgggcttgctccttcactatgggcaagcttccaccttccattcctttcttctcccttagcatgtattcttcagaacttaaaatctcttcaattctcacctgacctaaaatctaagcatcttattttcttctgcaatgctgcttgaccccaatataaactcgacaggagttccaaatagccagaaaatggcacattcaatttttccatcctacaagatctaaataattcttgtcgtaaaatggcaaatggtctgaggtgcctgaagtccaggcattcttttacacatcagtcccttcctagtctctgtgcccagtgcaactcgtcccaaatcttccttctttccctcccgcctgtcccctcagtcccaaccccaagcgtcactgagtctttctaatcttccttttctacagacccatctgacctctcccctcctccctgggctgctcctcgccgggctgagctaggtcccaattcttcctcagcctccactcctccaccctataatccttttatcacctcccctcctcacaccccgtccggtttacagtttcattccgtgagtagccctccccctcctgcccagcaatttactcttaaaaaggtggctggagctaaaggcatagtcaaggttaatgctcctttttctttatcccaaatcagatagcgtttaggctctttttcatcaaatataaaaatccagcccagttcatggctcatttggcagcaaccctgagatgctttacagccctagaccctaaaaggtcaaaaggccgtcttattctcaatatacattttattacccaatctgctcccgacattaaataaaactccaaaaattaaattccggccctcaaaccccacaacaggatttaattaacctcgccttcaaggtgtacaataatagaaaaaagtttcaattccttgcctccactgtgagacaaaccccagccacatcttccagcacacaagaacttccaaacggctggaccggcagcagccaggcggttcctccagaacctcctcccacaggagcttgctacacgtgccggaaatctgggcactgggcaagggaatgcccgcagcctgggattcctcctaagccacgtcccatctgtgtgggaccccactgaaaatctgactgttcaacttcacctgggcagccactcccagagcccctggaactctggcccaaggctctctgactgactccttcccagatcttgggcttagcagcttgaagactgacactgcccgatcgcctcggaagccccggagaccatcacggacgccgagctgccagtaactctcacagtggaagctatctggtc

SEQ ID NO: 61680 - DNA, 1553 bp, Homo sapiens
cgcgtccgcggacgcgtggacggacgcgtgggcgtctcttggcccgcgcttaaggccctcgcggggggcttgtgggtcctcctccccctcccactgacaactgccccaactgctcttcccgccccggtcacagtgaaaatgtagacggggtcgttgtccgtacgactgtgcgccagggctcggggaggggcgccctccgcgtgagcgcccccctgggaatattgaacataatcacctctcattccagactatgttaggtcttaatggtgggaggacgcccgagtgctcggcccgtttcaccccgaggaggaaggacactgggtcatgacgccatcagagggcgccagagcagggaccggacgcgagttggagatgttggactcgctgttggccttgggcggcctggtgctgcttcgggattccgtggagtgggaggggcgcagtctcttgaaggcgcttgtcaagaaatctgcactgtgtggggagcaagtgcatatcctgggctgtgaagtgagcgaggaagagtttcgtgaaggttttgactctgatatcaacaatcggctggtttaccatgacttcttcagagaccctctcaactggtcaaaaactgaggaggcctttcctggggggccgctgggagccttgagagccatgtgcaagaggacagatcctgttcctgtcaccattgctctcgattcactcagctggctgctacttcgccttccctgcaccacactctgccaggtcctgcatgctgtgagccatcaggactcttgtcctggtgacagctcctcagtggggaaagtgagtgtgctgggcttgctacatgaagagcttcatggaccaggccctgtgggagctctcagcagccttgctcagactgaggtgaccctgggcggtaccatgggccaggcctcggcccacatcctgtgtcggaggccccgacagcgcccaactgaccagactcagtggttctccatccttccggacttcagcctggatctccaagaggggccctctgtagagtcccagccctactccgatcctcatatacccccggtatctaagaatgccaaggccagaacaaggaaatgtagtttagtatctggtcacgggagagaaaataaaagctgcagaggttgggggtggggtcagggattctagggatggggcagagtggcagcatcctttgtacctacaggtggatcccacaactcatttgacctttaaccttcacctgtccaagaaagagagagaagccagagatagcctgatcctgcccttccagttcagttctgaaaagtaaggttgggacctgggtacgtggatccctgagtagatcccagcatctgggccatggagaggttggggcaacaggttattgattaacctgactttatagggactgaagtccacctccagagacaagtccaagttcttgatccacccattccccctataatggcagaggacctttatgtctcttttctctcccttatacccttggatcacagctccagttgtccccagagcaccctgggcctgggctgagc

SEQ ID NO: 61681 - DNA, 774 bp, Homo sapiens
ggaggaaacacacattaaaaataaattaaaaccttaattatttaattacaagcgtgataaatgctaaaaataggaggcacaggaaagcaggataacctataattggaggaaaacctgtctgggagatcaagaaggcattcccatacattgtcgtgacaaccttttttggaaggcaatactgaagtctattaaatgacacagctccttcgacctagctgttccactttaggaataaaagtaatatagcaataaaagtaatactacttaaagcagcatgtggctttggctcccagtgaagttgcaggtgttacaaagcataatatgcctccaagccaggctgcccaaaaggtcaaatccagaaaccagtctaatagactgaggaaagcaagtgaaggtaacttgacacgccataaagaactgttcaagtgagtggactcattgtgagatgcctgatgcactccagagaaatcagatttaggtccaatagcataatacaagaagtcaagcacgtgagggcctcctgtgagatctcgatggggcagccaggcacggggactcacgcctgtaatctcagcattctgggaggccaaggctggaggatcatttgagcccaggagttcaagattagcctgggcaatatggtgaaaccccatttctacaaaaaaatacaaaaaaaattaactgggtatggtggtggtgtgtgcctgtagtaccatctactggtgggagctgaggtaggaggatcacctgagcctggaaggttgaggctgtaag

SEQ ID NO: 61682 - DNA, 1322 bp, Homo sapiens
ttttttttttttcacattaccgaaaggccaagtaatgtggtgtgattactataattcctacaacaaaacttccacttagaatagttacatgttcccaaactatttttcttctgtctgccatgctggcttctgtatcccatggtccactgtaatctttttggtcttctttttttgcagtacagcagtcctcgtgctgctatccattgagtaggtaaaccaccaattcataggtggccatcataatggctgtgtttgggaatctgtctcactagatgagttgtcagaccacgataaagagacccataaccttcttcttgaacaagcaaagatagagtctgaaaaaaagatctgtattttgttccctcttcacgtagtcttgttcttacaacttcatgtggatatgctatagttgtggcaacaagtttttgaggtggcagcagctagcatcattcccacaaaatctgatgcttctttcacagactcttcatcattttccattgtagaagcagtcttatattccagtagtttttgttttatactttcataaataacaaaatggataacagtctctgatataccagcatatgaagcagacatgcccctataaaatccttttagtccatctgtctgatacactttacgaacacattcaaaagcacccattcgccttttccccgcggttccttgcatcaaagctgtaaccgagtctttataagccaaatggggttggttgctgtgattgcagtaaaacctgccattgcagctgaaatcatatgtacttgggtagaatcaggatcaaatacatcattcaacttttccttgcagtttgaataagcagcaaagtatattgctctggaaggggctacccccactaaattggggcctagtcctctaaacaaggaacgaggcccttctttttccaagatcacctttaggcaatgaagaggtccgggagacactactcggttgacactggctccagccatggtgttcagctgaacttcagaaatataaagcgtcacagaagatgactgcagtcgtgtttttacaacttccagtggacatgtcagaatagctcccactgtaccaccacatcctccggcaaacagatgcaccagcgtgtccctctggctcattctctctcccgcatgtcctccggccgctgaggcgggacgcggatctggccgcccgctacggcaggcggcttcggtcccggactggagacgcacagcgccccggggacggcgaggagagctggccgagatgcggctgcagaaagcaaccggcacagccctccccgcggcactccagccgcgacgaaa

SEQ ID NO: 61683 - DNA, 1038 bp, Homo sapiens
tttcgtctcggttagggcctcatcgctctgctcccgctccttagggaagcctcggtgattctgccacagcctcagcctctgtggctctgtgacctgccggtattggatgattcgtatctaagactctgggacactcctgaagtcgggaaatggtgagtgtgcagggcagggcgtcccaaggctgtggaggcctcatcggaaccggcgggaaatggcggcggtgggaggagtctgtgaatggagttcccgctcagccctctgtcctcagtcccctccggtgagggacccgcgctcttgtcagtccccgtacagcggctctggcccagcctgcagccctccttgtgcagctctgcgccggtagccctgcactttccccgggctgtggagtgagtaggagctcatccggaagacaccgcggcggcctgcgcggtgccggcgtgggaggagctgtggtccggaatcccgtccctactttaccctgttcagaatgagattgaggccccatcaaaacatggagttcatgtgagcaaacaggacttattaatgggaaagctctgccgtggctcgtggtttggggactgccagcgggtcttgaaggaaaggcttttgtgaggtgtgtgaggaagcgaagcaaatcacctgcctgcgccaactttgccgccagtccccttgccctgtgcgcctcctccgcgtggctgttcctgaatacgctggtgtctgttcgcatcttttagaatacgctggtgtcggtgcgcacagcgcttctcttagttctacggagtcttcgctgtgtcgccaggctggagtgcagtagtgcgatctcggctcaccgcattctccacctcccaggttcaagcgattcacctgctcagcctcctgagtagttgggattacaggcgcgccaccacactcagctaatttttttgtatttttagtagagacggggtttcgccatgttggccaggatggtctccatcttctgacctcatgatccaccagcctcggcctcccaaagtgctgggattataggcgtgagcc

SEQ ID NO: 61684 - DNA, 1786 bp, Homo sapiens
tttttattattttgtgttttttatttattttttttaaattcatgacactttttactatgccccattgcacgttctcatccatggatttgccttgccgttaagaattaattaaccatggccttgtggccctgggctgacccaggctgcgttttatcttgcacagctaaaagaggttctgatgggtggctcaacaccccaacccaactcctaataccatgtcatcaagtgttcacaattttccaaaatgaagttgaagtgccttgatctgtccactgccaccaccaaccagtgctggagttttcccatgtgggttttgctttttgtggtgttaactggcccttgctgctaagagcaagcaaggactgttctgcgtaagcgcctgccagcctggggacctcactcaagttccccaggggtattcaaagaccggcagcgggctcccattccagctcccgatggcacatggacaaccactccggtatgccctcttcccacgggcgcttcagcttcattgagcaagcgtgatgacctgtacgtgcccccagtgcagcccaagggggtggccctaagggccactggcaccccccaggggggttcacccttctcaggggggaagtcgtagcttctccacacagtaggcagcctggcttgcaaaggccctcattgatctcgaagatgtccacgtcactcactgtcagccctgctttttgcaaagctactgggatggcataggcaggtccaatgcccatgatgtcaggtgggaccccaaccactgcataagacctcaggaccccaaggatgggaaggcccaactcttctgccttggacctccgggccagcaggatggcagctgccccatcactcacctggctagagtttccagctgtggtagaaccatctttcttgaaggcaggcttcagtttggccaggccctccatggtggtgctggggcggataccctcatcctgggtcacagtgatgctcctcttggtgcccttgtcatcatggaccgtggtggtcacaggcacaatctcagcttggaaacagcccttgctctgggctcttgctgccttctgctgggaagccagggcaaaggtatcctgcttctcccgtgaaatgccaaaccgctcagccacattctcagaggttatccccataggaatcaggcaatctctggccttctccttctccatcaagcgcgaagtaatatttccagggttccctctgtcagccagggacatggactccaccccacaggccatgccaatgtcataagacccatttctgatgccacctgctatgctggccactgcctgtagccccgacgaacactgtctattgacagtggacaaaggcacagtctccgggatgtcactcagaaactgggcgattcgggccatgattgccccggccccaggctgcagcacatttccgacacagatgtcccccagctgttccggcctcagattcacgtccttgagaaccgcggtcatgactgccgagagaagctcgtcgggggtggtgtccttgaagccgccgcggcccgcccggcagatggccgtgcgccgcccgtgcaccaccaccacatccgcggccgaggcatgcggggcaccgctcaggcaaggcgcggcctgcggcatccagccggaatcggccggacccctcaggtggcccagcactacctgcagcctctgcattgcgcaggtcaaccctgcagaccagccaccagtccgggaactgaccgcggagttaacagacagccgtccgcacacgcgcagaaccacat

SEQ ID NO: 61685 - DNA, 2474 bp, Homo sapiens
  misc_feature (1)...(2474): n = a,t,c or g
ttttttttttttgcgaatctgttgatttatttacggctcggtgagacgacgctggacgctggttagggtaagggttagggcaagcattagcagcaggggcatggccctgggaagcacctggaccccagaacataagacaggagggagagatgccatccattcagcgggcacttatgcccacgaccagctgagccagaccagcattcccatttcaccaccccttactcctcaagatgcaaatgaagctcagggctgggcggaagctggcagggctgtccacagggaggacccccgtgtgtctctcgggctgcccaggtggctctgtccacccttctgtctgggaggctccttaaggctggggagggcccagagggaaggagatcctgaggggctggcagattcaggccctccctgcgagctgaggtttgaagaggagagcagaccacccagagtagtgggagaaagcaccggcagaaaagctggcatatccaccgagggcctctctgcttcttttgacctttttcagagtttcagagttatgaaccaaatcgccttcatgagagatgacgaatcagatgctacatagtgggggaggcggcagctggcctggctcccccacttccccaggacctccgcctggaggaagcctgcccagggccgcagccctgcccccaaagaccccaggacagaccagagctcctgctggagccgggtgtccccatgctgacctggccatgtccccaggtcccaccccagggtcacttcctgtagctccgacttctctagtggctgattgcagttcccagaatgtataacatcccagggtgccagagcccacccaagcagccactcctgtccagttcccagaatgtataacatcccagggtgccagagcccgcccaagcagccactcctgtccagttcccagaatgtataacatcctagggtgacagagcccgcccaagcagccactcctgagtcactcgggcatgtccaggactcaggtccacacagacagtggcaacagctagccctgggcatctacccccatgaaggggaccctcggttctgcgagagagatccccgaagtgggaactgggcccccatggtgcccagtgcctctccccctctcctctgccactctgccctgcacccagaggcagcgctggaggccttactctaccactcagggcttctcaaacctctggttccacttttctccttttaagctttccattttgtaaactcacctcccccttcccaggcttgggggtccaaggaaccccagctggtgggagaagcgtctgcactgtggtgcagggggtggtgagtgagcgaggaggcactagtgtggggcagctacttcacctccctgtgcctctgtgtcctcctctgtcaaaggggcaagataatggctcccattgccgggctgctatacagtgctcagggccacagtgcagtggggggacccacgtccatcgccaccttgatgcatacaacccggacaagtttactgctgtgatttctgccggcgctgctgtgccggttccctggtgctgcacagccacgcactccccatgagtgggcctgcccagcattagctgagtgccttctgtgtgctctacgccaggtgccaagggcaggccagccaggcagaaccatgtgtggggctgggacaggtcagggtggtggaaaggtggacagaaggaggcaggaggcaggtgtgagaagctgcccaccccacccctcaacaccacagcacttccagctccagcaggtccttgttctcagctgcccctgagccatgggtggccaggtctcctccccatcaccccactgagactcgagacagggaggacctgatcctggagtccctcccagccctggctgaggaagccacccaacccgacaatgggcttgcgcaagccgcgcagtgactgctcccagcctctcccaaggacttaggagcccaaagccgcctccctcccggtgagcatcccaaggcatcgctggctgcagctgagagggcctcatttgggcactgcncctgaggctggcacttgcaggtgggggcccttgggagctctgggaggcacctggcagcctcccagacaccccgggccggtcctgctctccaggcttagggctacagccacaaccactgggggtaggggcgaggggagtccaggcccaccctgtgctggcagcaactccttcccagctctgggcccagtatgatgcccatcttccctctggggagtcacgttcctcccgctccgggcccgttcccacccaaggtccctttgcagaagactggcactgtcctcctccagcgggaactgggtgtgccctcagcaagactctgccccctcccatcctcatgttctcaggagactgaagctgggcactcagaaccagccccaggagcagaacgcaggcctgcatatagactcactgcaaggcggacgcgtggg

SEQ ID NO: 61686 - DNA, 1938 bp, Homo sapiens
ctattctgtcaaagagacggtgccaaaaggcaaaaacaaaggagctgatggcaaagaaggtagctgtgattggagctggggtcagtggcctaatttctctgaagtgctgtgtggatgagggacttgagcccacttgctttgagagaactgaagatattggaggagtgtggaggttcaaagagaatgtggaagatggccgagcaagtatctatcaatctgtcgttaccaacaccagcaaagaaatgtcctgtttcagtgactttccaatgcctgaagattttccaaacttcctgcataattctaaacttctggaatatttcaggatttttgctaaaaaatttgatctgctaaaatatattcagttccagacaactgtccttagtgtgagaaaatgtccagatttctcatcctctggccaatggaaggttgtcactcagagcaacggcaaggagcagagtgctgtctttgacgcagttatggtttgcagtggccaccacattctacctcatatcccactgaagtcatttccaggtatggagaggttcaaaggccaatatttccatagccgccaatacaagcatccagatggatttgagggaaaacgcatcctggtgattggaatgggaaacttgggctcagatattgctgttgagctgagtaagaatgctgctcaggtttttatcagcaccaggcatggcacctgggtcatgagccgtatctctgaagatggctatccttgggactcagtgttccacacccggtttcgttctatgctccgcaatgtactgccacgaacagctgtaaaatggatgatagaacaacagatgaatcggtggttcaaccatgaaaattatggccttgagcctcaaaacaaatacattatgaaggaacctgtactaaatgatgatgtcccaagtcgtctactctgtggagccatcaaggtgaaatctacagtgaaagagctcacagaaacttctgccatctttgaggatggaacagtggaggagaacattgatgtcatcatttttgcaacaggatatagtttctcttttcccttccttgaagattcactcgttaaagtagagaataatatggtctcactgtataaatacatattccccgctcacctggacaagtcaaccctcgcgtgcattggtctcatccagcccctaggttccattttcccaactgctgaacttcaagctcgttgggtgacaagagttttcaaaggcttgtgtagcctgccctcagagagaactatgatgatggacattatcaaaaggaatgaaaaaagaattgacctgtttggagaaagccagagccagacgttgcagaccaattatgttgactacttggacgagctcgccttagagataggtgcgaagccagatttctgctctctcttgttcaaagatcctaaactggctgtgagactctatttcggaccctgcaactcctattaatatcgcctggttgggcctgggcaatgggaaggagccagaaatgccatcttcacccagaaacaaagaatactgaagccactcaagactcgggccctgaaggattcatctaatttctcagtttcttttctgttgaaaatcctgggccttcttgctgttgttgtggccttttttttgccaacttcaatggtcctagtcagcataatgctttgggctttattatcttgtcagtcactacctcctaaagaaaaaaaaaaaggctaaaaaaaaaaacattacattcatgttctaattataaattttaaagttaggtactacaggcaggggggaaattgtaaagaattaccaaaattaggcttatgtacaaaaccaaaatttggccatgaaattttgcctttccatgcttccctcagttcaccaaagttaccaaaatgtaaaataaaataaaactggctcaggtaagtagggctgccaaccc

SEQ ID NO: 61687 - DNA, 2789 bp, Homo sapiens
cccacgcgtccggcgatgcctaagcggttcaccttttagccaaggtcctccagcgttcctagagcggagaagaaagcgctccgaagagctagagctgacactcggcgatgagctaagacgctgtttcagagcgtttgggtcctctgaggccccttgaccaggagtgtctctgaagatacagtccaaagaaagttctccaaaacaaggagagcagtctgaagctggggatggcaacagcattggtgagtgcccattccctggctcccctgaatctgaagaaggaggggcttcgggtagtgagggaggatcactactctacttgggaacagggattcaagctgcaaggaaacagtaaaggccttggacaggagccattgtgcaaacaattcaggcagttgcgttatgaagagaccacaggacctcgagaagcactaagtcggctccgggagctctgtcaacagtggctacagcccgagacccataccaaggagcacatcctggagctgctggtgctggagcagtttctgatcatcctgcctaaggagctccaggcccgggtgcaggagcatcacccagagagcagggaggacgtggttgttgttctggaggatttgcagctggatcttggagaaacaggacaacaggtggacccagaccagccaaagaaacaaaaaatacttgtggaggagatggcccctctgaaaggagtacaggaacagcaggttcggcatgagtgtgaagttacaaagcctgagaaagagaagggtgaggagacaaggattgagaatgggaagcttattgtagtaacagactcttgtggaagagtagagtcatctgggaaaatatctgaacccatggaggctcataatgagggctctaacttggaaaggcatcaggccaagcccaaagagaagattgagtataaatgctcagaacgtgagcagagattcatccagcacttggacctgattgaacatgcgagtacacacacgggaaagaaactctgcgagtctgatgtgtgtcagagttccagtcttacaggacataagaaagtcctctcttaggagagaaaggtcatccagtgttcatggagttttggggaaagcctttcagaggagttcacacctcgtcagacatcagaaaatccatcttggtgagaagccttatcagtgcaatgagtgtggcaaagtctttagccagaatgcaggccttttggaacatctcagaattcatactggagagaaaccttatctatgtatccattgtggaaaaaattttaggcgcagctctcaccttaatcgacatcagagaattcacagtcaggaggagccctgtgagtgcaaggagtgtggaaaaacctttagtcaggccttactcctcacccaccatcagagaatccatagtcactccaaaagccatcaatgtaacgagtgtggaaaagctttcagtttgacctcagaccttattcgacaccacagaattcatactggagaaaaacctttcaagtgtaacatatgccagaaagccttccgactaaactcacaccttgctcagcatgtaagaatccacaatgaagaaaaaccctatcagtgtagtgaatgtggagaagccttcaggcaaaggtcaggtctttttcaacatcagagatatcaccacaaagacaaactggcttgatgaggtgttctctccttgtagaacatcagagaaggcacattgactagcaaacagcactttaggaaaagtcaccgtagcccactgtggcatcagaaaattcttgggggctgagttggaggctccctgcctctattctctctcctttgctttccttgaagtcagctttggaccacaataatttcactgtagatgatatgctaggatcaaagttaaacagcattcttcactgcaggacatctcagagcatgtaacataactgcatgattatatactctaagcaatagagagcttcatgactgagtaagagttttgaagtcagcagtgaatcaagtgcccacagatttgcaggcttaagcagaacaagggaagattgatatttttggatatgctatagcagctttctcctatgaaataaaactgatgatgtttggaagtatactactctcaaaggtgtctttaaagtacaggttaatggtgaacattttcccccagtggcttcacctcattcctcccactggccttaccccttccttccccagtggaagcattttcaaaagcaaagataattttcgctggtgaacttcagaacttgccttcagggttagcttcatgtaattttaccatttcccatccccattccccaccacattatgtcaagattcaagttataaattaacgttttacttagactttgaaagagatttcatgagtaatttgaatgaaccttgctgaattaatctgaatagcaactgtctgacttgataactccagtgccagtatagtggctgctgcatagacactattcagtaaatgtctgatgaaagaaattggactttttccctttaatactgatgatgcaattttgaaatgttgcttgttctggaatacttcggaagttaaacaataaagtcagcttggagaggagatcatgatctttatactgtgaatagcagaatgtcacagatgaagaatattaaaattaggggcgtccactccaaaacatatcaccagagtgacaacttcagccctcagcctctgcaatccatatatatcctggtcttgggagtccatagaatactgtttccttctaataaaggtttcaaacaaaaaaaaaa

SEQ ID NO: 61688 - DNA, 2961 bp, Homo sapiens
ttttttttttttatatagagattgtacatttatttattactgtccctatctattaaagtgactttctatgagccaaggtcttttactttttcttcttgcctttaggggcttcagggggtttcccctcagctacagccaactgtttctttagatccaagagtttcgccacctccgcagcaacctcgttcttgtctgccttttgtgctttcagttctcggacaatgtttccttgttttgtcacttcatccatcagcgcttgtatctgctgtggcttggctgttgtaacagtctctacaactgctggcttcggggacgtttttgcctggccccctccaaagcgctgccttaaactttcaatctggtcattttccaatttttggaacaagggactgactgtgccaatctggtgtcctgctggtaaggtacacaggaagtttgtcagcaggatactgcaggctggaggtgggagctgcagctgggcctggattgtggcactaaccgtgggcatgtaaggctgaagcatgacagagagcaaggcagctatattcactgccaagccagtcactgttcctgcccgttgcctgtcagcctcactgcctttaatccgcttcccagggctcattcacctggaatatattggttgccatgtcggagatatggtgaggatactgcgcaaggcatcccggatccgaaccttctcaagtagcttggtgatagtgctggagctccagggtgacattgggccagcaggcgctgatcatcaggggtgagcaccatctcaggcacatagcccccaaagaacttagacacaaacatcccagctctgttgatgaagttgcccaggttgttaagcagctcagaattattcttcagcagcaggtccgtccaggagaaagcactgtcgcttgccctcaggccgaatgtacagcaagatagaagcgcgagatgtcaggagggatccccgtgtcgtgggcccatgtcccgaaacactcccacaccgcggctcttagagaattttcccatcctcatagttcaggtactctgtagcaatgaggtggctgacacaaggtatagttatcctcagctcctagggctgagctaggaaagactaagctatggaaaggaacattgtctttggcccatgaactgatacaggtcgacttgctctgggttcgttccaccatctctcccactggtctgtgtagttggctgtgatggacagatagccaatagtggcatcaaaccagacatagaatacccttgtcttcaaaaccttcttaaggggtaccagggttcccccaatttgaggtctcgggtttattgccagcgtggctttgagggccattcccggaagccaaagaacggggtgataaactgggcattgggtgtccagtcactgccaggcaatgtcctccccaaccactcctccagtcgcttctccagcttaggcaggtccagaaacaggtgctggctcgactgcaccacagggcatgatcggcagactttacactgaggcttcttaagctcgacagcattgatgagcttgccacacttgtcacactggtcaccccgagcctcctcatagccacagaagggacacacgccctccacgaagcggtcagccaggaaagcgagcacagtgctcacatcgcagttgctccacagtatcttgcagcacaaaacctcgtttcagcaactgctggaaaatgtcctgggtgattttggtcctgctgtggagtggtggtgcgaccaaaaatatcaaacgaaatgttaaaccagcagtagatgtcagcatggatgatgtggtacttgtcgcagatctcctggggggttagtccctcctcccagagccttggtctctgttgctgtaccatactcatctgtcccacacagatagagggtgttccactggcggaggcgagagtacctggcaaagacatcggcactgagcacacaaccaatgatgttcccaaggtgggggacattgttgacgtaagggagggcactggtgatgagcacattcctttctccagccacaggcaacactggattctgctggggccgcagcgggggcaaactttctaggcccttctcccaagcagtaacagccatagcaatctcctcctcagatagggtagccagctcctcctcctcaggctcaattggtgacagccctttcccttcagcggggctgggctggggctgcttttggaggtaaggcccggagagccaggacaccttgcttgtttcagtacaagtcttcttgcagcttcgctgacatggttccttgggtactcagtgtctggaaccagctgtgcagggcactcagctcctcagggaggtaggcgggatcttgcagtaatgggtatagggctccccacaaaacaatgtcggctagagattctgtctccccagccaggaaaggacagtttctgacgactcaagctgtggtcaatgtgagtcagggttctccgcactgaaccaagaacatcttccccctttcttgccttggaccacttaaatagtacagggcagcagacaaagttggctgcagctctgtcgcttcccattccagccactggttagtgaggtcatcttgctcccagccagataacaaaaaaaaaatatcggcagattgcactagtggagaagaggtagttgccgctatccagctgcaagacagggaccttaggccgggtcaggaacgggaccacacaatcttccgggcctacagtgctgatgagcacctctgctctgccccgggctctcccggcggcggccagcaccggcaagcaacccggaacgccatcactcacgaacagtctcatttcgccgtgaatccctcgctgatttataaagtgcctgcttttcctgtgggaattccagaatagatataatggtggtggccaggggctggatggagggggatagaaagggatagctccaaggaggctggggtgg

SEQ ID NO: 61689 - DNA, 842 bp, Homo sapiens
aggggctgggccctgggagagaggaggctgtagctgggggctccagcccgcagggcccagcctgggtgtgtcctgcagctcctgctgaggctgggcccaggcctcccagccacgtgtgcccagctgtttgtaggtcctttgaagggctgtgtgccaggtgtttgtgcgcccccgtgtggggccgatgacagctgtgcacctggtgtcttcgtgtgcctggctgccagcgcgtgtgccctgtgcgctgtgtgtcccgcagggtccgtgtctgtgggggggtccatgtgtacaaggggtgtgtctccaggcctgtgctctcacgtgtgcggccagccccccgcgtgcatgcggggcagcatttatttgcacttggtgcacatagtagcctgtgaggtagcccaggatgaagatgatccagaagagggccacgccgcccagcaccttcatggcgatgcccagcttgcccgtgcacagcctctgggagatcctgcggcagcgtgaggcctcttctgtgctggacacagcccctaggctgactccgtccctgctgccgtcctcccacctactatagtggacgtggctctcctggggctgcatgctgtggggctgcagcgggaggggcggggccttctcggtggggagatcaagacaggtggccaggctgtggcttcaccggagaaccttgcctgagggctggggcctctgggccaggttgcggtcagggcctggccagcggcccgcacctcccagcggggcaggtcgtgggctgaggtgcggcagacgcctcgagcctgtgtccccgcgtctctgggctccgcaggggccgaattccaccacactgc

SEQ ID NO: 61690 - DNA, 808 bp, Homo sapiens
gggaggtgctcagtcaagcctctgagaggagtggggggcggggcgaggagtctcttgctcagagccccttagggactgggacccgttgactctgagctgcttttgaggctggatcaggtaccagcggcctgggggtcgtacaggatgggagaggccggggcttgggatgttgccagatctacgttgaaaagtgaagcaggaagagaggcactgaggctgggcacatggggaaaaccgtggagagccggcctttggggactagaagagtgggaacaatggttgacaaatggtgagtgtggggtagaacagcagtaacacaataccaggatccacagagtggccagggccagagtggggagaaggaacaggactctgcagatggggagggtaaggggctgggtggcgtgaagggtggttgcagaattcggggagggcagctagcctgtgacccaggttccaagggcactgaggtctgggccaggccgcttggaggcaccagagcctcagaggaggggtggggtagaggaacggatccagcatggtgtcccccttggccaccagagggagttttctaaatttgagcatggctcatcgctgcttgaaattctacgtcacagtgtggcctgcattgaggagggcccacacctgtcgctacctcagactcacctgccacctgcctcaagtgcatgagagagaacaggaaaccagaaattgtcaggatcgaggattatgggaaaagagtaaaagcctagctgtcagatctgaggttccaccaaggagcactgatgggtgcttctcattaggaagg

SEQ ID NO: 61691 - DNA, 704 bp, Homo sapiens
agcgtggtggaattcccgcgggtaaggccctccctagaccctttatacctactttacctttcggaggtcaagacacctcctgttgccgcctcctcgcccaacacacaggcgccccccgcacgggtaccaagcttgactaacggcctctaggggtgtgtggtgggacttgaaatcctcccttaatgaagtcacaccttctccgtccgcttccacccggtcggcccatggcagagcccccatgtagcccaggaatcggcttggcccttcggggaggtcagcgtccttactatccccactctccagtgcggcacattcgttcccctaggactccggccggttgccggccccaggcggtgcttctccccaccaccgcccagctcagctcagcccagcccagcccactctgcccttagaggcccttctccccaaagacgcactccagaagtctcgccctcgtgcggctgaggagcctgggatcccagacctgaacaaggtgagcatccctatattttagcccagaaagatctgtgtggctcacttgccggcctcgttctgtcacacagagtccagatttagccttgagttttcctagtgaaagacagaccctggtatcactatgaccctcctcaggctttcttaccccgcctcagaaagcagtgaggtgtctgctttctcccagggcttctttagataggggtcttaac

SEQ ID NO: 61692 - DNA, 2411 bp, Homo sapiens
  misc_feature (1)...(2411): n = a,t,c or g
ggcacgaggagatgctgatcctacagcactcccgctgtgcctcagcagtgagctgggtgtaaaggcaggaggcttgctggggtctgacacttccctgccctcctccaggagggacacatctggggctctatgaggaggacagctttcatcctgggctctggacttctctcatttgtggccttctggaactcagtgacatggcatcttcagagattttggggtgcttctggctacttttggcaagcccagtgggagaggctgctgactacatttgaagggaaggagtggatcctcttctttataggtgccatccaagtgccttgtctcttcttctggagcttcaatgggcttctattggtggttgacacaacaggaaaacctaacttcatctctcgctaccgaattcaggtcggcaagaatgaacctgtggatcctgtgaaactgcgccagtctatccgcacagttcttttcaaccagtgcatgatatctttccccatgggtggtcttcctctatcccttcctcaaatggtggagagacccctgacgccgtgagctacccaccttccactggttcctcctggagctggccatcttcacgctgatcgaggaagtcttgttctactattcacaccggctccttcaccacccaacattctacaagaaaatccacaagaaacaccatgagtggacagctcccattggcgtgatctctctctatgcccaccctatagagcatgcagtctccaacatgctaccggtgatagtgggcccattagtaatgggctcccacttgtcctccatcaccatgtggttttccttggccctcatcatcaccaccatctcccactgtggctaccaccttcccttcctgccttcgcctgaattccacgactaccaccatctcaagttcaaccagtgctatggggtgctgggtgtgctggaccacctccatgggactgacaccatgttcaagcagaccaaggcctacgagagacatgtcctcctgctgggcttcaccccgctctctgagagcatcccagactccccaaagaggatggagtgagagacagcctaagtgtcatcctggctgtccctcagccatgggatgcagacacggcttcctgattgcacctaacaatttgcctccttcggccacacgccctaatgatggcaccaccagggtagagggaaggtcggcttcccggaaaagcagggccaaggatgaggctttcttcaaactactgcccttgatgtccctcaatgggatcaggagttagcttaagaaaaaggaaaacacagctccccagactggaggctggtcagagggaggagacccctggtcctctgctgtggaaggagaggggttcagccccagataactcctttgtggcctgggcaggatgcagagaatgacaaggctgaaaggagggggactggaggctgcctggctccagcgagagctccttctgggaccagagggtgggacggccaggtatcactttgccccttcctgccccaaaaggctttcacatatccgactcaggccagagccaagacaccctggcaaatcgttataggtctcaattcatgacataccagatgccagtcgccacttcacccaacacacacacaaacatacacacaccaaacactctgagtgagtggtaaaggccccgttttaactctggcccaccgcaaacaaaaggtttccctctgtgggggagaaaaagaaatccaggagctcctccctggattaaaaccaacgaggtgcagaccaaactttaacacctttagccttatgtggaaaccaaaaaccaactgctgggaaactgtgaaaagcccttttacccacaaggggaggggtcaaagttgctgccctttggggacacccgagacccctaattagcctatctgaatgaggaccaaaggttagagccctctttctccccgaagaaagagcccggaaaaacatggcagagcaaagagcaaaatcctttctcccccgaatgctttaccagtttctcagcaacatttattcaagatgatttttaccaggaaccttatcaaaggcaaaaccacagctgcttgggttgaagtccccatcctggcctcctctcagccgccagacatggccaggaaccctgtggttcccaagaacaatttaaagatcactctttgatttgaaagaccaccattatcattttactaaattcttatatatacttgtgccttttccaactttcagttctcttaagaaaaacatccactgtagctttataaaataccttagtatcagctagggtccaagtctccaggcaggactatcaaaatgggactccttcttcctatcagctctagaaccccagangacttgccagtaggccagctgagcacttaccaggcagcatctt

SEQ ID NO: 61693 - DNA, 1273 bp, Homo sapiens
taaggaggagagaccaaaagggaggcctgaactctcaaactccgaatctgattttcactctcccaggaaggcttcggaaatcactgtggattgtcaatacaggagtccatactgactgaatccctaattttggcctgtattcttctccctctgtgaaccatcttcttagaagtcactgaaccaagagtgccagaaaaccatcccaagactcacacagagttgttcttccatagtggatgttttggccactggacatcagaaccacattttgggtttgaagaatcttctacatgctgagaaagtggaactccagagacactcctgaaattgtcctaagtcaaaggagccaaacggtgtacgagctccctctctgccgtcccctctgagagcagccatggccctgagtgatgtcgatgtgaaaaagcagattaagcacatgatggctttcattgagcaggaagccaatgagaaagcagaggaaatcgatgccaaggctgaggaagagtttaacattgagaaaggacgcctcgtgcaaacccaacgactgaagattatggagtattatgagaaaaaggagaagcagatagagcagcagaagaaaatcctgatgtccaccatgaggaatcaggcgaggctgaaagtcctgagagcccgaaatgacctcatctcagatttgctcagtgaggcgaagctgagactcagcaggattgtggaggacccagaggtctaccaggggctgctggataaactggtgctccagggtctgctccgactgctggaacctgtgatgattgtacgctgccggcccacaagacctcctcctggtggaggctgctgtacaaaaagccatccccgagtacatgacaatttcccagaaacatgtggaggtcccagattgataaagaggcataactggctgtggaatgcagctgggaggtgtgggaggtctacagtggcaatcagagaataaaggtttcaaataccttggaaagccgactggatctctcagccaagcaaaagatgccagaaatacgaatggccttgtttggtgctaacaccaacagaaagttctttatataagcctctgggaagtgaagctagtgttgaaccactaaaccataaaagtttaagttttttggggaaaggaaactagtagtgtttcctcctctttgatgctctgatactgttctgtttttcttcacgaaataccctttggatagctaaagtgttaactttgaaataaagcccgaaattaatgctcagaaaaaaaaaa

SEQ ID NO: 61694 - DNA, 2965 bp, Homo sapiens
gaaaagaggacttattgttgtcatggcccatgagatgattggaactcaaattgttactgagaggggggtggctctgctggaaagtggaacggaaaaagtgctgctaattgatagccggccatttgtggaatacaatacatcccacattttggaagccattaatatcaactgctccaagcttatgaagcgaaggttgcaacaggacaaagtgttaattacagagctcatccagcattcagcgaaacataaggttgacattgattgcagtcagaaggttgtagtttacgatcaaagctcccaagatgttgcctctctctcttcagactgttttctcactgtacttctgggtaaactggagaagagcttcaactctgttcacctgcttgcaggtgggtttgctgagttctctcgttgtttccctggcctctgtgaaggaaaatccactctagtccctacctgcatttctcagccttgcttacctgttgccaacattgggccaacccgaattcttcccaatctttatcttggctgccagcgagatgtcctcaacaaggagctgatgcagcagaatgggattggttatgtgttaaatgccagcaatacctgtccaaagcctgactttatccccgagtctcatttcctgcgtgtgcctgtgaatgacagcttttgtgagaaaattttgccgtggttggacaaatcagtagatttcattgagaaagcaaaagcctccaatggatgtgttctagtgcactgtttagctgggatctcccgctccgccaccatcgctatcgcctacatcatgaagaggatggacatgtctttagatgaagcttacagatttgtgaaagaaaaaagacctactatatctccaaacttcaattttctgggccaactcctggactatgagaagaagattaagaaccagactggagcatcagggccaaagagcaaactcaagctgctgcacctggagaagccaaatgaacctgtccctgctgtctcagagggtggacagaaaagcgagacgcccctcagtccaccctgtgccgactctgctacctcagaggcagcaggacaaaggcccgtgcatcccgccagcgtgcccagcgtgcccagcgtgcagccgtcgctgttagaggacagcccgctggtacaggcgctcagtgggctgcacctgtccgcagacaggctggaagacagcaataagctcaagcgttccttctctctggatatcaaatcagtttcatattcagccagcatggcagcatccttacatggcttctcctcatcagaagatgctttggaatactacaaaccttccactactctggatgggaccaacaagctatgccagttctcccctgttcaggaactatcggagcagactcccgaaaccagtcctgataaggaggaagccagcatccccaagaagctgcagaccgccaggccttcagacagccagagcaagcgattgcattcggtcagaaccagcagcagtggcaccgcccagaggtcccttttatctccactgcatcgaagtgggagcgtggaggacaattaccacaccagcttccttttcggcctttccaccagccagcagcacctcacgaagtctgctggcctgggccttaagggctggcactcggatatcttggccccccagacctctaccccttccctgaccagcagctggtattttgccacagagtcctcacacttctactctgcctcagccatctacggaggcagtgccagttactctgcctacagctgcagccagctgcccacttgcggagaccaagtctattctgtgcgcaggcggcagaagccaagtgacagagctgactcgcggcggagctggcatgaagagagcccctttgaaaagcagtttaaacgcagaagctgccaaatggaatttggagagagcatcatgtcagagaacaggtcacgggaagagctggggaaagtgggcagtcagtctagcttttcgggcagcatggaaatcattgaggtctcctgagaagaaagacacttgtgacttctatagacaatttttttttcttgttcacaaaaaaattccctgtaaatctgaaatatatatatgtacatacatatatatttttggaaaatggagctatggtgtaaaagcaacaggtggatcaacccagttgttactctcttaacatctgcatttgagagatcagctaatacttctctcaacaaaaatggaagggcagatgctagaatcccccctagacggaggaaaaccattttattcagtgaattacacatcctcttgttcttaaaaaagcaagtgtctttggtgttggaggacaaaatcccctaccattttcacgttgtgctactaagagatctcaaatattagtctttgtccggacccttccatagtacaccttagcgctgagactgagccagcttgggggtcaggtaggtagaccctgttagggacagagcctagtggtaaatccaagagaaatgatcctatccaaagctgattcacaaacccacgctcacctgacagccgagggacacgagcatcactctgctggacggaccattaggggccttgccaaggtctaccttagagcaaacccagtacctcagacaggaaagtcggggctttgaccactaccatatctggtagcccattttctaggcattgtgaataggtaggtagctagtcacacttttcagaccaattcaaactgtctatgcacaaaattcccgtgggcctagatggagataatttttttttcttctcagctttatgaagagaagggaaactgtctaggattcagctgaaccaccaggaacctggcaacatcacgatttaagctaaggttgggaggctaacgagtctacctccctctttgtaaatcaaagaattgtttaaaatgggattgtcaatcctttaaataaagatgaacttggtttcaaaaaaaaa

SEQ ID NO: 61695 - DNA, 4265 bp, Homo sapiens
ctgctggcttggcacgaggggcgggacccggctgccggcggtgggtctagctggggttaggtcgggccatgctggtgggccagggcgcggggctgctggggcccgcggtggtcaccgccgcggtggtgctgctgctgagcggcgtggggccggcgcacggctcggaggacatcgtggtgggctgcggtggcttcgtcaagtcggacgtggagatcaactactctctcatcgagataaagctgtacaccaagcatgggactttgaaataccagacagactgtgcccctaataatggttactttatgatccctttgtatgataagggggatttcattctgaagattgagcctcccctagggtggagttttgagccgacgaccgtggagctccatgtggatggagtcagtgacatctgcacaaagggtggggacatcaactttgtcttcactgggttctctgtgaatggcaaggtcctcagcaaagggcagcccctgggtcctgcgggagttcaggtgtctctgagaaacactgggaccgaagcaaagatccagtccacagttacacagcctggcggaaagtttgcattttttaaagttctgcctggagattatgaaatcctcgcaactcatccaacctgggcgttgaaagaggcaagcaccacagtgcgtgtaaccaactccaatgccaatgcggccagtcccctcatagttgctggctacaatgtgtctggctctgtccgaagtgatggggagcccatgaaaggggtgaagtttcttctcttttcttctttagtaactaaagaggatgaccctgggctgcaatgtctcaccagtgccctgggttccagcccccaatacgagaagtctggtgtaatttgtgctacacggtctccagagaagatggctcgttctctttctattccttgccaagtgggggctacactgtgattccgttctatcgaggggagaggattacctttgatgtggcgccttccagacttgacttcacagtggagcatgacagcttgaaaatcgagcccgtgttccacgtcatgggattctccgtcaccgggagggtcttgaacggacccgaaggagattggtgttccagaagcagtaagtcaccctgaataaccaaatcaaagttaaaacaaaagcttgatgggctcattcccgccttgagaacataaccacagggacatacaccatccatgctcagaaagagcacctctacttttgaaacggtcaccatcaaaattgcaccaaacacacctcagctggctgacattgttgcaacagggttcagtgtctgtggtcagatatcaatccattcggttccccgacaccgtcaagcagatgaataaatacaaagttgtcctgtcatctcaagacaaggacaagtctttggtcaccgtggagacagatgctcatggatcattttgttttaaagcaaaaccagggacttacaaagtgcaggtgatggttcctgaggcagaaaccaaagcagggctgacgttgaaaccccagacatttcctcttactgtgaccgacaggcccatgatggatgtggcctttgtacagttcttggcatcagtttctgggaaagtctcttgtttggacacctgtggtgacttgctggtgactctacagtccctgagccgccagggtgagaagcggagcctccagctctccggcaaggtcaacgccatgactttcacctttgacaacgtgctccctggaaaatacaaaataagcatcatgcatgaggattggtgctggaagaacaagagcctggaggtggaagtgctggaggatgacatgtctgcagttgagttcaggcagacgggctacatgctgagatgttccctgtctcacgccatcactctggaattttatcaggatggaaatgggcgtgagaatgtggggatttataacctctccaaaggagtcaaccgattctgcctgtccaagcctggtgtgtacaaagtgacccctcgctcctgccaccggtttgagcaagcgttctacacctatgacacgtcttcacctagtatcttgacattgacagccattcgccaccatgtccttggaactatcaccaccgacaaaatgatggatgtcactgtgactatcaagtcttccatcgacagtgaacccgccttggtcttaggccctctgaagtctgtgcaggagctgcggagggagcagcagctggctgagatcgaggcccgcaggcaggagagggagaaaaacggcaatgaggaaggtgaagaaagaatgaccaagcctcccgtgcaggagatggtagatgagttacaaggccccttctcgtatgatttctcttactgggcgcggtctggagagaaaatcactgttacaccgtcatctaaagagctgctcttttatcccccttcaatggaagccgttgtcagtggagaaagctgcccagggaagctgatcgagatccacgggaaggcaggcctgtttttagaaggccagatccaccccgagttggaaggagtcgagattgtcatcagtgaaaagggggcaagttcaccgctgatcacagtctttactgatgacaaaggtgcctacagtgttggccccctgcacagtgacctggagtacacggtgacctcacagaaggagggctatgttctgactgcagtggaaggaaccatcggagacttcaaggcctatgccctggcaggcgtaagctttgagataaaagctgaggatgaccagcccctcccgggagtcctcttatccctgagtggtggcctgtttcgttccaacctcttgacccaggacaacggcattctgacattctcaaacctgagccctggccagtattacttcaaacccatgatgaaggagttccggtttgagccatcctcacagatgatcgaggtgcaggaaggccagaacctgaagatcaccatcacggggtaccgaaccgcttacagttgctatggcacagtgtcttccttaaacggagagcccgaacaaggggttgccatggaagcggtgggccagaacgactgcagcatttacggagaagacaccgtgacagacgaagagggcaagttcagattacgtggattgctgccgggatgtgtgtaccacgttcagctcaaggcagaaggcaacgaccacattgagcgggcgctcccccaccatagggtgattgaggttgggaataatgacatcgatgatgtaaacatcatagttttccggcagattaatcaatttgatttaagtggaaatgtgatcacttcctctgaataccttcctacattatgggtcaagctttacaaaagcgaaaacctcgacaatccaatccagacagtttcccttggccagtccctgttcttccatttccccccactgctcagagacggcgagaactatgttgtgcttctggactccacactccccagatcccagtatgactacatcttgcctcaagtttctttcaccgcagtgggctaccataaacacatcaccttgatttttaatcccacgaggaagctgcctgaacaggacatcgcacaaggatcctacattgccctgccattgacgctgctggttctgctggccggttacaaccatgacaagctcattcctttgctgctgcagttgacaagccggctacagggagtccgcgcgctcggccaggcagcctctgacaatagcggcccagaagatgcaaagagacaagccaagaaacagaagacaaggcggacttgaggaggaaggggacagttgcagtctcacttgggacaggccacagccaggggtccggccactacccgcccgtgggataaaagccaaaagcatgcgtcagctaacttcagcctgtgctgctgggcccgcaccccatgtcccttgtcactgtggcatcctgcacccatcctcacccctccgtagagcccctcgtgcaatgcaatgaatggaccctcctgtcactctgctgaacagaatttattttctgagtcaaatataatttattattatttttgtcaaagaagtatttaagctgtgctgtggtgtgagaatgtcattcttgatcttcagccttcgtttgcaagaagagttccagttgatgtggtgtttggttccatggcggggtaccctagggattcatctgttttcttcacttccctttgcatctgagatcctgctggaaaccacggcaacctgtatccactattaggaggtaaaaatcaataaaatggcccattcatttgtgttgtaaaaaaaaaa

SEQ ID NO: 61696 - DNA, 1169 bp, Homo sapiens
tttttttttttggatgtaaacatttgttttaatttatattaataaaaggaaatgctctacattaaacaataattcatctgggtcttctttgtataatacaaaaattcttccatgggagtctgatgatttgggggccagcaactcttcctcacatgtgtaaaactaagaattgttccaaaattcccacagaaagaccctaaattagcactcttgaagcatgctgacccagtgctggcataagctgaaactcaaatatccttttggcctcccacactggctgcaggctggggagctcggtgacttctgatgtagggcaggtcaaaaagagtggctctccactccaggaatacctcaaaatctgctcctgacaagcagcaattcgcttcatgaatttgtaaaacgtctgatctccacttttaattatggtcttctcatatttttcatcaccatcattaggaaggctttgggaaagcaactgatccatggcaatgccttctctctgctgatagtccctcagaaggctgtgggcatgatccaggttgacaaagtccctgtaatcatcctcatctgcaacacagatgtagtagggcaggaagagcggcagcccaggaggcacaggatgggcagcacccaggacagcatcctgcaggcggaggtcttggagccgagcagtccagtctacgtctttggcactgctggcatcattcccaaaatccaaggtaaactgtggtgaaggcccctcctcagtatcacttccccagtcatcagcaccttcacaccagtcctcagctgcaaggctgtttccctgtttctgagcgtcctgcgcctctctctctggcacctgcaggcactgggagcggaacaccttccagctgcgcgcaccgccggtgctacagccggggcaggcgcacgcgaacacgtgcagcagacggtgaaacggggagccttccagcgggcaatacacctgcacgaccagagcgagcggctgcccgcagcgctgacacacgggcctgggcgcagccacggtgggcagagcatccggaatgccgcccagcttgctagcagtccaggcacccggccctgtggggctgccgtgcaccggcgcatctcgaaggcccagcagcaccggcttcagaacggccgccatggccgccgggcgacctcgtgcc

SEQ ID NO: 61697 - DNA, 3980 bp, Homo sapiens
taaagagcgggcgcacaggaggggaggagaccgcgcgcgggacggggaggaatggcctgtccgcgttaaaccatcacaagccatggttgcggaagggccacgcgtcccccagtaggagaatgactccgattcgtgaccctcagcgccggtgcatgtcgatgtaagtgcgaggccggcgagcagagtgtgagtgggggttggtggtgaggggagattctgatgcaatcggcccggaaaggaggagagccaggcgagcgcggactggggcggccacgccactccgccagaaggtcgccaggagcctccgcccttcaccttcctcggaaatccgccaggccacgccaagctccctgcccaacccttactgacgggggccacatttttccggcctccgcagccagaccttgacacaaaggacatcaaactgccgagggtaaaaaccccggaagggcggacacctccacatcgccttttgccacctttccctttatttccggagatatttattgagtgtctactgtgtgccaggcactatatctatgtgcatagaaaaaccctggaaggccatacaacaatatatatagagtgatcgtctctgcttgctgagctaacaggggtgtcaagcttccattttggtatctacttctaaatacactcagaacaggagaaatttggactaattttcaaactacagacactttctaatcatgatgcatttcaaaagtggactcgaattaactgagttgcaaaacatgacagtgcccgaggatgataacattagcaatgactccaatgatttcaccgaagtagaaaatggtcagataaatagcaagtttatttctgatcgtgaaagtagaagaagtctcacaaacagccatttggaaaaaaagaagtgtgatgagtatattccaggtacaacctccttaggcatgtctgtttttaacctaagcaacgccattatgggcagtgggattttgggactcgcctttgccctggaaacactggaatcctactttttctggtacttttgacttcagtgacattgctgtctatatattcaataaacctcctattgatctgttcaaaagaaacaggctgcatggtgtatgaaaagctgggggaacaagtctttggcaccacagggaaagttcgtaatctttggagccacctctctacagaacactggagcaatgctgagctacctcttcatcgtaaaaaatgaactaccctctgccataaagtttctaatgggaaaggaagagacattttcagcctggtacgtggatggccgcgttctggtggtgatagttacctttggcataattctccctctgtgtctcttgaagaacttagggtatcttggctatactagtggattttccttgagctgtatggtttttttcctaattgtggttatttacaagaaatttcaaattccctgcattgttccagagctaaattcaacaataagtgctaattcaacaaatgctgacacgtgtacgccaaaatatgttaccttcaattcaaagaccgtgtatgctttacccaccattgcatttgcatttgtttgccacccgtcagtcctgccaatttacagtgagcttaaagaccgatcacagaaaaaaatgcagatggtttcaaacatctcctttttcgccatgtttgttatgtacttcttgactgccatttttggctacttgacattctatgacaacgtgcagtccgacctccttcacaaatatcagagtaaagatgacattctcatcctgacagtgcggctggctgtcattgttgctgtgatcctcacagtgccggtgttatttttcacggttcgttcatctttatttgaactggctaagaaaacaaagtttaatttatgtcgtcataccgtggttacctgcatactcttggttgttatcaacttgttggtgatcttcataccctccatgaaggatatttttggagtcgtaggagttacatctgctaacatgcttattttcattcttccttcatctctttatttaaaaatcacagaccaggatggagataaaggaactcaaagaatttgggctgcccttttcttgggcctgggggtgttgttctccttggtcagcattcccttggtcatctatgactgggcctgctcatcgagtagtgacgaaggccactgaaacccgccgagaaaaagaaacatccctgttgtctgctcagtcaagtccccacacatcagcaatctctcaccacttcttttgcaagtttacagaagcaaacagaaatgtacaggatacttaaaatggaataactttttggttgcaaaacagagacatggttctataatgcttcatgtccctccaagatttgagatcaatttagggattgtgaattttttttttcaaatttcatacaatcatatttcccagtacttttcacaatcattttttacccatctaactctatgttttgtggcttcccggtctcttagaactttgaaaacatgatatacaataatgtttatttattatacatccagattctgaaataattttcctactgatgttcagctcacactatctgtacctttttagaagagaaaagaatcttgaattgtatatatttattttgctttacagaaaaaaatggtttcgtaaataatttgcctattttggttaacatagcacatggagataatcatctgaaagttatagggcactgccactgctgaatcagagcatgcccaatatttgaggtggctctgatttcctggcagctgaactcgggtagtccagtggcctagctggtaccacatctattcccatccagagacattctctggcaagtgttctcagctgaaaagtggttggggatgattcttaccttggtaattaaatgaagctacacatttgggtaatctagcaaatgaagtattttttccctcttggcaacttgtgtcagagttactctggtctgagtcaactttcgctggggaaaacctatggaacctactgcaaaaagattgtccaaaatgcctaagaaaatactcctctgatgcatttagccttcaaccctacctgtcttgctgaagggagaaaaatgttttagtacattataggcccagcagcttttattcatgtccaccagctagttgcacagagaatcatgtgtacctaactaaggatgatctaggataagtaactcctgttttatattgagtattttagggaagtctttaaaagacttgttttatatctataaatctaggttattacaaatacaagaattttgtaccttaaataagcctcatttctatttcttcttcattaattctccatctagtcttgtgaaaaaaaaaacaaaaaaaccctcagagatagtctttgtgaagagcttctgacagaatcactgagtaccttccttcccccagatgaggaagacaagggggtctcagtgtctgtgctgtctcctcttctcttccccaaccaaggactgtgccattactgcccgtctcaactgtccatgcaggaggacagagttgcctggtactcttacccttgtccctctcctaaagggagcacaaggaaactgaagagactgaaaaagaagagagtttgtagctgaaaaagaatagggatagcaaggaaacccagaactgcattcccctaagtggggccatcccatgtgattgaattgtccatagcttgcctatggtgagaaatgtgcatgctccgtgagctggtctcttgaaacaggacttatgcttcctctatattctggttaaattttccaaacacataagttcactgagcacagatttcttatccagagacaagtagaatctaaccgcagactgttggcagagtttccaggcacttagccatgttcccttcctgactcaaatccccaaaggccttcactctcactgagaatcacactactgtccctccaagatttgagatcaatttagggattgtgaaatttttttt

SEQ ID NO: 61698 - DNA, 2405 bp, Homo sapiens
  misc_feature (1)...(2405): n = a,t,c or g
ttttttttttttcatttagcaaagtttttattcaaaagcttctcaccaccatctagttatcagaaagaatggatatcaccttttcctgcccacccaatccccagttccacaggcagaagttaaacccatttggctagagttccccctaatgattatgactgagaccatgataagattttggttgttctcacccaactgtctctaagcctctactcaaacctgactcaagcagagatgtgcacaccccacagttcagaacaggaaggaatcatgtcagatctgatcaacctcccattcttgggctattagaggcacaagaaattaccttgaaaaaatggaattcagtgactgccatctaggaaagacagtgatactgtccagcagcatgcagttccgagagctcaactcttaggccaccctccctccactctactctaggaacaaggagcattaggtctgttttctctccatacacctcaatcgctcgtcctctcgtcttattaaaacacagacacagaaccaaactttttgacagttaaagacaaacaattacatctaattaaaatgctaagagatcctgagctgttagagatgaggagagtagatagtatgacctgatcttcccccctcttttttttcctttaacagtattctgtttcagcataaagcacactttctgaagaggttcctggtggagactggaaaatcttggacttgtgtcctgtggcaaacaacacaagtccccttgcataactttggcttcagtccctggatctgtcctttgcaagctacgtcaggttccatggaaggaaggaaagagctggagggcagtatcactcagccaaagctcccatggggtcccatgctggcaggacaaatgggttccctgctcctaacacagctagcacctcttccagggacatgcttcctgtcccaccaaccacttcgtagacatactcaagagacccaactcaatctgtcatgcacaggtaacctttggtggccatggtcttcaccccattgaaattctccaactctcccattttgtgaaaagcaccatccctgaatcatcccggctctgagcacagcagtgaaggtcatggtgtgggtcataacgtgactcaccaaaagtcacgcctctccgctttattcatgttcttcaaggagacaccaaacactaactcatggtcatagagattcatgtcactgagggcccagcttgctattgaaagtgttttccaacatcacagccaaaccacacagccgtctccatctttgatggaggcagcaaccatctttttcaggaagtcaatgggctggttgttgtatagagtttttctccctccaaaccatattgcttaagttattccactgtgtaaagtttgttgtacttgtgctggggcctagggtcattcactaaacaaatcttatcttccatattgaagagtggcttgacatgttncccctgtwaaactccaagggtgttcatggggccaattttctgataatttttatctttgtctcgatattcccaggtgaatgtctctggtggattacctcttcagatgcgccaccattcgcaagtatctcctccatcatgacgtcctgtgtggccgagatttctcctttggttgctccactgtgtaccaggttccgcagtcgtatacagaattctctcatcttgtgattcagaatatcattcatccttctggttgcctctgttgtataagattcagggaagcatttcttagggataacaccatatttttcaacaatattaacaagcatatcccattggccaccatcatttgcagggttcataagcaaaaactgcaccagcctcccatcctcaggctcctttctctgggctgtgtccacaaaagcactcaagaagaaataacagcgttcaaccttgtcccaaaaaaacaggtaagattggctaaactcaaattcttcaatatttaactttttcatgaatggaagcctcataacattcagacaagaaaagatccagcatcgccctgagctcttctggttggtgattggcttgccctcctggggcacggcgtgctggaacacatgctgcgcgcgctgcaccgtggcccgcttcagacagatgtccagcaggtcgtgggtggtcccgacattctgggcaagtacgaactgggggtcggaattcagtttctgtatcagagcagctaccttctccgaattcagtcccgagctgctcatggcgcccacgctgcccggcggggtaacggtagcttccagggtccttgggcgagcgccgggattgcgctgcggctcgctgcctagggggcccgacctgtctctcgcacccggagcgccggaaaaaggaaaccggctcggcggcggcggcggcggcggcggcggggaggctgagg

SEQ ID NO: 61699 - DNA, 4369 bp, Homo sapiens
  misc_feature (1)...(4369): n = a,t,c or g
tttttttttttttaagatagaaatctatgcactttaatgattgccagaattgcccagcatagcttcagtaaaatagagaattgtctagaaaatacaatctccaaaatgtgtgcaagtactgcaaaccggacagaccggggcagggcaaggcccttgaaaccaagtcctccttgagcacctttcccaggttagaaacccctcttcagcctgtgcttcgcacgtttccttcagcgtgccgcccattcagactgcgccaacttacgtccccagtgcccacgcctgngtggatcaagtgtccaacgggaaagtatgagttagggcaagcgctttttttttaagctgtaaacgcttcacatgactgggccccgtaaggaaattgtggggagcttaggatgagcctgggagctttttcagggacttggatgaggactctgtacacaaatgtgtactggcagagagtctgcaccagcatcattctctgttgccctcagcatgtccagcactctcgggatgtccagcacctcattgtgttccaggcaggcgatcatgatctccgacaaaatcaccacgccagtccttcctaccccagcactgcagtggaccaacaacggagggttggggctttggggatcacttgtgctatttgtatggcgtcgaacagactggatctcttcaagatatgataaaaatcccttgaggtcttctggacagccatgttcaggccagtctgtgtattggaggtgccagacggtcctctcttgcccggtaaggaggtgcttcatcttcaggcctgtggtggcatagcagccagagtctgtgcggaaccgggtcgtgatcttaaaccttccataggtgacagtgttgtgcctggaaccaagtcgtggccagtacctaaagctcttctcccttccaccctcctcttctgctgtcaccattgctataattgcaattccctgttcccataccatctgccaaaaatcttgacaggtattctgtaatggtccctgtgtggcaatataatcccattcgattccactgacagagaccttaatatgtgatgcgttgatgtaaccagtgttgttttctttagttgggaccaactccactctcacatcatcataaggaagaacatcttggaatcgatttctttctgcattttcagggagtcgtgctgttgagcactccccatcaactagccgtttcttaagaattctttcatattctgtgaataccattccttgttctaatcgttgttccagaattttacacctttcatcattcgttgctctggtagccacttcctttccttcatcaggcagaggcactcgagatagggagagtccatttagggcagccagtttaagaggaccaattttttttgcatctactcgagtctttttcattccccctagaggcgggagcccttccacgatgttcttcttcccagagagaaggtccgacaccggccttttcttcagagagtccctccgggctcggtagcggcctgacgtggtgaggtcggactccgacatggagggcatcagcagcccgtctctccagggccgctgggcctctgcggtcgtgcggacggggctgctgtccatcatcctcttctccgcgtctgggacgtgggccttgggctccaggatgtgcaggggcccggcgagcaggacgcgagggcagccaggtgggtcctgggccaggccgggccgaggctcgcgcgcacgtgcagggggcgcccgggccccgctctcctcctcgaagtcctcgtcctcctcctcctcgctgctgtggattagcatggtggcgtccgacagggacttcttatggccgtacctcaagccctccgcctcctccggcccttctcgctgtgtcctctcggtgaaaacgctggggctgggagcccaccgagacggctcgcggcgcccacctctgccgccgacgcggatagggtgcgctccttgagccgcaggccctccaggccgtggctgagcccggccacctcgatgctgttccgtttgtgcagctgcgcgtggcgcgcggcggtgaggggctcgctgacctcctgcagcgagtgcgccacgggcaggctgtcctcctggaacgtttgcaccgagtggtgcacgcgccgcgtgatgaggtcggggttgctgctgctgatgtaaaggtggcgggacaggtctggcgtgctgttggcgggcctggggggcgggtagggtgggggtggccggtacacctgcgtccgcatgatgttgggagacgggtagtcctgcgcctgcagctgcgcattggtcagctccggcacgctgaccgcgcccaccacgggccgccgctcggcagggtaggggtagggagacgggctgtggaagctgtagctcaggctgaacgggcagtgtgcggccgctggcgaggggagctgtgcgtgctcgcggatctcgggctggctgtagaccagcgccgcgggcctgctgtaggcgtacgagctgccgatgttgaggtttcgcagcgagtggctctgccgttccgcatgcaccaggcccctgttgagctgcttcatcacagtctcatagtctggggtggggcggtaggacgggggtatcacggcgctgtgccgatgggacgggaggtagtcaggcctcatgacgtcactcccggtgatgctagggttggacgacatcggcgagggctgcaagtagggctgaggattatttaaggagttggtgctgtgtgcactgtagacactggcatttacggatccgaccgttgaagtcaatctgggctctattcaagcttgtctgaaattgaccatagtatcccttcctggttgggcacaaagaggttatcttgggaagaagcatatggttctgtataatgtccattatagtgcaactggcggtgggggaggcatcacgtagggctggggtttaggcagagacatccttgaagaagacctcctcctgattgggttcactgtgacagtctgagtttgcaggttacactggtttagtctgtaaaacttgtgtcgcgcaacacagagtctccaaatgtattttgctgtttccatgtcttcagtttgaaattgaatggtctcctctttatttgccagctctaatgcaaaaaaggacttgttgtgggacatgttggcaatgtcatgccacctaaataccacaggatgccttccattcttgtgtttcacaaagataccttcaagacacgctccaatggatatgtcacttccttggctatccttagcagggtagctctcttctccatagccatccattctctctacctcctgcatgtacagcatttcagcatcaggagctgtgagccctctgtatttctgatgtagtaaggccactttttgggttgcttcttccaatactttttcatcttgtaaccatcccacaggaaacaaggcaaatttctgaagaaagtcctgggattcatactgatcaaagtcaccaaaaatcgcttgaacagctaagcctgctaggtgaattggctgttccaaggtacaagggataccttcttcccagatatccttcctcagttgcagataatactggtacccggtaatcctctgctggaagcgaggaacctgaggcgcttaaacccccattccaaaatagacggtaggttccaatgcatatttatccagctgcttcttcaaaggtttttccaaatctacccaccggcgctgattttgcttgttgtagtaccagaggctgaagtaagtgacctcccgcagctccagcctctgggccacggcctcgaggctttcctggccagtgctctccacggacagggtgaactccacaaactcgttattaagcagttggatccgggcaaccaggcaactcttgctggacaccgtgtagcgccgggtgcgtttcagtttcaacccaaatggcagtggcatcttcttctttcttcaagaatggaggagcaaagagggaaaagctacccccaccaacccagcgctggtgacgccaggagaaagcgatcctctccggatgggacgaacactgtccggcctccagctgctcacccagcagccgctgccgccattaaaaagcaacggagtctccaatggcccgaggaagggagcattgacgccagcgcactagaagagtggcagttctgaaaatccagaccccggcccctctccagggtggggacgcccaaacaggccttcacttaagcggagccgcggcccagaaggggaggcgggcgaggtcttccacgccatcctgagttaatgagcggccggaggcaacaaacccaagaagcccacggggccttggagcactcaggccccggcttctcccgcgtcctccccttgggaagagcacgcggcgttacgaaa

SEQ ID NO: 61700 - DNA, 1584 bp, Homo sapiens
cagcctgggcgcgtccatcgtcgagtaccttctcctctgcctccccctccctctgcttctatctctctccaattgccctccctggcctgcggccgcccggtcctccttcccagcccagtgcagccaggcacccgggttcggcttgctcaggtctctgtccgggactgggaagccacggagggccgggaaagtggcacactcctggagctcaagcttcctactctctcatcgctgaataactaccgggcaggactgggtggaacagacagcatatttaggtcattgatgggctgctgggtggatggagctggaaagtgatgggcactgctttctggggctgcccaggttccttccgagggctcgcttttcctgggcagagcgggaaagaggaggggcaggccggtcgcgaaacgcaaatagtcgagaatagcgatccggggagaagcaggtgtctgtggggcccaagagaagtaccatctcgttaaaaattcagattgaactatcttacaaatggctcccagaagatccactccctgtgggaacacagcagttgtggaagtgaagacaggactggacccagaataagggttcaaatatgtggggaaatctgacctctaaattcttataagtcagagagtgactgaacaacagcagtgagacatcgaagagttttaatatctgctgtaaaccttggcacagatcatttacttctctaagactgaatccaaaaagcacaatggaatactataataagctgagacagcatggtgaattccagacaagcctgagcattccctatagccagagaaggaggcccaacacctaacatagccttggatgcagaactgatagaacttggggaaagtgatgaagtagttgacctcacctgtgaatctctagcacctgtagtgattgacctaactcaccgtgactctgtagtgattattgaacaaaggaggaggccaagagcaaacacaaggccactccaagaccacactggcagttgtgtggtgaacaatgatgaggagggagtgaaaagggacagagatgtatgtataaccaacagtgcccaccataattccctgcaaaaaaattttttttgtcatatactacctggttatattcagtgtcaagtttgcatggatggatgctcagagattgaacttagtatacaacacatctactctatagaatgtggccacatctgtagtcagtgcttctgcacttcctttacacatactaacactgcccagtttgtttgaaaaaaatcagcctccatcagtatcactgcagttatatatgatgtatgccttattgctcaagacagatcctgtggctggatttttccatgtctttgtgcaggaactatgggttgttggcatccaatgctctgagcttaaaaatactgatttttaaaattgctatctgcagtatataagaaactctttgatttctcatatgctctgagactgctttttgtttcctttggttttatgcttcagctctggacttcagttgccagagtgtgccagatactggggtcgtccttaaagcaactttccctttcttatagtcatcaatttt

SEQ ID NO: 61701 - DNA, 717 bp, Homo sapiens
  misc_feature (1)...(717): n = a,t,c or g
tttcgtcgcgagagcgcgcggcgcggtgactcgtcgctgagggactttaagattgtagaggggcgcggagggtcctccccggggcggagggacacagagggattctagggaacctgccgtcgcgagtcccgcttcaggcggagaatctaggcggcggcggggcctccctgaggcggaggagtcggcaccggggcctggctgccggggaaggagagcacgggagcggggactcctgtgtctggcggagggacacggcgttccggtggagggatctgttccttgtacctggtccagggttgcggtcggggatggagcggttaccccgaccctgcgggaccttcttcctctggcggaggtgcacggcgcggcgtggagtttttctggcggaagtatctgtgcgtggccccaggcccttcccggcgcggtctcatctggggccacttgttggccctcgcgttggggaggttcatgtggtgcatcctgatgagaaggggggtcacaggggtctcggggccagggttcagccagccaggccccagcttgctctcttctggtgctgcccctgtccctgaattcatagacccggctttccctctcnnnnnnnnnnnnnnnnnnnnnnnntgcgctttgcgcatgtagcagaggcaacagtgtcacctgggaagctggtttcccccaaaggaactcttgtctgtccgttgttgcagagccagcgca

SEQ ID NO: 61702 - DNA, 699 bp, Homo sapiens
tttcgtatcagttttctcctcctttcttcccgcgatcgcgcggctctctggaagccttcccactctattattgccgaggatccccctcctagacactctgagaaggtgccgctccggccttgggtacggcggtacccggatgtggagtcgctctcgcccggctgggactctgtggcggggcggagcgcggcggctggtgcgggggcagagagaagggggccccgatgagtaactcccggaataaccgggtgatggtggaaggggttggcgctcgggtagtgcgcggcccggactggaagtgggggaagcaggacggcggcgagggccatgtgggcaccgtccggagcttcgagagccccgaggaggtggtggtagtgtgggacaacggcacagctgccaactaccgctgctccggggcttacgacctccgcatcctggacagcgcgcccaccggtaagccgcggccacctggccagggcttgcgcgcgcggggggaaggggcgagctgcggtgggcgtcggtgtcgcggggagaggtctgcagtgggacacctggtgggcagcgcccggctggagcgagcggaaaggcaaagcgccaaaggaattctaggttccgaacgggtgaacaaacactttcagaaaagaccctctacccccaagggaaatgatggcagcaccatcaccgggatgctttcaagcc

SEQ ID NO: 61703 - DNA, 1967 bp, Homo sapiens
ttttaaatcaatagataaacatgatttattactttgtctattaaagtagtttcaacacaattgaagtttagactgcactgggctgttcccatcacagtccaggattatgcacagaccagcccccaaccccagcaggggtgccctgccagaacctgtgctggatgcctaggagcacagagaccactgcccgttgttgggctgcgtgtgcacaattcataccccgatccataatccctaagacaagaatggctgtcattgccctgggttcactttctattcaaagaggactcatttgggcacagccaatgtagtagttaaaatgcattttgagaaaaaataaatattctgtacaatgtatttacaaggatcaaatgttttgtaacccacccccaattagtttcccaattgggaaactataatttgataattaagaagccatattattggccgttagtgtcacgtcaacaaagaatgtggagctgaccacctaaagtatttttgaactatatatatagagagagagagagtacgcaaaatttcacattttaatatgcttagaaggagtttttaaagaagtagaaatgatttccttggcctctgactttcagtgatgaaaatgcaaccatgcagtcccccctttgcagaagggcagttcttcccaggctttctggaagcaggggcttccgaggagtctccacccacctcacagaacactcactatgagccctgcacagacagcaggattcacaatctccaatagggatggcaggggcagcccttaaaacttgaagaggtcgatgaagtgctgcggagacacaggcgtgaagcagctgtcagggtcggccgccgtgcaggggtgtcctgagtccttccaaaagagaatgctgcagtgccgacagaaatgcagtgtgtctccgtactgctccttcgctgggtaatgtttctgaagtgcaaagtacatcaacttccattcaatatgacctttttctgaaaggatcaaatgtctacaaaactgcttttcagcaaaatggtactgacaaagcttcttccacagctgtctgtcttcactaagcatatacaacgtgggggtcacctggcctaaggtgatgatgtcccatccgtctgagaaccggtataggatgttgttcagcatgtgcagaggaaggtcactgagggtgaggccattgttcacttgcttagtcatctgaagatcctgtagctgttgttgccaggcgagaatagtttctaatcggcaaatccaaatattgatgtttcccactaatacagacttccctactcctctaataagaatgcagagggtagagcttaggtcttgcagaagatctttgattaagcgaggattgtggtggtcatcaagaaccttttgaacgattttatccaaaatgttgaagtaattcttctgtgccacgccactcaatgaagttaactgggattttgcaattagctgcaacagtttgaccacataattgaaccttcggatatcttgaattgcacttgagaagtctaaccgattaaaggcttctcccaaggtgcaatagccatgcctttcctttgtgctttctttatggacatagatccatttttcacgataaaaactttgagtatttgtgtcatttctaaaatggtcctttttcctttttttcgatgcatattcatgctcttcattattgaatatttctccatcttcactatttaagataatgctgtgactgatgttacaatggttattctctctttcaagtttctgactacaagattcacatctcttccagccatcttctgtcttaatccaactccatccaggagatctccagtcctgacccaaaaatggcatagttctcctagcgcgcctgcggcccccagtcttcacctgacgcgcccgcgtcccccagtgcccaacgggcgcgccggccacctgggcccgcacctgacggcgaccaggcggt

SEQ ID NO: 61704 - DNA, 1086 bp, Homo sapiens
aatacactgctggggtggcaatctgccaagggcccgagggcaacactcctttacataaagtgaaaaagatggcaaccacacttctgctgaatacagaggtggagcatagggtaatgcaagtccaaacaagcttcttgctgggctggctccccagtcttgcttagagaatgtgagctgcccttctgtgctgcgttcagcctgaccacccctgctctgcactaataatgaataagcttcgtccctatctttccctagcctggcaggccattgtaaaactttatgcataagagtcacactttagattttgtaccctacacacttccactgaagcagaaatacaaaagccacaataatctcaatagccagcaggcattcctctttagggactgtaaggtggtggcttttcaaaaggtggatagtagggtggagagtaacggggcggtgcacttgaggaccacatgtagctgggtgagggagaggcagactggggctcatcagaaagtccagagggaggggaggatggaaagacaccggaatgctgaaagtcataagcagaatatggtggcaggtgaggagggctatggtagtaggtattgtaggatgccacttggggatgagcatagtaagaaactgttggatgggtattttcaacagaacagttcagtgctgggagagttgggttcatgtccttaaagcctccaaggacagcggcagtgatgatgcccaggaacaggccaacaatgttgaggatggtggcagaccagagcaggtggtagaggtggatgatatcttggcaactgctgacatcgatgtattcgtagtacccaccagtgatctccacccggttgccacagttgtagaggtcacagcagaagcaggtgttgccccggatgcgaggtgtgcagaattcacggctgaggtgagggcagttaacctctctagctgcctgggtaaggttcctcataaccctcgtggaaggagaatttttggttgaggaacttatgacctcctcagcttccttctgtgatgtcttgggaacataatggcaccgggtagcgtagagtggtttcagatcaatgtgtctgg

SEQ ID NO: 61705 - DNA, 675 bp, Homo sapiens
gacctacacccgctcgcgctccctccactcccagaccccggcctaacacccgctcgcgctgcctccactcccagaccccggcctaacacccgctcgcgctccctccactcccagaccccgtcctaacacccgctcgcgctccctccactcccagaccccgtcctaacacccgctcgcgctccctccactcccagaccccgtcctaacacccgctcgcactccctccgctcccaggcccggcctaacacccgctcgccccagaccccgtcctaacacccgctcacactccctccactcccaggccccatgcatgccttgggagcccagcccttctcgtggggcagatctcagcactcaccaggcgcctgcctctcccacctagtgggccctttcctgactgcactgcccaacaggagcctccagggccctcccgctgcctttgtggctgccagagtcctcgtccccttgctttgtctcctgctgtctccctccactcccaaacctttacctatgggtgtgatttcatccccaggagggaagcaccagggaagcacatagcccaagtgtcatggagcccaggcctcaggtcccgtatggagcctgtgctcaggactgcagaggcagtgcgtggccaccttgccgtggagcaggcctgggctccccgggtgaggtcct

SEQ ID NO: 61706 - DNA, 2009 bp, Homo sapiens
ggcacgaggcgggctgggggaggggagcgtggggccgacagttttgggggtgaaaaggcaaaaggcgggtgaaaggctgcctcccgagactctccttgcttggaattctgcccactctgcggagttagcagtcacgacctccagcacaggatgtggtaccacagattgtcccacctacacagcaggcttcaggacttgctgaagggaggagtcatatatccggcccttccacagcccaacttcaaaagcttacttcctttagctgtccattggcaccatacagcctccaagtctctgacttgtgcttggcagcaacatgaagatcattttgagctgaaatatgctaataccgtgatgcgctttgattacgtctggcttcgagaccactgccgctcagcatcgtgctacaactctaagactcaccagcgcagcctggatactgccagtgtggatttatgtatcaagccaaagaccattcgtctggatgagaccacactctttttcacttggccagatggtcatgtgactaaatatgatttgaattggctggtgaaaaacagctatgaagggcagaaacaaaaagtcatccagcctagaatactatggaatgctgaaatctaccagcaagcccaagttccatcggtagattgccagagcttcttagaaaccaacgagggactgaagaagtttctgcaaaactttctgctctatggaattgcattcgtagaaaatgtccctcccactcaagagcacacagagaagttggcagaaaggatcagcttaatcagagaaaccatttatgggaggatgtggtatttcacttcagacttctccagaggtgacactgcgtacaccaagctagctctggatcggcacactgacactacctattttcaagagccctgtggcattcaagtgtttcattgtcttaaacatgaaggaactggtggcaggacactgctagtagatggattctatgcagcagaacaggtacttcaaaaggcacctgaggaatttgaactcctcagtaaaagtgccattgaagcatgaatatattgaagatgttggagaatgtcaccaaccacatgattgggattgggcccagtcttaaatatctacccatggaataaagagctgtatttgatcaggtacaacaactatgaccgggctgtcatcaataccgttccttatgatgtcgtccatcgctggtatacagcacaccggactctaacgatagagttgaggagacctgagaatgagttttgggtcaaactaaagcctggcagggtcctatttatagacaactggcgtgtcctacatggcagggaatgcttcactggctaccgccaactgtgtggctgctatttaacaagagatgatgtattaaacactgctcgcctcttggggcttcaggcttaaaattgacagcatctggattatgaatacacctggcaccctggctaccagaatttcatatgggcagaataatattgtgtcaaactctacttcagattgtctccttatcccatcccacaaaacagaatctgtccgtttctctagtaagggagacttgttggagaggcgggactctgagttatctaatgtcagacatctagtggggcagctctcttcctcatgttataacatggatccacttgttttatttaaaccttttaatataattttggtcagtctccttcagaaatataatctccatattgataggaaagcaataattgccatgaggtaacgatttttttcccaagtagatcagttagaaagaaatgcattctagaaataacaaaaatcctgataaagcaacaatttgcaaaatgtttggtcttaggacaccttaacactcttaaaagttattgaaggccccaaggagttcttgggtgtgggttctatctattgatactaactattttaggtattaagactgagaaataaataaagctcaagaagaacacagaagccctgtattgcggccgggcagaggataccagcag

SEQ ID NO: 61707 - DNA, 595 bp, Homo sapiens
ttttttttttttcattttctccattttatttgtcaatataaaaatactcaaatatttacaacaaataaatacgcggggacacaataagttacactgttaggagccctcctcctagggctggaagagagtatgccattgtccacagcaggcccaccctctcccttctctcccctcacacagcctttcccagccctgtacaggaagaaggcaagtataaaataccactgaaccccggggccaagtgggaggccccacccacccttccccccaaacacacaggaggctccatctccctccccccaccctgaaaacattcacagccctaggagcaggattaggcccaccccaagccctgcactccctctgaaggggcacagcaccctgtccaccccacctccatatgtacatcgctgcccgacactcggggcagtgggggtaggagagacaaagtgatacgaccccttccccttcatagctccaatgactcatcaggaggacacatgccatgggaagatttgacggagaaaggaaggctatgcacgtacgagcaggtgacatgtacgcaactataagcacacagaaacccatgtgcaat

SEQ ID NO: 61708 - DNA, 1565 bp, Homo sapiens
ctttatggagttggaagtgaaatcacatggctagcccggaggtcattaggagggctgagagggcccctgttaggggtcatgggctgggttttactatatgataggcatgtgattggtgggtcattatgtgttgtcgtgcaggtagaggcttactagaagtgtgaaaacgtaggcttggattaaggcgacagcgatttctaggatagtcagtagaattagaattgtgaagatgataagtgtagagggaaggttaatggttgatattgctagggtggcgcttccaattaggtgcatgagtaggtggcctgcagtaatgttagcggttaggcgtacggccagggctattggttgaatgagtaggctgatggtttcgataataactagtatggggataaggggtgtaggtgtgccttgtggtaagaagtgggctagggcatttttaatcttagagcgaaagcctataatcactgcgcccgctcataaggggatggccatggctaggtttatagatagttgggtggttggtgtaaatgagtgaggcaggagtccgaggaggttagttgtggcaataaaaatgattaaggatactagtataagagatcaggttcgtcctttagtgttgtgtatggttatcatttgttttgaggttagtttgattagtcattgttgggtggtgattagtcggttgttgatgagatatttggaggtggggatcaatagagggggaaatagaatgatctgttcgcttcattcattgcccccacaatcctaggcctacccgccgcagtactgatcattctatttccccctctattgatccccacctccaaatatctcatcaacaaccgactaatcaccacccaacaatgactaatcaaactaacctcaaaacaaatgataaccatacacaacactaaaggacgaacctgatctcttatactagtatccttaatcattttttattgccacaactaacctcctcggactcctgccttactcatttacaccaaccacccaactatctataaacctagccatggccatccccttatgagcgggcgcagaggttataggctttcgctctaagattaaaaatgccctagcccacttcttaccacaaggcacacctacaccccttatccccatactagttattatcgaaaccatcagcctactcattcaaccaatagccctggccgtacgcctgaccgctaacattactgcaggccacctactcatgcacctaattggaagcaccaccctagcaatatcaaccattaaccttccctctacacttatcatcttcacaattctaattctactgactatcctagaaatcgctgtcgccttaatccaagcctacgttttcacacttctagtaagcctctacctgcacgacaacacataatgacccaccaatcacatgcctatcatatagtaaaacccagcccatgacccctaacaggggccctctcagccctcctaatgacctccggcctagccatgtgatttcacttccactccataacgctcctcatactaggcctataaccaacacactaacc

SEQ ID NO: 61709 - DNA, 2921 bp, Homo sapiens
  misc_feature (1)...(2921): n = a,t,c or g
gtggccatagagcagacatctcttaagatgatgcaggcagtaggaggtgcacctgcacgtcccactggagaatatatctgtaatcaatgtggtgctaagtacacatccctagacagctttcagactcacctaaaaactcatctcgacactgtgcttccaaaattgacctgtcctcagtgcaacaaggaattccccaaccaagaatccttgctgaagcatgttaccattcactttatgatcacttcaacgtattacatctgtgagagttgtgacaagcaattcacatcagtggatgaccttcagaaacacctgctggacatgcacacctttgtcttctttcgctgcaccctctgccaggaagtttttgactcaaaagtctccattcagctccacttgggctgtgaagcacagtaacgaaaagaaagtctataggtgcacatcttgcaactgggacttccgcaacgaaactgacttgcagctccatgtgaaacacaaccacctggaaaaccaagggaaagtgcataagtgcattttctgcggtgagtcctttggcaccgaggtggagctgcaatgccacatcaccactcacagtaagaagtacaactgcaagttctgtagcaaagccttccatgcgatcattttgttagaaaaacacttgcgagaaaaacactgtgtattcgaaaccaagacacccaactgtggaacaaatggagcttccgagcaagtgcagaaagaggaagtggagctgcagactttgctgaccaacagccaggagtcccacaacagtcacgatgggagcgaagaagacgttgacacctctgagcctatgtacggctgcgacatttgtggggcagcctacactatggaaactttgctgcagaatcaccagctccgagaccacaacatcagacctggagaaagtgccatcgtgaaaaagaaagctgagctcattaaagggaattacaagtgcaacgtgtgctctcgaaccttcttctccgaaaatggcctccgggaacatatgcagacccacctaggccctgtcaaacactacatgtgccctatttgcggagagcggtttccctcccttttaactcttactgaacacaaagtcacgcatagtaagagtcttgatactggaaactgccggatttgcaagatgcctctccagagtgaagaggagtttttagagcattgccaaatgcaccctgacttgaggaattccctgacaggctttcgctgcgtggtgtgcatgcagacagtgacctccaccttggaactcaaaatccatgggacgttccacatgcaaaagacagggaatgggtctgcagttcagaccacagggcggggccagcacgtccaaaaactgtataagtgcgcatcttgcctcaaagaattccgttccaagcaagatctggtgaaacttgatatcaatggcctgccatatggtctgtgtgccggctgcgtgaatctcagtaagagcgccagcccaggcattaacgtccctcccggcacgaatagaccaggcttgggccagaatgagaatctgagtgccattgaggggaaaggcaaggtggggggactgaagacacgctgctcttagcttgcaacgtttaagttttgagtcttgaaagttgaacttccagaaccacatcccaaaccattccaccgaggagtttcttgnccagacagcaacagcacacagttgaaaacgccccaagtatcaccaatgcccagaatcagtccctcccagtcggatgagaagaagacctatcaatgcatcaagtgtcagatggttttctacaatgaatgggatattcaggttcatgttgcaaatcacatgattgatgaaggactgaaccatgaatgcaaactctgcagccagacctttgactctcctgccaaactccagtgccacctgatagagcacagcttcgaagggatgggaggcaccttcaagtgtccagtctgctttacagtatttgttcaagcaaacaagttgcagcagcatattttctctgcccatggacaagaagacaagatctatgactgtacacaatgtccacagaagtttttcttccaaacagagctgcagaatcatacaatgacccaacacagcagttagtgcaagtacagtctctcaaggagaattgattttgtggcacaaaaagggaacatgttttactctttgcacgaaactttcattgttaatgtatattattcagaaacattgtattgtaccataaaacttgtattatcaaactgttggatgttcatgtgtttgaacttttgcgcaccggatagaccccttgtatataaagtgttgcacatgtattatgtcgtctgatactaaaatggtcttataaagacaagtggacttgggccctattcaggcaagattaaaaaaaaaaaaaagactttgaccaaaatggcttaaaataaagtatttttaaggaaaaaagattaaaaacaactgttatacatgagactatggttggacttccttttctttacacttaagcctagaatttctctttaggtatatcagcgcttaaatccaagactattttttattgctgaagattcttgcaaaccatgaagagatgttctcacagaacagaaccccacagctggataaggcccgtatatatatatttgtaagccttgcaatgtgacaggtagcatcactatatatgcaatagttgttatgtagactgtcaaagaatttttttttccctggatacatttgaagctttgagtgttcaaggttttccttaatgatttcacgcagccaaattcttgaatcagttgaactaacctgtatgttactgttattaatgtttactctgcagtctgaacctggagattactggaattgttttccaagaggaaataaattcagtttaccattaggaaaaaaaaaa

SEQ ID NO: 61710 - DNA, 2119 bp, Homo sapiens
ttttttttttttgcaggtttagaaaataaagtttgttgggatcttaaacattttggataaaactaacaaaaaaatatgaacacacattcaggttgtggtgctatgaggagtagcgtcatcttatttagttccttgagatacacgcacggctgctcggtgatcggtgccgccctgggaaaggttggtcaggaggtgacaggggtctccaggaggagctcgggaggtgacaagggtctccaggagggagcaggggctgctcggccaggctgccctggagcttgaggataaggtcaaggttggtatgtgttgctccgacttgagaatgaattaggtgtgtgactgtgtggcatcgtgaacatcagtagtgacgcagccgtggcctgggctttgcctgcagcgcacttaggttacacggagcgggatcagaagcaagcgattcggcacacaggcgtttggccacagcaattaggaaatacatattctgcggcagggacacgatcatattttggtgtgaagaagagggcaagagaagcagaaggagaatgggtcggtaggtgtgaaaagtgtttggcatgcatgggattaaacagaaaaggtgtggctgagatttcccagtggtgctcacagtgcatggacagcgcggggtggggcacggcgggcttcacacagttctgtccgtccctgagtgcttcctcaccaccttgcctccgttcacctggtcgaccgccagggtcttcacctcgggctgggcctgcggcggggtggcgtggtggatccgatgtgccaccccgacgtgggccttgtgcggcttttcgcgggccgggctgtgctgctcgccgcttcggtcggaggcgatgggggggatgacgaggggcctctctttgatgaggtggacctcggcggactccctagccagcagaaatggggtggggtcgggcatagcatccactggttcccgcaaaaggagtttcctgctctctgccccgaatctgtagacctcttcaaattccgggtgcaagggggctgagaggctctttttcatgcggcggcgaggcgtttcgggtagcttgtctttggggggcgctggcttgtagctggccagcacggggctccctgacgggctggcatctgaggtcccgctggagctcatgagcttcttcttggcggcgtgcagctgggaggtcaggtaggcgatggtgctggcccgctgctccagctcgctagacagcagggtcagcttgtgactcttggccttcagctcctccaggtacttcttctctcgctccttgatggtgttctccagcactgtgatcatcgcgtttttctgctccagttctttcaacaactcagcattttcgttctctttcactttcagttgggcttccagctcttcacatcttttctttaattcactgcttttagaagtcccgtctcctgtctgttccgaacttttgactgtcagctcatatgttaaatctgtgcagtgctgctgcagccgcctgatctcggagtgcagccccttgagcgtgctggcatgctcccgctgaaggaacaggaggttcttctgtgcgctgtgcagctggttctccaggtttgtggctgccatgctgacatccagaggaccttcatcgtaactcgagaaatgtggtgaagtcatgggtctttctggaaaagctaccagagtaattcaagacgcttgtacagcactgaaaaatactgaggatgaaatgtgagttatttgcttataaattattattgtaaatacagaacctcagaatgcattttccctaatttgctattccagagaaccctccgtaaaggaggtacaacttctcaatggctcccaggacgcagcccatttgtaggatgccacagtggaaccgttttggagacactgacacacccaggctgtcactgcttcagacgacaccaattgctcatcaattatctgtacgaccagtgacatgcatgcacactagctctggagctaggacgagttcataacgaacttcagacatacactttcatcacacgaaaacacttcctgggcgctgctccggtggaaagccacagactccactccgagggcaacctgagaacgcagagaaggaaataaaac

SEQ ID NO: 61711 - DNA, 1781 bp, Homo sapiens
tccggtcgacgatttcgtcgccattttcgagtgatgcctgatctcatcaatctagcgggagagacaggataacctgtccgagagtatagcgccactatgactccgccggaaaaattactttaaaaatcgccaaaaattacttggagcaaagggcagtcggcggagcttcgccaaggctggcgcagtcggttttgacctgtagcagagaaccaattctggagaacagcctcacttctttgattgaatacttacataatgcattggaacatgacatgagattaaggtttaataatgatagaatgaagaccacaataaaagagacctctacttagctcagcaattcttaccttgtttttcccttgatgtgaagtcttacctatttgatgaagatgtcttttgaaaggtgtactgcaaggaacaaaatgtttgtaaattctccttttaccaaggtggataattactgtaccttcctccatggaaaaagttttatttaaagtgttatttctcattgaatactatcaaaaaggaaaaaaaaatgacctaaacttttgagatagatttggctctagtaagtatttagttatatcacttgcatatctgggagaagaaataagagactatcatcagtacattcccatctactaaaaaaatttattttacacatgtcaagggattacttataacttccattttattactaatagcttgaacccttttaatgaagacctaactcctccaccagaaatttaagtttatgttcttactttgtttacttataaaatacatctcaggtatttcggatgtcttttttttttctaagcctatatgaaatgaaaaatatattggcaaagtaaatgtttaaaccttttacgttaaaattactttgaaagatgaaaagttagtgctgtttttgtcacgttatactgaaattaaatgtttataatttatattttgggtttatgtataaatcatggaatttatgcaaaaatatgagtagtacagattctcctctaattctgtaggactttgaataatgtgatatttttcttataattggacccttgtgttttgaagaaatgccaactgcttgaagaatctccttgttatttgtattatttgctatagggttagatgttgagaaattctgctgacaaaaaattttaagccagttttacactaaatgttcctcagtctgattaatttgttattggatgtattctgtatctttcttttgtaatttgtgacttttatccacttagcacgaatgattctattaaagaaaatcattaggaagtggtagaaactttaaatcgccccagagtttgcctgtttccatattttattatcttataatcttcgggagtgcttacacttatggagctaacattttcagagatacagcttcttatagtaacactaaaactttcttcctctttggactgaatacctataattataactatatggtagtttaagtttccttgtgattagtcaaaaataccattttagtatgaagcaatgaagtctattatttgttgtcccataattgagaaagcttaaatacaccttttattaagagtttgtaaattctagcttagtctacacagatttttatatcaatttgtttatatttttattaatgtcatttctggaagtgtgaaaatgttaatgttcaacaagcaacattaaaaatagatttgaaacatttatatatagagaggtacacatttatttactgtttaggtactgaagattatcacttaataaaaaatatatatccc

SEQ ID NO: 61712 - DNA, 2876 bp, Homo sapiens
tttcgtctgacacgcacgactccccccgcggcaactgcacgggttcggtgacagccgagacgccgagtgtttcccgcagccggccggggtccaggtcggaaatgtagccagtggggccgccagcatccagcacagtgagcggcccctgggcaccaccagaaaacatttgtgggtgaacgtggagtgatgaccatgtggacactgtctttccagggtttcttggagcctctgcagagtctgggggccaggcttcttagtggaaactgcaggatcttccttctgacccctgcttgcctcgccccagcagctccggttgagtccacagatgccagctcagcttccagcttggggaagagtggggttgtcagcaggagagcctgagggctgaggcccagcgtgaacatggcagctaatggggactctcccccatggtccccggccctggctgcagagggacgtggcagctcatgtgagcattgagtcgttgcaggcttcagtgtcatttgaggacgtgactgtggacttcagcaaggaggagtggcagcacttggaccctgcccagagacgcctgtactgggatgtgacactagagaactacagccacctgctctcagtggggtaccaaattcccaagtcagaggctgccttcaagttggagcaaggagaggggccatggatgctggagggggaagccccacatcagagctgttcaggtgaggctattgggaaaatgcagcaacagggaattcctggaggaattttcttccactgtgagagatttgatcaacccataggagaagattcattatgttctattttagaagaactgtggcaagataatgaccagctagagcaacgtcaggaaaaccagaataaccttttaagtcatgtgaaagtattgattaaggagaggggctatgaacataaaaacattgaaaaaataattcatgtgactaccaagcttgttccttcaattaaaagactccataactgtgacacaattttgaagcatactttaaactcacataatcataatagaaacagtgcaacaaagaaccttggcaagatttttggaaatggtaacaatttcccccatagcccttcctctactaagaatgagaatgctaaaacaggagcaaattcctgtgaacatgaccactatgaaaaacatctcagccacaaacaagctcccacccaccatcagaaaattcatcctgaggagaagctttatgtgtgtactgaatgtgtaatgggcttcactcagaagtcacatctgtttgagcatcagagaattcatgctggagaaaagtcccgtgaatgtgacaaaagcaacaaagtcttcccccagaaaccccaggttgatgtacatccaagtgtttatacaggagaaaaaccctatctgtgtactcaatgtgggaaagtctttaccctcaaatcaaacctcattacacatcaaaaaattcataccgggcagaaaccctacaaatgcagtgaatgtggaaaagcctttttccagagatcagacctctttagacatctgagaattcatacaggagaaaaaccttatgaatgcagtgaatgtggaaaaggcttctcccagaactcagacctcagtatacatcagaaaactcataccggagagaaacactatgaatgcaatgaatgtgggaaggctttcacaagaaaatcagcactcaggatgcatcagagaatccacacgggagagaaaccttatgtatgcgctgactgtgggaaggccttcatccagaaatcacatttcaacacacatcagagaattcatactggagaaaagccgtatgaatgcagtgactgtgggaaatccttcactaagaagtcacaactccatgtgcatcaaagaattcacaccggagagaaaccctatatatgtacagaatgtggaaaggtcttcactcacaggacaaacctcaccacacatcagaaaactcatactggggaaaaaccctatatgtgtgctgaatgtggaaaggcttttactgaccagtcaaatctcattaaacaccagaaaactcacactggagagaaaccctataagtgcaatggctgtggaaaagccttcatatggaagtcgcgcctcaaaatacatcagaaatctcatattggagagagacactatgaatgcaaggactgcgggaaagccttcatccagaaatcaacactaagcgtgcatcagagaatccatacaggagagaaaccgtacgtttgtcctgaatgcgggaaggcctttatccagaaatcgcacttcattgcgcatcatagaatccatactggagagaagccttatgaatgcagcgactgtgggaaatgcttcactaagaagtcacaactccgtgtgcatcagaaaatccacacaggtgagaagcccaatatatgtgctgaatgtggaaaggccttcactgaccgatcaaatctcataacacatcagaaaatccacactagggagaaaccctatgaatgtggtgactgcgggaaaaccttcacctggaagtcacgcctcaatatacatcagaagtctcatactggagaaagacactatgaatgtagtaaatgtgggaaagctttcatccagaaagccacactaagtatgcatcagataattcatacaggaaagaaaccttatgcttgtacagaatgtcagaaggcctttactgacagatcgaatctcattaaacaccagaaaatgcatagtggagaaaaacgctataaagccagtgactgagaaagtcttcacctggaaatcacaactgggtatgcatcaggtatctaatagcagggaggaggaaggcctgttgctgcaatcattgtacagggggaaatgggtatgagagactgaggct

SEQ ID NO: 61713 - DNA, 802 bp, Homo sapiens
ttaaagtgtgaatatttggggaacacagaccaaggctgtgccctgattttccctttctgaaagtcacactttaactaaaatatttctgttctacaaatttccatatatcaaaaaaaagctgtagaatttaattcatagtgtcttctcaaaaggaagaggaaaacaaaaacagttcttcgtaggagtcttttattttttggtgtcttaaatgtcaatgatcacaaaaacttccgggttctcttcattatagacctgcattgctgaatatgttattgctttgacttctgttccctgagggtgcttggacaatgaaaattcttctccccacccggggtatgaagaattcatcagcactgaacttataaagccattcatccaaaaagtgaaacagaagagactgtaagtcatctccttgggtttctacttctactgtttggaggggctccactgtcccagtatctgtcatgtaaccaaacatggccattgcacattgctcaaatgcttcctccagagtatctccccatgcgtgtaaccaagattgaaacattcagtcttcctactgacgtggtttcaaaggaatgaactcccgctatactcactggacatctgctgtatgatccaaatatgtaaagagagaagtaagccacctactcacactcgtacttcctattgactggcggatacttggccttgatcgccttctgttcttcagtcaaattgtaatctctggcatcttcctcttcctgcgccatgactgcaggattagaccggcacgagctcgtgcagagttcctcaaagcgtt

SEQ ID NO: 61714 - DNA, 2805 bp, Homo sapiens
ttagttattgctgttaatctcctactttgcttgatttattgatttatttactgagatggatcttgctctgttgcctgggctggagtgcaatggcgcgatctcggctcactgcaacctccgcctgccccacctcgggttcaagtgattctcccgcctcagcctcccgagtagctgggactacaggcatgcaccaccacgcccggctaatttttgtatttttagacgagacagggtttcaccctgttggccaggctggtctcaaactcctaacctcaggtgatccaactgcctcggcctcccaaagtgctgggattacaggtatgagccaccgtgcccagcagaattttttaactatttggttacgactaatttggataatgtagtgcatgcagctttgatttgtgccactaagagtgggcaaactgtcttcctttttgtgaatcagtaaaaattttccctcaacatgtgtttgacagttgtcattcactgctaagttaaggcatttggtaaaccacacagcctctgcatccttcctagcgacagccacaagaaaaggtgggcatgggagggaaaatgctcttgtgaattgaactggaggcaagctccacttttctttagaaaaagatgtagatcaaaataactaatattttcttccttgctcgatttctgtgccttccatggtacatcaaaataataggaccagtaatggccacaatcctgttgactgctgttaccttcgccccaatatttctttaagcatttcttaagcatctagcttgtgttttgttatatttaacagattttcttaaagtattgtatgaattaaaaccagaaataacttcattttcctagaaagggataatttctcccggagaataaatcctgaggatttagttagatgctgtgggtattgtattttaaataatattttaatgggagcagctgattgactttcaaatggattgtttacattaatagtaattctgcagttgttttactattgcatcagtctgccagacaagttccatgtgcatattttaattcagaactaattatacttaaaaatttaaaccctgcatacttccccaaaaatgtttagggcagttaaaaacaactcttttggaagatgactcgcattttaagaaatgagagaacactgtcaaatgatgaatgcatttaaaaaataatttgcaaagtgataaaagcccttagttttaaatcttacaatgacattagctcttacaagaactcagtaagtatttgctgttttttaatgggatagtaataaggttgaggtttttgttaagggacgtttacttatcatcaaactctatacttactactacaaggaaactccaagtacattaaacactatgttttataattctttgccacactgccaataaattctgttcacattttaaggatgacaagtccactatatgtaacacgtaagaatgctatcctggcagtagacacagggccagaataaactggcaagttttcattccacacaagtgtgggaaaaaaatgactacaacttaaactttatttacttgattgagagcttattgcacatgaaatgttttatgtggttgatcttaacttcgtttacattgacttctatgctcaagattgttcaattgctgctgctgccgttgtgttttctttcaggatcgaggtgggtaccttcatataatatcttctttttaatttcttctctggcaattctttcctggattctttgctttgcataattatacctacaatgaaaccagcatcccaaagtcaccaagataaaccctcctactccaacatcacatgatcttctaattctactagtgaacaaaaaatgtccaaagccagccacaacagatcctaatgaaccatacaatattgaatgccgggcgcagggagtattttcaacatctaaaaatcctaggagcttaagggactagaatgaaaaaaaagaacctagattgagtaagaaagtatttcattttggggtgctttggcaaaaatgacaatacaccatttcttttcttgtagttgagggtttaaactagagtatgtgccacgtgacaacctaaatcagcttgcgttgtctttgtccacctttggtatgcagtctgaatctttaaatccgaaaaccttacaaattggaccggaaaacccttaagcagtagggtaacttggagctgtatcttaatttgctaatcaactgacttggaaataggataattcattttatgagctctttaaatgagtttatttgggaatatgcctatcattggaattgaaagcagcatagcttgcttcagtaactccaataatttgggaagcagaaatggaaaaagtaatttgagtcatgtttgcttatgtagtgccgtttaaaattcccctagtaattacctttcatattttattaactaggttaacatcaactgtggttgtaagagtaaatgtttcaccttaagataaacatgggcaatatattaaactctagtctgttttcttgcctgtgaagtgaggctgcacttgattatatttgattctttgttcgtaatacatgggaacgacagctaagtgtggtgaaaaacgcggggatccaaagagctggatttttatctcagatctgccgctaacttttgtatcctataggctacttttatttctatggtctcaatctataacatgaatgggttgggttaaatgactgaagttccttcaagtgctaaaattctttttctacagtcttcattggatttatgtatttcttattcctaatatgtttaactggggatg

SEQ ID NO: 61715 - DNA, 2765 bp, Homo sapiens
ctgcagccttgacctcccaggatcaagtgatcctcccaccttagcctccagagtagctgggaccacaggtgtacattttttaaaagtgttttgtagagatagggtctcactatgttacccaggctggtctcaaatgcctggattcaagtaatcctcccatctctgcctcccaaaagtgctaggattacaggcgtgagccaccccgcctggcctgaactactatcttttattgtcttcttcactatcccccactaaagcaggttcctggtgggcaggaactcctcccttaacctctctgggcttgtttcctcacctttaaaatgggtgttatcagagtccctgcatctcagagtgttgctatggtgactgaatgagttcattaatgtaaggcacttcaacagtgcccaaggtgctcaataaatagatctagctacagtagtgttccccactggtcccctgtgccttgatgccgggcaaaggaatagtgcagacaggcaggaggaggcagagagggagagagagggagtgggagtgggggaacgtcagggatggagaccccaggcaggcgcccaatgacacagagatccgcagtcctctctccatctttaatggggccccaggtgggcttggggcacgggtgtccttaaatacagcccccatgggcaaggcagcgggggcggggcggggtggggccgggcctgccggggcggggcggggcggggcgggacctcagctgcacttgcaggagcgcacgatcatgttggacagctgctccaccttgggcttgcggcccacggtagtacacgatgggcagggggttccagcgcctgcggcacgcagcaccggcgccgccgaagcgccccggtttatgcctggttgtacagggccaggaccttgctgtactgcgtgtccaggctccaaatgtaggggcagggcccgagggcagaagttggcatggtagcccttgggcctcgtggaatccacttcccagccgaaggtccttgcggaaaatcaaatgttaacaatgccgcaacgcaagcaattccttcctccgtggaagctgaaacaaataattggtgtcccagggcctggcggtgccgggaagctttgcagatgctgggccctctccagcggggtggccatgagaagcaggaaaggccggttcatgccatgaatggtggccaggtcacctcgggcggccggtagtgaacccgttgatgtccacttgcagtgtgttatccctgctgtcacaggagcagtgggcgctaaggcgaaagccctcaatttcccctccacggctcaaccactgccgcacaactccggtgacatcaaaagataaccactctggcgagtcgctgggtgccagcagccggttgctgaggtatcgccaggaattgttgctgtatttctggtacagctccacgtgctgctccacttttaacttgagcctcagcagacgcagctctgcccgggagagcaacacgggttcaggtaccgcttctcggagctctgatgtgttgaagaacatatatatgctgtgtgtactctgcttgaacttgtcatagatttcgttgtgggtttccaccattagcacgcgggtgacctccttggcgtagtagtcggcctcaggctcgggctccggttctgcactctccccggccacccggtcgcgggtgctgttgtacagggcgagcacggcctcgggcagcgggccgggcggcacctccccctggctcggggggctggcgagccgcagcttggacaggatctggccgcggatggcctcgatgcgcttccgcttcaccagctccatgtcgatagtcttgcaggtggatagtcccgcggccggccggccaggcgtcagcaccagtagccacagcagcggtagcagcagcggcagcagccgcagcccggagggcggcatgggggaggcggcgccccccggcactgccgagagcgcgaacagggctggtgtggtggggaggccccgcccctgcaggggctgggggtctcccggcaaaaggtaggagggcctcgagggaaagctgaggctcctcagggagaagggcgcagtggtggaggggaggcttggaccgggggtgtctcagtatcccacggaaataacctagatgggcgcgatctggtaccagaaggtgggtggtcttgaataggggatctgtggcaggtcggagagagatccgtctcctggaggagaaagggtctaggatgcgcgggggctcaggagacaggccggggatgaaggcggcgtgcagggggtgcgcccgaggtctggggaaaagtctttgcgggaggccgggtcggcgactcccgagggctggtccggaatgggggcgcctgagggacgccgtgtagggggcagggagggagcaagcgtccccggcggcaaagggaggcggtctggggtccccaagtcctgcctcctcgcggggcagcgtcgcgccaagaggtccccgcgcctccggctcccagcggcaacggaaaagtctcaaaagtttttttcctcttctcccgaccagctcgtccctcctcccgctcctcctccccctcctccccgcagtggcgggggcggcggcggctcgtctcagactctggggcctcaggctgctcctcggcgactccttcctccgctccgggccgaggccggccccgcgggcggctcagagccggggggggtgccccggacggggcgtcccccctgcccccggccggggccctcgctgtctggctgctccgcggagggaggt

SEQ ID NO: 61716 - DNA, 1874 bp, Homo sapiens
  misc_feature (1)...(1874): n = a,t,c or g
ttttgctccaagcgaattaaatggggaacccccggggttttcccctcccgacgttgttaaaacccgggcccggaaattgattttgggggccccaaaaaaaaaattttaccttgccagcccccggaaataaaacttgattctttaaaacggcccccccttttttttttttttcacatgtgtaacatttattatattaatacttaacaaagccctccaagacccaggctccccctaccccctaccttgggccacgtcttcatcttagtctttggagagaaagctctgaagtcaagtggtgagttttccagaacaagtggttcttctccttgatgacggcccagtcctcaaagctgtcgatgtgttccttcagccgcgagcagagctgcacgttgcccacgtagtccaggaggacatcgatgatgggccccgcccagcggctcacctctggggcagatacgaactcacagaactgcaccacgctgggctccttgtcggccgcgggcgcgtcgttgaacctgctggagggctgcggggccggcgggtgcgggccgttgccgtagaggcatgagaagcagggctcgccgtcgcagcccaggtccatgaggaacttgagcagcgacaggcacttcatggcgaacatgatggtggcggggaaggcggtggggtgcgtggcgatataggcgtcgatgttcgcgccgtggtccagcagcagctgcattgtgcgcaggcagccgtggcggatggccacgagcaaggggctgatgacgtcgcggttggggtcggcgccgtgttgcagcagcagctcggtggcgtacacgttgttgttgaccaccgcgaagtacagcgcggagctgcgccggtcttcgtagaggcgcgcgcgctcgggcgccagcggcgtgttcacgtcgaagcgcgcgctcagcagcgcctccagcacctcgtcgtggttgcgctcggccgccaggtgcagcggactgacgccgctacggcgtatgcgcgtgcggctggtcaccggcagcagcatctgcacgatcctgtagttgcccttcttggaggcgatgtgcagcgggagcaagccgtccttgttggtcttgttggcgtcggcaccctgtgacagcagaaactccaccacctcctcatgctcattcttgcaggcctcgtagagggcagacgcgttgtcgctggcctgcgtgttgatgtcagcaccgtacttggctaagaacctcaaggcctccaactgtccactctgggcggccacgaacaaggggctgatgccgtaggcattcttggattccaccttggctcctccgctcaccaggatctgcatgacctccaggtcattgcgagacacagactcgtgcagagcggtccagccgcggttgcagcggtggttggtgtctgcgttgtgctgcaccaagaatcttcacggcttccgcgttcttgcgctcacaggctttgtagagcggtgtctctcgggatttgttggagatgtccggctctgcccctgcttggagcagtgacaggagacagtccaggtggcccctgcacgttgccaaagtaaacggcttgtttcctcctgcagggtgcgctggtcgatggtcccttgggtacgctcgctgcaggactttcaggcagcccacctggccatagtatgcggcctcgtgcagcggcagccagccctccttgttgggctctgcgagattcttcccttccttgatcatggtcttcaaggcctcttcagtcgccatccttgatggcctttatcaaggggtccgcaggcgccagctgggaggtcttgaacaagctgctgctgtatttctgcatgaccccttggaacagncccattgggcccgggccggcgaactctcaggagg

SEQ ID NO: 61717 - DNA, 2830 bp, Homo sapiens
ttttttttttttgactgttcatggccatctttattcccagtgctggctatcccaaaatactgccaggccacagccaacccccacctttgccaatgtgactgggtcaccaccccatacaccaaagcagccttgagccctgccccaccccctgccctgcggaagccaagtccccagctataaaaccctgcccctcctggtggcccaggaccctcaaagatgcacacaggggccccagcgaggggcccctccgtcattagccttctcctccaggctgggctgccaagcagcctggagctgagtctgtcccttggacgctgggccacgtcaccttctcctccagaaggcttcacctatgggcccaggaagtcctccttccgatagcccttcgcccgaaagtcacggtggagcttgttgtactgccacaggttggccaggaggctggatgctgcccgggaggacttctcactgtcggggctgtcccgcttcttcttgatgaagatgagctttcggagtccgtcaaaatacagcaggtctcgggcagcgatggggctggccaccaccaggttgttgagcacagctatgatgttgaccagcacctcggctgggggcgacttctcacccacgctgcctggcagcttctcgaatcaggtggctccaccaccttcgtggacatctcgtccttgttcctagcgttccgagacaggtttcggatgaggccagtcagtgagcgcagctggtggtggtcggcggtcctgacacggtctagcagggggttcagaatacgctcctgctccagggccaggcggcttagcccccccggcccccttgggttcgcctcccgtgatgttctgcagcgccccggcggccgcctccgtcgtgtgccggttgagctcgcagcgctgcagcagccggttgtacagccccacgatctgggggctccacagccactcgaggcccttggggtccttggacacctccgcgaaggtgagcgcatcggcggcgaggggcagctcgcgcagccgccggctctgcggcgtgaagcagcccacgacctctcccggcggcgcccccgccaggtccctgcggccgcgaccctccagccgctgcagcgcggacggcggcatctcgtcgtagaggcggtaggacaggttccgcaggacgcacaccgcgttctccacgctcttgtcctcgcatttgcccgcgtccagggcgtggttgatagaggtgaccagggcgtccaccagcccgtggcactcccgcatcttctggcgagtggcctgagaggctgagctgaggttcctggggaagccggtggcgttgtagaagatctccgcctccgaggcgttctgctggatgaggggggggacccccagcccccgacaagggggctcaaacaccaaggtcttgtgagctgcttccagcggtgtcttcttggccaggcggtccttcaggtggtcgctggatgaaaggttccacaggatccctgtgacatttttgcgaagctcatcatcctgctcccgcagtgtccgcagcagctcgaagatcccgttctcctccaccagggccagcttgttgtcagcgttgtcgtagatgaggttgcgcatggcacctgtggcatggcgctgcacttcctggttggcgtggttgaagagcttcaccagcctaggcacggcctgaaggctgcgggcctgcttcttggcggctgcatcgctgtagcacttgtgctggatgtaggccgctcccagcacctgcaggttggggtctgaagccatgaggtacttgactgctgagggcaggtcaatgtcatcaaaaccgctgctgagtctctgcagggttcggtggctaccgtagctgttgaacccatgcacgtccggcaggtggcccgagtcagccaggctgaggctgaggctgcgcacagatggcgctcgagccactggctccaggacggcccccggcactgccccgcctaccccgcggctccggtggctgctctggaatcgctgcagggtccgcacggcaggggcacggatggtccggctcggggaaacctcagtggcctcgggccagtccagcccccctgcccggctggagctggagctggcctggcgctcgtacgcaaaggccctgtaggtggaggtggccgcaggctccagctgctcagacaccaggctgtagcggtcgtccaggcccccgggccccagccgcagcgagcgcagggagagtgtgtcatagtcggcccggctcccaaccccaccgcgctcatggaaggacacgggcctggtgggcatgggaggggtgggctgggcacccccgtacccagcggccccaaaggcgctgcccccgttgtgggctgaactcagcctccgactgcagctcagatccacggcggagcgggaggaccaggaggctgggctgtaggccggcttggcgatgggccggaagcccgaggtcttgtccccactcaggccctgagagcgagagctgaagccagcctgcagggtgtggtactgccccctggatgtgcctctggcagtctcggcctcaggctcgggctcagcggccccgttgtgccgcggctgctgtcccagctgcaagaggcgggcgcggacctgctcctggacgcgggctgcccgcagccgctcggcctccggcccctcggcgccccggcggtccagctgcaggtcagagggcagcgccagggagcacacgccggcctcaggctgcagggccgacagcaggaagttaccgtcctgcatggcggcaggtccaccgggcctgggcctggcggccgcctccaaacccaactatcttcacgtcctgtccggaattc

SEQ ID NO: 61718 - DNA, 873 bp, Homo sapiens
gaatctaggacattctatagagcctggattcttcaaaaaagtcatacacacacacacatgtacgtacaccttaatttataagatagaaatcaaaagaaactacagagatgaacagcccaatgcaaggcatgcccttcattgatttctggatttttttaagtcataaaagatatttgggagtcacttaagaaaattagaatgcaaactgtatattaaatggcattatggaattatcattacttttcttaggtgagataaggatattgtaattatacaagagatgtccttcatctaggagatggctgctgaagtattgaagggtaaagtgtcctgtgcttataactggctttcaaacagacaaacaaaaaaagctggtccaaaatggcagtggcaatggatgcggataccccaagaagtaccaacagcagtgctttgaagtaaaaaagtgaaatgcagtagctagccctctgggcttgggatgttgtggttaataactgtgccatctgcaggaatcacagcatggatctgcattgaatgtcaagctaaccaagagtctgccacttcagaagtgtgtaccgttgcacggggagcctgtaaccgtgcttttcacttcactgtctctctcactggctcaaaacacaacagctgtgcctgttggacaacagacaataggaattcccaaagtatggacaccagaaaaagaattcttccatcaagcttaactgttttgtgattcatttaatgacttgcccttctgtcacttaattataaattagatagaactgtgtcttttctgctttgtctttgccatttgctgttctcgcagccacattgtattctgtgtcaaataaagtccagttggattctagagcg

SEQ ID NO: 61719 - DNA, 1316 bp, Homo sapiens
ttttttttttttggagaaggaaatcgtctcaattgtttattcgactcacagtcagtgcacacactctaccatccaaaagtcgaagctgtgacaatcgactgctacaggcagtgcatggatgtgtaaacaaacacaaatgaaaatgcaaatcagagtgggcggggccaaggcccactgttacattcacagcacagggtaagtgcaaaagaacaggatgtcaggatggggggcggggagcacagggtccttcctgccctggaggctgcctccaggcatcagcctgggaggtgggttagtgcccatggaaccctcctgcccaggaagctgcctccgggcatcagcctgggaggcgggttagtgcccatggatccggtgtctgggaaggggcccacagaagatgggccacacccagcatcatctcctctctgtggtgcgccctcccatccccagacccctttcccattcaggggagaggggccctggtcacaggagccagtcctctgacctcctgagtgtggaaacccaggaggggagtgtgtttctcctgcaggcctctcaacctggaaagggcagagccacagcagaacgcgttggggccacagacactcgctcaggtgaagacactgagaagacactgccgggctgacagaacccgcggcgggggaacgcgcttgcaaacaggactctcgaggcccaggggaggctctgccccataaggcccaaggagcgtttgtgcgttgaactgaaggcaaagtgctgggcagtttcttgtcctaatgaaggtggggaagctggtccggccacatacatcctctgacctcccccaagtggtccccgggcccacaggtgacaggggcctgagcgatccctggtctgagcccccagctcagagcctagcaccacccagggaggtctgggctcatggaagggggatgggcgggggcaggagggcccagccccacctccgcccgtctttggtggtgacagaggtgggaggagaaaagacgatctttggtagggcgagggaatgtcaaaggacactgtcaagggcccagttcctgctcagaagagagcacaggagtgggaggcccacctctgccccatctctggatggcccaggcctgctgcccactaaggtggccccactctccttctctggagttgcaaactctctgagaaggcggttgaggtggggagggcatcaggacaggccagctggatgctgagaccatatagccacaggtggcttctagctcaggacactgtgaccttctcctcagggctctaggccccatccttcacctcctccctcccag

SEQ ID NO: 61720 - DNA, 1913 bp, Homo sapiens
ggaggaccccctggctggagctgacccacagagtagggaatcatggctggagaattggatagcagagtaatgtttgacctctggaaacactcattctcaatgcaagatcctccgctgcaatgctgagtacgtatcgtccactctgagccttagaggtgggggttcatcaggagcacttcgaggaggaggaggaggaggccggggtggaggggtgggctctggcggcctctgtcgagccctccgctcctatgcgctctgcactcggcgcaccgcccgcacctgccgcggggacctcgccttccattcggcggtacatggcatcgaagacctgatgatccagcacaactgctcccgccagggccctacagcccctcccccgccccggggccccgcccttccaggcgcgggctccggcctccctgccccggacccttgtgactatgaaggccggttttcccggctgcatggtcgtcccccggggttcttgcattgcgcttccttcggggacccccatgtgcgcagcttccaccatcactttcacacatgccgtgtccaaggagcttggcctctactggataatgacttcctctttgtccaagccaccagctcccccatggcgttgggggccaacgctaccgccacccggaagctcaccatcatatttaagaacatgcaggaatgcattgatcagaaggtgtatcaggctgaggtggataatcttcctgtagcctttgaagatggttctatcaatggaggtgaccgacctgggggatccagtttgtcgattcaaactgctaaccctgggaaccatgtggagatccaagctgcctacattggcacaactataatcattcggcagacagctgggcagctctccttctccatcaaggtagcagaggatgtggccatggccttctcagctgaacaggacctgcagctctgtgttggggggtgccctccaagtcagcgactctctcgatcagagcgcaatcgtcggggagctataaccattgatactgccagacggctgtgcaaggaagggcttccagtggaagatgcttacttccattcctgtgtctttgatgttttaatttctggtgatcccaactttaccgtggcagctcaggcagcactggaggatgcccgagccttcctgccagacttagagaagctgcatctcttcccctcagatgctggggttcctctttcctcagcaaccctcttagctccactcctttctgggctctttgttctgtggctttgcattcagtaaggggaccatcagtcccattactagtttggaaatgatttggagatacagattggcatagaagaatgtaaagaatcattaaaggaaggcaggggcctagggagacacgttgaaacaatggacatttttccagagtcagatgtaggctgcagtcccggggttgaaattatcacagaataaggattctgggcaaggttactgcattccggatctctgtggggctcttccaccaatttttccagcctccatttattggtaaaccaaattgttcctaaccccatttactgccagatttcaccccttataagtttagaggtccatgaagggttttaatggatccagtaaggattttaagggttgagatttttaaggagccaagagctgaaagcagaagacatgatcattagccataagaaactcaaaggaggaagacataattagggaaagaagtctatttgatgaatatgtgtgtgtaaggtatgttctgctttcttgattcaaaaatgaagcaggcattgtctagctcttaaggtgaagggagtctctgctttttgaagaatggcacaggtaggacagaagtatcatccctaccccctaactaatctgttattaaagctacaaattcttccccccaaaaaaaaaa

SEQ ID NO: 61721 - DNA, 864 bp, Homo sapiens
agtcaggggagacctgggtcccccgcactgacttcctttctcctcacagggcaccagcctccaaatggctatggaccgggagcagaaccaggtgaggaggcccttcctggagttcctcccctcccttcccttcctcttccctcctcttccttctgccatcccaggaagaggggaggccagggctgtggctctcgctgacccccatctgtgagtcacagttttctctcccccaggttttaatggtggcctcgagccacagaaaattggtgagtcctcctgggcccccgacccatgttgagcggaagctggcatctccctcatgcctgagtcagtctgtctgtccgcatccccctgtctatgagctggtcacctggccctcctgatgctgtccctgttccactagcctgtccctagctcctctccaatctctgtcctgcaggtttaggttatgggaatggtgtcctgggagccagggtcttccccgaggcccacccacagccaggtgcctggggagcaggggtcggggtgggagagttgggctcagggccccagcccagcctctgacaccctctttcctcctccagggttccatggggccaatggttttaggaatagtgagtcagacccaggggacaaagtgcagtggagtgggggagacaacagcccaggggctaggcgggaatgaccagagtctcttggaggggatggggtggaagctctggtgtaccccaaagcagcagctccagcccctgaaggaaatggtaagaaatgagccttctgggagcagagccaagcccaacaggggccaggggtcccagctcctgtgggcaagggtacccctgccatcagaattccaccgcacgg

SEQ ID NO: 61722 - DNA, 1085 bp, Homo sapiens
ccttttttttttttttagtgttttggtcttttattcatggtcagcagagttagaaaaataaaacagaacgaaaacatcaccaccccagtgggccggtgagtctggccaaaatggggaaactgaggtagcccagagtcacagaggaggcctggcccctagcatcaaggcaccagtgaagggaggctgcggactccctcccctgcacggtggggacagccacccagagttagtgtgctggggtccctctgccaaaggaggtgggcgtgatgcccaagcccaggatccccttcaaacctcccctgggctccacgtcccaagggcagggccacgggccacagtggcctcctcttcctcctcctccaaggatcaggataggccgcctgcctgggccctctctacctagccctggaggcaggggcatcacagatcagtgcaggtgactggagtgaccccatgaaccagcagcgtggggcccaggtctcgggttagagtctccagtagcgccaggtagcgggggtatcgggcgggatcggctggcggccgaggcaagtacaggaaggtgagggctgtgatggggccctcagcatccccaccctccggcccacccggccctcctcctgtgccgcgcccctgctgggcccgaaccagggcgttggcgctgcgtgccagggcctctgcctctgcgtctccccgcccactgttcacaaagtccccttcctcctccgcctcgggttccccagccccggccccctcgccccacaccacctcatgcacctcagcccggatcctcagttggctcagcagtgcccgcagccgcccctcggccgccccaggcgcctcccgaggccccaggcacaggaagatccggagccgggcgctatgccaagcgggcaccatgcccaagatggttgccatctgcagcaggaagaggccgcagacatccacatagccgggcccaccccggggccgcagcaggttgaggggccacacgtccacatggtgcagctgagaggtgcccccagacccccggctcagccgctcagggggcaaggccccgctggcccgggccagcaccacctcgtgcc

SEQ ID NO: 61723 - DNA, 2605 bp, Homo sapiens
  misc_feature (1)...(2605): n = a,t,c or g
atccttaattaaattatttccccccccccccggtcggtagaggcagaaggagaaggtcgggttgtagaagctggggtggccggcagctcgctcatcggtgttcgtgggctttgtcggtccgtgcctcgtctctccctggaaagggagggaggcttcgacgtcgagagggagccgctgccgcgttagttccgagcttgaagtcactaggacttctctcaaacttgtgtgctgaggagactcagatgttggcctcagctcctaggctgaactcagcagatcggcccatgaaaacttctgtattgagacaaaggaagggatctgtcagaaagcaacacttgttatcttgggcttggcagcaaggaagaggacaggtagtggagatcctgcaatctgaaaagcagactgaaaggtgacaaagaagctgaagatgggtggtggagagaggtataacattccagcccctcaatctaagaaatgttagtaagaaccaacaacagcttaacagacagaagaccaaggaacagaattcccagatgaagattgttcataagaaaaaagaaagaggacatggttataactcatcagcagctgcctggcaggccatgcaaaatggggggaagaacaaaaattttccaaataatcaaagttggaattctagcttatcaggtcccaggttactttttaaatctcaagctaatcagaactatgctggtgccaaatttagtgagccgccatcaccaagtgttcttcccaaaccaccaagccactgggtccctgtttcctttaatccttcagataaggaaataatgacatttcaacttaaaaccttacttaaagtacaggtataaaataagacaaatgtttaaatttagttatgttcacgggtagttgtcaattggtctgaaacaaatttgctagggaatctatttgtgtagaactaattaatgtaaaaaaaatagaccatctcgtgttgtgtgcactgtgatataatggtagtatcagtgcaacttaaactaatgattgtacttgatattaagtgttctcaactgagtaacttttaagtggaaaccaagtttagatttggggagtggtaaaggaatcagctttttctattgttaggggaagacagtaatttatcattcatggaccagtagattgttgaaagttggtgaatcggattataagcttctagctaacacaaggattcagaattaggtaaacatctgaaggtttagtatattagaaacacccaaaccagtaatatgctaacctgatgcactgctgaaagaaaatgtgaatttttcgtaataattgcattttagtgaattgtacagtgggtggaaagggcatttggagctcattagaatgagacatagtacaccccaatggccctgtttattaaatgtagtggattaagtgtctgtcaacaaatacaccaaaaccattttttatagaaacagtatttaatggtcactcaatagctttcaaaatacatttttgtattacagcactgcacaagctattctaatagtgctctggcctcatcattcctgcaaagcttgctttggggagttggataatgtgaaaattttaagtacctaggggagaaagagccatgtaaatatctgtaataaacttgtagcatatgtaaagttttcttggcctttatcttacaaaaatggagtattttagtatgaatttgctgaatgtaagaccgtggactgttttttataatatggcctaattttaaaggtccaaaataacttgtttttaaagtttgcccttgtgctaaagtgccagtgtatgtatgttatacttgatttggttgtaaactatatttcaaagtaaaccctagtgtaataagttttataactaaaaaggtttaagctgctaaaactatttttaagagatgtgaaatgcagtatgggactatctttttttcctcctctaagcccaaagattaactagagtccctccaaccttatagattgttggctttcacaatcttataacctaggatacaggtagtttcgagtatggtgccagtgatgttttgtttttgtttggtcaaggggtaggtgcaacccaatggaccacttatgcaaaagatgtaaactcttgcataatacattgataacatgttttgccaactttaaatgcttaaacataagcgaaaccagtagcaagtatgtgggtcagcttaaaaattttgattgttaatgccctattttctaatttggcacctcttgatgcctaagcaggtaagcagatgcctaagctgtatttctccaaataaatcaagatgaagtactgcccaagttaaatattgatagcctaaagacaagtttatgtagtacttaatgtacatgatatgaatgtgaagcataaaattaaataaaatttttccccaaaaaaaaaaaaaagggggggccctttaaaaggaaccaattttaatccccggggggggcaaagtaaaattttttttattggggcccctaaatttaattcctgggcccggcttttaacacggcgggaaggggaaaaacccggggggtacccaatttaatccctttgtggaaaannnnnnnnnnnnnnnnccntnccc

SEQ ID NO: 61724 - DNA, 1382 bp, Homo sapiens
cgctgctgtcggcgcacgaaacctgtttggaggttatggatgataaacccaatcctgaagccctaagtgacagttcagagcgtcttttctcctttggcgtcatcgcagatgttcaatttgcagacttagaagatggctttaatttccaaggaaccaggcggcgatactacagacatagtcttcttcacttacagggtgccattgaagactggaataatgaaagcagcatgccctgttgtgtccttcagcttggagatatcatcgatggatataatgcacagtataatgcatccaaaaagtccctagaacttgttatggacatgttcaagaggcttaaagttccagttcatcatacatggggaaaccatgaattctataacttcagtagagagtatttaacacactctaaacttaacactaagtttctagaagatcagattgtacatcatcctgagaccatgccttcagaagattattatgcttatcattttgtaccattccctaaattccggttcattttacttgatgcatatgacttgagtgtcttgggcgtggatcagtcttctccaaaatacgagcagtgtatgaagatattgagggagcacaatccaaatacggaactgaatagtcctcaaggtgaattattcctttgagctgagaatctaatagattgtctttaaattcttcagctaccttttattcagcaggaagatggacaattaaggactttctgagccccagtttgtccagtttaatggaggattcagccaagaacagctaaactggttgaatgaagtgctaacattctctgacacaaaccaagaaaaggtggtgattgtgagccatcttcccatttacccggacgcctctgacaatgtgtgcctggcctggaactacagagatgccctggcagtcatttggtctcatgagtgtgtggtgtgtttctttgctggtcacacccatgatggtggctactctgaggatccttttggtgtataccacgtcaacctagaaggagttattgaaacagctccagacagccaagcctttggcacagttcatgtctatcctgacaaaatgatgttgaaagggagaggcagagttccagatagaattatgaattacaaggaaaggaagagccttcccattgttaagtctaatttattttaacttgatagaaaatgagctttgtgtttgtccctcctaaacaaaaaaataaaaatcctctgtctcattgtttagtattcagcttgcataacaaaatgtatttatagtttcagtgtgtgatggttgataaaatactcagaaatgttattttggatcatgtatccattgtaagttagaaacaaaccagggaggaaactgaggcaggggtgtatagt

SEQ ID NO: 61725 - DNA, 978 bp, Homo sapiens
ttttttttttttctaaatgtgtttactatttattttttactcttaaagtgatgttatttacatgtgttgttagaatgcaaaccttatcagtaggacatcaaggattaagctctggcagtattaatagttagaacagtcacatgtatgcaaatttttacatagttaaaaagaagaatcactgtaaaataaatgcttattctttaattataagtgatgtggaacaatgtgtacttagttctaaagttcagtcaaggagacttccaggatgtgcatagctactgtatgagtgtggggtgcagagatggaggatgcttctggaagtcaagcagtggaattccatggtatactcagaaaagttaatagttcagttatttccaagaagccttcttgctgcagaccagtaattaatggtcccgctgctcctctctttcattggtgccttcttcttcttcagggaatgctgattcattctggcctttcagatgcttaaccccttttatggtgggtggtgtgtacacactctgcttcctttgcttaggggatgcattctgtaattccccttgtgtgttgggccccctcttgtcatctatttctggggggttatgctcattgagaatcacaagtgatgctggtgtaggtcttcttttcctgatctgctctgctgcttcaggtgcaatctgactctggaatacaggcacggcaaactgtatctttttgggactgttgggctccatggtaatgatgataattagtcagagatgtgaagagctcagaaagactaaccctaagtggtgtccgggatgtgtttcctcagacacactccactaagccacacagagtgcttcgtaataaatagctgtaattccagatcgagcaagtgaagatgccgaggtttgagtaacccccttcttcaacatccacggtgatgcctggcttgcctgttcccccaccaatcccttggatcctctcagcacaata

SEQ ID NO: 61726 - DNA, 783 bp, Homo sapiens
cggcggtgcccgggcgtcccctgcagacacgcagccccgtggaactcccggcgggacggttggggctggaggaacaggacgcccgctctcggcctcccttcccgggcctgggctgagggcagccgttggtgggtttcagggccgcctgggcagaatgtcacgatggacgagggcggcacgcccctgctccccgacagcctggtctaccagatcttcctgagcctgggcccggccgacgtgctggccgccgggctggtgtgccgccaatggcaggccgtgtcgcgggacgagttcctgtggagggagcagttctaccgctactaccaggtggcccgcgacgtgccccgacacccagcggccatgtcctggtacgaggagttccagcggctgtatgacacggtgccctgcgtggaggtgcagacgctgcgggaacacacagaccaggtcctgcacctcagcttctcccattccgggtaccagttcgcgtcctgctccaaggactgcactgtgaagatctggagcaacgacctgaccatctcgctgctgcacagcgcggacatgcggccctacaactggagctacacccagttctcccagttcaacaaggacgactcgctactgctggcctcgggggtgttcctggggccgcacaactcctcatccggcgagattgctgtcatcagcctagactccttcgcgctgctgtcccgcgtgcggaacaagccctatgacgtgtttggctgccggctcaccgagaccagtctcatctcggggaacctgcac

SEQ ID NO: 61727 - DNA, 1287 bp, Homo sapiens
ttttttttttttatttgcatgtgccaggaaatatcctacatttattgttacaaaaaccatgttatcacgttagtgtggaattctttagaagccccggctaaataagctttagaaatggaatgccttcaatggctcaatctcagaaatggcaaaattctaggacacatcaagacctgctcttccgctttccactagttcccaatctttgatttccaggttttggccctttcaaacccattttttgcgtttctgaaatcaagaatagcttgagaaatctcttcattggtgttcatcacaaatgggaccatgttgggataactgggttctcttaatggctccccagcaattaagacaaagtgggcttctcttgggatccttgttctccacttgggacactggtcaccttctccaagcaactgctgtgtgatgaggttctatttttttggtggggcatcatcgggccccatatacacatctccagatatcgtgtaaatgaagcttgtccaccctttaagggataggttgggaaatgtttggctccctgggtccaatttgaagtccaaatataaggttggtgtgccaagtgtaaaccttggaccttattcccagagctttctcagaaatgacagcaactgtcacaccatcctacttggggttaagggatttctttacttttcagttcctgggtacttggggctccaccatcttctctgagctcctcaaattaaacccacagttgtaagcccatgggctgggctcctctgagcaaggcatctcagcgtgcagaatgccccggcccgcagtcatccactgcaaatctcctgggttcattttaccagtgtgtccacagaagtcttcatgggccatgctgcccccttccaggaggtaggatactgtttcaaaacctcgatgtggatgatcaggaaatcctcctggtctacctcctttaaattcatcaaacagtaaaaacggatccagattttttaactcgggtctgccaatgcttctccggaccctcgctccaaccccttccgactgctcccggctgagcactgagagagtaactttcttggaggaccccatatcggagtctaaaaagagagtgttctgatgctgagctgtagaggatggaggggctgcggtagcggcacctggagccttagcggcgggggtgacgcgaagagccgccgggagcgagtgcagggagggcaggttaagagagtgtgggtccagtcgcctcaccgtgactcagcgcttcgcggccggcggcctagaggaggcgggagg

SEQ ID NO: 61728 - DNA, 2977 bp, Homo sapiens
caagtgtggagaaagcggctctgggtctagattgagggatactccccctttccaccatgggcaagaagggcaaagttggcaagagccgacgagacaagttttatcacttggcgaaggagacgggttaccgttcccgatctgctttcaagctgatccagctcaatcgccgctttcagttcctgcagaaagcccgagccttgctggacctgtgtgctgcgccagggggatggctgcaggtagctgccaagtttatgcctgtatccagccttattgtgggagtggacctggttccaatcaagcctctccccaatgtggtgactctccaggaggacatcacaacagaacgttgtaggcaggccctgaggaaggagctgaagacctggaaggttgatgttgtgctcaatgatggggcccccaacgttggggctagctgggtccatgatgcttactcacaagcccatttgacactgatggctctacgtttggcttgtgactttttggcccgtggtggcagcttcatcacaaaggttttccgttctcgtgactatcagcctctgctatggatctttcagcagctgttccgccgtgtccaggccaccaagccccaagcctctcgccatgaatctgcagagatctttgtagtctgccaaggattcctggcccctgacaaggttgacagtaaattctttgaccccaaatttgcctttaaggaggttgaagttcaggctaagaccgttactgaattggttactaagaagaagccaaaggctgaaggctatgctgagggtgacctcactctctatcaccgtacctcagtcactgacttcctccgagctgccaaccctgttgacttcctctccaaggccagcgaaatcatggtagatgatgaagagttggcacagcatccagctaccactgaggacatacgggtgtgctgtcaggacatcagagtgttggggcgcaaggagctcaggtcgctactaaactggagaacaaaacttcggcgatatgtggccaagaagctgaaagaacaagcaaaggcactggacatcagcctcagctctggagaggaagatgaaggtgatgaggaggactcaacagctggaaccacaaagcagccctctaaggaggaggaggaagaggaggaggaggaacaactgaaccagaccttggcagaaatgaaggcccaggaggtggcggaattgaagaggaagaaaaagaagctgttgcgtgagcagagaaagcagcgggagcgtgtggagctgaagatggatctgcctggggtttccattgcagacgagggggagactggcatgttctccttgtgcaccatccggggtcaccagttattagaggaagtaacacaaggggatatgagtgcagcagacacatttctgtccgatctgccaagggatgatatctatgtgtcagatgttgaggacgacggtgatgacacatctctggatagtgacctggatccagaggagctggcaggagtcaggggacatcagggtctaagggaccaaaagcgtatgcgacttactgaagtgcaagatgataaagaggaggaggaggaggagaatccactgctggtaccactggaggaaaaggcagtactgcaggaagaacaagccaacctgtggttctcaaagggcagctttgctgggatcgaggacgatgccgatgaggccctggagatcagtcaggcccagctgttatttgagaaccggcggaagggacggcagcagcagcagaagcagcagctgccacagacacccccttcctgtttgaagactgagataatgtctcccctgtaccaagatgaagcccctaagggaacagaggcttcttcggggacagaagctgccactggccttgaaggggaagaaaaggatggcatctcagacagtgatagcagtactagcagtgaggaagaagagagctgggaacccctccgtggtaagaagcgaagccgtgggcctaagtcagatgatgacgggtttgagatagtgcctattgaggacccagcgaaacatcggatactggaccccgaaggccttgctctaggtgctgttattgcctcttccaaaaaggccaagagagacctcatagataactccttcaaccggtacacatttaatgaggatgagggggagcttccggagtggtttgtgcaagaggaaaagcagcaccggatacgacagttgcctgttggtaagaaggaggtggagcattaccggaaacgctggcgggaaatcaatgcacgtcccatcaagaaggtggctgaggctaaggctagaaagaaaaggaggatgctgaagaggctggagcagaccaggaagaaggcagaagccgtggtgaacacagtggacatctcagaacgagagaaagtggcacagctgcgaagtctctacaagaaggctgggcttggcaaggagaaacgccatgtcacctacgttgtagccaaaaaaggtgtgggccgcaaagtgcgccggccagctggagtcagaggtcatttcaaggtggtggactcaaggatgaagaaggaccaaagagcacagcaacgtaaggaacaaaagaaaaaacacaaacggaagtaagcagagctgccaggctcccaggagagcatggggactaggaggaagggtgtggcatggctcagtctggcccccttgattaccggcctagcccctgctcacatcacagctgtctgaagaacagtgaggtggagtgcctagaactcccgtggtggtcctgagcagagaggaggatgtcctcctgcctgcctgaaggtctcccatgaaaacactgctgaactgtgttgacactcatgaccctttttttaaaccgttaaagggaagttcggtgttggagcgatactcaatgtagtcagtctacacctggacgtgtgggccacttaagccctccccacccccatcctattcctaaataaaaccaggataatggaaaaaaaaaa

SEQ ID NO: 61729 - DNA, 1012 bp, Homo sapiens
cgacccacgcgtccgctctacttatccttccaatgatcactgccaagttctctttagccatgcaaatggtttctcttgacgattgacccatgaacacttgaaaggaaggtgtattctgccactttaaaatgaagtgctttataaacaacaaagagctcaagttagctaaaactggatacaggcgcagatttattatatgaatatattacgtagtggcaaagtccaggcttttaagacatgattgggaaggtgtttatttttcctaaagaatctaatagtgctcacgtgagcttgatcacacagctggagaaatctacagaacttcactgcgtgtcttcatgcttataccgacctctcccatggctatcgcctcttctcctacagcatccagaccaagagcaatgagatggtcatttttaagtctcaaattggggagtacaatcttatcattgggggtgacaaggttttcttcaaggtctgtgagaatttccccaccctggtgcacatctatgccagctgggagtcctcctcaggcattgctgagttctgggtcagtgagaagccttaggtgaggatggggctaaggcagggtttctctgtgggagcttaccccaagattgccctgggtagcagcagggttcctatggaggcaagtttggtaagagccagtccattgtgggagagattggagatgtgtacatgtgggactctgtgctgtccccagaagaaatctggtttgtgtatcaaggtatctacatcaaacccaatattctggactggcgggcattgaactatacaatgcaaggttatgtggtcacccagtcccataaatagagttgaagttctgcttcaacaggacaaagttactgggaaggaaatccccaacatgaaagaccagctctgaagacaattctacttcatgccttatgtctatttctctgttttctctgaatttcctatctattgaactgcttaatttacaataaaagtacaatgccttctaaaaaaaaaa

SEQ ID NO: 61730 - DNA, 1832 bp, Homo sapiens
caagatgctcagctagcagagctgacttcctgccacaaagtagtgtggcctcacagtcgtcttctgaaggcaagctggctacaaaaggtgacagctcggagagggagagaagggagcaaaatttacctgcacgtcccagcagggctcctgtgagtatttgtggtggtggggaaaacacctcaaagagtgcagaggaacctgtggtcaggcccaaaatcagaaacctggcaagtccaaactgcgtgaaaccaaaaattttttttgatactgatgatgatgacgatatgccacacagtacttccaggtggagggataccgccaatgacaatgagggccactcggatggcctggcaagaagagggagaggcgagagttcaagtggctatcccgagccaaagtaccctgaagacaaacgggaagcgaggagtgaccaagtgaaaccagaaaaggtgccgagacgacgacgcaccatggccgaccctgacttctggacgcacagtgatgattactacaaatactgcgacgaagactctgacagtgacaaagagtggattgctgctctgcgtcggaaatatcgaagccgagagcaaaccctgtcctccagtggcgaaagctgggagactctgccggggaaagaagagcgggaacctccacaggctaaggtgagtgccagcactggcaccagccctggccccggtgctagtgccagtgccggggctggcgccggggccagtgctggcagcaatggcagcaattaccttgaagaagttcgagaaccatctcttcaggaagagcaggcatccctggaagaaggagaaattccttggctccagtaccatgagaatgacagtagcagtgagggggataatgattctggtcacgagttgatgcaacctggggtattcatgctggatggaaacaacaaccttgaagatgactccagtgtgagcgaagacctagaagtggattggagcctctttgatggatttgcagatgggttaggagtggctgaagccatttcctatgtggaccctcagttcctcacctacatggcacttgaagaacgcctggcccaggcaatggaaactgcccttgcgcacttggagtctctcgcagtggatgtagaggtggccaatccaccagcaagcaaggagagcattgacgctcttcccgagatcctggtcactgaagatcatggcgcagttggtcaggagatgtgctgccccatctgctgtagcgaatatgtgaagggggaggtggcaactgagctgccgtgccaccactatttccacaagccgtgtgtgtccatctggcttcagaagtcaggcacctgccccgtgtgccgctgcatgttccctcccccactctaaagaccaaggccgtttactcctggtctgattattttccccatctgaaatccacaatactgcaggagccctcttgaaattaacaatggaaataaaaccaatcagtcagttagcctaaacctattgattcctcgtgattatttccaatgtgaaaacagttgtgtatgattgcattaaaaatcatatcatcttttagaggttagaaaagggaaaactaaactttctaaatgctacttgagattgcagtaagaagatacgttttctaacctgaaagttaaatcgcatttgttttcttcagtagaatgggaatgtgttgctgttacttgtaatgtcaagtttatctgttaaatatgtccaaaaggcaaaatcatttttgttgcatgttatgggtcgatgttcctgtaattgcagtgccgtaaaagcttattaaagttgttcttttggttttacatggtaaaaaaaaaa

SEQ ID NO: 61731 - DNA, 1286 bp, Homo sapiens
ttttttttttttaaccaaatatgaaaatgtgttttatttctcagtacaaagccagatactgtaaggctatgaaaaactgactagccagaggccagaaaggacaaaaagaagactatctctggcctggtgccctgtgatctggcgtggtgtcacaggaggtctggggacagcagcaaagacctggaccggtggaggtggatgagggaagcgatctgccagcccttccagcctcccgcggctggggcctgaggatcctgcctgcctttgggggccactggttgcctggcctggctggttccaggaatgaactgggagaggacaggaggtgcagggagggggcgggggtgggaggcgtgaccctttttgcacgggaagctctgttttcattccgtgccacaggtgagtgtgcagggctagagttgagaatgaaactagggtgctgttgcccccaaaggtaccttcagtccctctaccacatcccagttagaaagtcttgagcccttggacaggcagacatgggcctgggacttaaggctgtaggaggtgaggctgtagtgacaggggtgggaggtgaggccgtagtgacaggggtgggaggtgaggctgtagtgacgggtatggggcggagctgagaggaatgtgtgcggcaacagacgtgagggtgtttctccaaggagttgtggatcctcttcagtgtcaggggagcgtgggcatgtgtgagggctcaggcctcgccctcctctccactgtcatgcacgctggcctgtctcaccaccttccggaacctgggcgtagaggaaatgcagggctctccctgcccctgcccctgcccctgctcctgctcctggaaggcctgggtccggttggccaccacggcactgccctggagggtaaccactgactggcgggacttcagggcaggctgaggccccctgtccacctgctggcctcccttggtccttgcaagctgtgggaagggctgcagaggctcttcatgtgaagactcgtgggaagagaagacctctggcatgtcactggtctctgaggtgctctccagctccaaggagggctccagaagactgatggacctcatgacccctcggaggtttatacgtggccgtggcccaggctcttctttcggggctgcctggctctcttccatgcctacaaccttctcctccccaccaccctcaggttctggcggaagaggtgggaatggtgtagagacttcaggggctgggtgctcctctggggagaccccacccacgaattccaccacactggac

SEQ ID NO: 61732 - DNA, 2073 bp, Homo sapiens
aaatgatggaagaaattgaaaatgcaattaacacttttaaagaagagcagaggttgatatatgaagagctaattaaagaagagaagacaactaataatgagttgagtgccatatcaagaaaaattgacacatgggctttgggtaattcagaaacagagaaagctttcagagcaatctcaagcaaagttcctgtagacaaagtaacaccaagtactcttccagaagaggtactagattttgaaaaattccttcagcaaacaggagggcgacaaggtgcctgggatgattatgatcaccagaactttgtaaaggtgagaaacaaacataaagggaagccaacatttatggaagaagttctagaacaccttcctggaaaaacacaagatgaagttcaacagcatgaaaaatggtatcaaaagtttctggctctagaagaaagaaaaaaagagtcaattcagatttggaaaactaaaaagcagcaaaaaagggaggaaattttcaagttaaaggaaaaggcagacaacacacctgtgctttttcataataaacaagaggataatcaaaagcaaaaagaggaacaaagaaagaaacagaaattggcagttgaagcttggaagaaacagaaaagtatagaaatgtcaatgaaatgtgcttcccagttaaaagaagaagaagagaaagagaaaaaacatcagaaagaacgccagcgccagtttaagttaaaattactactagaaagttatacccagcagaagaaagaacaggaagaatttttgaggcttgaaaaggagataagggaaaaggcagaaaaggcagaaaaaaggaaaaatgctgctgatgaaatttccagatttcaagaaagagatttacataaacttgaactgaaaattctagatagacaggcaaaggaagatgaaaagtcacaaaaacaaagaagactggcaaaattaaaagaaaaggttgaaaacaatgttagtagagatccctctaggctttacaaacccaccaaaggttgggaagaacgaaccaaaaagataggaccaacaggctctgggccacttctacatatcccacatagggctattccaacctggagacaaggaatacagagaagagtatgagataatcaaattgctactcagttgataagaatgttaacatactaagttataccagggagagagtgactaaccacattctttaaatatcaatagcttagtcagattgattattgtgctatattgtgaattgagaggtattaagtttcatgaggctttgtcattagtattcctgcttctaccaagaaggtatttaatatatgtgttggcctattattgatgtaaaagttatttaaataagttaatgttagaaacattattcaatttaaatactgaaaacatttcaaagagattttgtttttgttatagcatagcaaagtaaattggaacaatcattccaatgacatttttttaaaccaaaatttttgtaacttttataacttggagttaagttagcttgagtaacaaaaaggtaaagtggtttttgtttagagttaacgaaatgttagtactttttctaatgtttaaccaaattggcagtttgtcagttatgacatttttgtgtaataaatattttgtatttgtttgaagcatgctttgttttatatagagaatatttattttaaaaatatgtctctcatataccctattaattgtattattgatataatctttttggtttccttcagcaattccaaattttccttcagcctttctggatttcacagatttataaaatctttgtgtctttcacatcttcctggctaatgcagttttcttttctgcttctgtttgcctcaaaataggaaaattctttgttctgaaacatcatctgaaataagccagctttaaaatactgtgatttctcttgatggcacttaaaatgttttaggtggggcatggtggctcatgcttgtaatcccagcactttcagaggtcaaggtaggagaattgaggcctggagtttgacactagcctgggcaacacagggagaccctgtctctacagaaaaaaa

SEQ ID NO: 61733 - DNA, 873 bp, Homo sapiens
acctagctgtgtccccacaaggcggaaaggggcaaacaagttccctcaggccactcttacggggcattaatccctgacttaatcacctcctaaaaagggtgtcctcttgacactatcacattatggattagggttcaacctatgaattacgtaggcacagacacattcagatcctggcactacatgtaggatattcagttagcccctggttgaggggcgtttgtgttgctactggttttctgctattacacataaccctttaatgaattgccttacgcatgcatgtttttgagtgttcgtcagtctctctttggaatagactcccagaagtggaattgctgagtcaaagggtaaatgcatacggaattttgattgatacggccacttcccatccatgggggttttactgttttatattcccgccagcagtgaatgagtacccttttttccccaacagagtattttgtcaaatttttcaatttttgcaggcttatagatgagaagtgatattatctcactgtacttctaattgcatttctctcttttcatgtggttaagagccatttgtattttctgtgaactatttaacctatttttctatagaatttttggtctttttcaaccattttcagctctttgtatactaggaatattaaccctttgtaatgtttgttgtacatatttttcccaatttgtcatttatcttttcacttggtttctgcaaagatttactttatttctgtgttaaatgtgttgattttttcttattgcttctggattttagagtcataggaaggttttcttcattcccagcttttacaggaatttatcgtgtttttttcaggcagacttttatagtttctggttttacat

SEQ ID NO: 61734 - DNA, 1470 bp, Homo sapiens
ttttttttttttctgggggctgcttttatggggacgacctgacagagggcatggtccgtacaaaaccgggaacaatacatacatatatatattatatacagagatgcggccctcccgacggctgggcaggggtggccgctggcccaagcagcccgaagcggccccgcccacccggttccgccccctccatctgccggggtgaagtgcgcgagcccaggactgagacagccagctccttcaggggatgggggcacatctggggataggaaggggtggggacaagaaatactgatcgaagtcatggtctatttacaggggacaagaagccaaaacggatgggatgggtggtctgtttttaaaaaatgaacaaaaacccagttagggcaggggcatgaagtggcaaaatgagatggattttgaaaggggaggggacctgggggaggtggtctcacctcccttggtccaagccccaatttggggttaaagtggggaaacagagtcgatttcacttagaaggcaggctgccagcagggcagccctggtctccaaaaagatgagtagtagtaaaattttgccctccagtcaaaacattggaaaaccagtagggggtgggggcgaggctgactccctgcaatgtcagtaggcttccaggcatcgccctgggctgggcagacagggcagcacaggataggacctgactctccagggagaaatgttccccttgcctaagaccagggtcgctgtagccagaccccctttcctccctggcattcccaggcttgaccaggaaacctggaccccagagaggccacataacagttccaagacgaggttatggctatttggcacctggaagaggggaggcacaaggagaaattgagggctgctgccccaggcaatggggagctggggaccaggtgtcctgaactctccctttttcccactctcactcccccttttcccgaaggacacatgagaaatcagtgcagggccagggccaggcccagcctccgggctctggggtggactctatccctcccaggacagggaacagggatgggggaggtgttgaggcaacgcccccaccccccaggcgggagggtcagaatgcaacagagacggcacaatgatggggggagagggaagggccgagaaggtagaatctcaagtcaagaggcccaggggccacccaggtgccccatgggcagggagcagcccccagttggcagatgctgggagagccccagccccgttccagtccagagacaaaagctggagtgtgtaaagtctggcagtttgatctgcaggtgcttgtgtccgtcgaccaccaggccagccctcggcagccctcggcctctgtgcctcagccccatggggcaagaaagaggctgcccttctagccacctctgtctgcccaggccatcttaagggggcctgtatatagccggcgctggtcgaccgggaatccgg

SEQ ID NO: 61735 - DNA, 3595 bp, Homo sapiens
gggcagtgtctcgtttgcagtcggcgctttaggggaactgtcttcctccgcaggcgcgaggctgggtacagggtctattgtctgtggttgactccgtactttggtctgaggccttcgggagctttcccgaggcagttagcagaagccgcagcggccgcccccgcccgtctcctctgtccctgggcccgggagggaccaacttggcgtcacgcccctcagcggtcgccactctcttctctgttgttgggtccgcatcgtattcccggaatcagacggtgccccatagatggccagctttcccccgagggtcaacgagaaagagatcgtgagattacgtactataggtgaacttttagctcctgcagctccttttgacaagaaatgtggtcgtgaaaattggactgttgcttttgctccagatggttcatactttgcttggtcacaaggacatcgcacagtaaagcttgttccgtggtcccagtgccttcagaactttctcttgcatggcaccaagaatgttaccaattcaagcagtttaagattgccaagacaaaatagtgatggtggtcagaaaaataagcctcgtgaacatattatagactgtggagatatagtctggagtcttgcttttgggtcatcagttccagaaaaacagagtcgctgtgtaaatatagaatggcatcgcttcagatttggacaagatcagctacttcttgctacagggttgaacagtgggcgtatcaaaatatgggatgtatatacaggaaaactcctccttaacttggtagatcatactggagtggtcagagatttaacttttgctccagatggaagcttgatcctggtgtcagcttcaagagacaaaactctcagagtatgggacctgagagatgatggaaaccatgatgaaagtattgaggggtcatcagaattgggtgtaccagctgtgcattctctcctgactcttctatgctgtgttcagtcggagccagtaaagcagtggtggcagcaatattggtgtgattgaggttatgctggcaccactcgcacacaggcgccacaatggtgttaagctgggcagaaagagtggcatctctggctaccgggctgggggcgacctttaccataggatgaagtaaccttgcattcgtgctgcaaggtgtactgtacgtacacaggtgctggtcgatgtccactttctgcttttctttctttctttttttcttttttaaagtaatttcccccacagtaaaataccactgactcctgagtaaattgattttccagttttatggaattgggagtctgacaagtgaaaccaatttaatgtaaagtatttggctttcaaatggtttctctgtgctattttttggaattctttcagattccagagatatcttacgtctttgattcaatttaaaatttgtacttattttcttttagaaataatgtattgtgtctgtgcagaaaaaaaaaaaaccaaaaaggattgctttactccaagaggagagattgtcttaggataaacctccaagctcacatttaatataacagactgaagtaaacattagaatcctgtttagagctattctgcacagttaactactgatctttagaatctaaaattgtatatgaacttattcttaaataattgacccgttttatattcaaatgacttatgatcgtggttagtttgggaaaaataagatggttaaattttgatttattgaaatgtaattgtattattttcataaaatagcattttcattttgtaatgtggtttaacatccttgttgtttgccaaagaaatttcatttggctgtgaatattctatttgcttgcagtatctgtttctcttcctaggctcaagttggtgacccaagcctattgtaaacaagtgattatctcaaagggagatgccaatggagtaacaatttgttaaccttacgttttctgtctgtatatttttttaaaaatctggtagtttctggaaaaaaaagagaagggggtttgtagtacttaaccctatttatttccgtatattttagttaattagtttttggaataaatggatttcagtatagctttgtggttaaattgcattgcctttattttatgtttaggcttatttttaaattaacatttaacagaaacatttgaaatagaatttgcatgtctgccttaattaacttaaagactgattttaatctgactatgacactgagcatattctttaaattactcataatttataatgcttaatataatcttaattaaatttagcagttttagtataagatgtgccattttgtcctctgtatgtctgaatgaagctataacatttgcctttttattgcaggttttcctttggaatatggataaatacaccatgatacggaaactagaaggacatcaccatgatgtggtagcttgtgacttttctcctgatggagcattactggctactgcatcttatgatactcgagtatatatctgggatccacataatggagacattctgatggaatttgggcacctgtttcccccacctactccaatatttgctggaggagcaaatgaccggtgggtacgatctgtatcttttagccatgatggactgcatgttgcaagccttgctgatgataaaatggtgaggttctggagaattgatgaggattatccagtgcaagttgcacctttgagcaatggtctttgctgtgccttctctactgatggcagtgttttagctgctgggacacatgacggaagtgtgtatttttgggccactccacggcaggtccctagcctgcaacatttatgtcgcatgtcaatccgaagagtgatgcccacccaagaagttcaggagctgccgattccttccaagcttttggagtttctctcgtatcgtatttagaagattctgccttccctagtagtagggactgacagaatacacttaacacaaacctcaagctttactgacttcaattatctgtttttaaagacgtagaagatttatttaatttgatatgttcttgtactgcattttgatcagttgagcttttaaaatattatttatagacaatagaagtatttctgaacatatcaaatataaatttttttaaagatctaactgtgaaaacatacatacctgtacatatttagatataagctgctatatgttgaatggacccttttgcttttctgatttttagttctgacatgtatatattgcttcagtagagccacaatatgtatctttgctgtaaagtgcaaggaaattttaaattctgggacactgagttagatggtaaatactgacttacgaaagttgaattgggtgaggcgggcaaatcacctgaggtcagcagtttgagactagcctggcaaacatgatgaaaccctgtctctactaaaaatacaaaaaaaaaaaaaattacccaggcgggggggggcacacctgtagtcctagctacttgggaggctgaggcaggaaaattgcttgaacccaggagggggaggttgcagtaagccaagatcacaccactgcactccaacctggacaacagagcgagactccatctcaaaaaaaaaa

SEQ ID NO: 61736 - DNA, 1011 bp, Homo sapiens
cgggctggaacagagcagccggcctctgtcctaagactggccacgctgagacggacaggcagcaggggagcgaccggagctggggcgctggatgtggggaaagggagagaggtgttagggaggcccccagtctcgggcccaggttacaaggtcttaccctggggtgggaacccaggaggtggagtggctggggggcacagctgagaagttcaggaagatggaggatgaggattcccaggttcctccctgtccatgtcagggtgaggggtgcaggagcacagaggccatgctctgccatggctggggacttccttgtgaatactgcagccctagggctgcaaggggacaccacgcacagagacacggcaggccccgtgttggccgggggtgggggtgagggcagaaccagccgagggacgctgagtcagaccgcttgcccactgctctggtgcagggacctggctgcaggtgctggagaccatcggtgtgctggcggtcattgccaatgggatggtcattgccttcacatctgagttcatcccccgagtggtctacaagtaccgctatagcccatgcctgaaagaaggcaactctactgtcgactgcctcaagggctacgtcaaccacagcctgtccgtcttccacaccaaggacttccaggaccctgatgggattgagggctcagaaaacgtgactctgtgcaggtttggaactccccatcccccaagaatgccctctgaactcctgacccctgacctcaggtacttccttaccccagatacagggactaccgcaatccccccgattacaacttctccgagcagttctggttcctcctggccatccgcctggccttcgtcatcctctttgagcacgtggccttgtgcatcaagctcatcgccgcctggttcgtgcccgacatccctcagtcggtgaagaacaaggttctggaggtgaagtaccagaggctgcgtgagaagatgtggcatggaaggcacaggcatgcgttgg

SEQ ID NO: 61737 - DNA, 1087 bp, Homo sapiens
  misc_feature (1)...(1087): n = a,t,c or g
tttccggagcccgccccctccggggagnaggaggaggggcggcgggggaagggagggcgggtggaggggtcgggaggaacggggggcgggaaagatccgccgggaccaccggcacggccggacgcgcgccgccgggttgaatcctccgggcggactgcgcggaccccacccgtttacctcttaacggtttcacgccctcttgaactctctcttcaaagttcttttcaactttcccttacggtacttgttgactatcggtctcgtgccggtatttagccttagatggagtttaccacccgctttgggctgcattcccaagcaacccgactccgggaagacccgggcccggcgcgccgggggccgctaccggcctcacaccgtccacgggctgggcctcgatcagaaggacttgggccccccacgagcggcgccggggagcgggtcttccgtacgccacatgtcccgcgccccgccgcggggcggggattcggcgctgggctcttccctgttcactcgccgttactgagggaatcctggttagtttcttttcctccgctgactaatatgcttaaattcagcgggtcgccacgtctgctcgtgccgaattcggcacgaactgtgatgcccttagatgtccggggctgcacgcgcgctacactgactggctcagcgtgtgcctaccctacgccggcaggcgcgggtaacccgttgaaccccattcgtgatggggatcggggattgcaattattccccatgaacgaggaattcccagtaagtgcgggtcataagcttgcgttgattaagtccctgccctttgtacacaccgcccgtcgctactaccgattggatggtttagtgaggccctcggatcggccccgccggggtcggcccacggccctggcggagcgctgagaagacggtcgaacttgactatctagaggaagtaaaagtcgtaacaaggtttccgtaggtgaacctgcggaaggatcattaacgggagactgtggaggagcggcggcgtggctcgctctccccgtcttgtgtgtgtcctcgccgggaggcgcgtgcgtcccgggtcccgtcgcct

SEQ ID NO: 61738 - DNA, 1041 bp, Homo sapiens
tggggcaaggatttcatgagcatcctcctctaaacgcgtgtcaagacaaaagatgcttcagctttggaaacttgttctcctgtgcggcgtgctcactgggacctcagagtctcttcttgacaatcttggcaatgacctaagcaatgtcgtggataagctggaacctgttcttcacgagggacttgagacagttgacaatactcttaaaggcatccttgagaaactgaaggtcgacctaggagtgcttcagaaatccagtgcttggcaactggccaagcagaaggcccaggaagctgagaaattgctgaacaatgtcatttctaagctgcttccaactaacacggacatttttgggttgaaaatcagcaactccctcatcctggatgtcaaagctgaaccgatcgatgatggcaaaggccttaacctgagcttccctgtcaccgcgaatgtcactgaggccgggcccatcattgaccagattatcaacactgagagcctccttggacctcctgaccgcagtcacaattgaaactgatccccagacacaccatcctgttgccggactgggagaatgcgccagagacccaaccagcatctcactttgcttgctggacaaacacagccaaatcatcaacaagttcgtgaatagcgtgatcaacacgctgaaaagcactgtatcctccctgctgcagaaggagatatgtccactgatccgcatcttcatccactccctggatgtgaatgtcattcagcaggtcgtcgataatcctcagcacaaaacccagctgcaaaccctcatctgaagaggacgaatgaggaggaccactgtggtgcatgctgattggttcccagtggcttgccccacccccttatagcatctccctccaggaagctgctgccaccacctaaccagcgtgaaagcctgagtcccaccagaaggaccttcccagataccccttctcctcacagtcagaacagcagcctctacacatgttgtcctgcccctggcaataaaggcccatttctgcaccaaaaaaaaaa

SEQ ID NO: 61739 - DNA, 2257 bp, Homo sapiens
ttttttttttttaaatatttgaattttattttcgttttgttttacaactgtggaacactcagataatctataccatgttagtattcctacaagagaaaacgggtaaaacagtatttagaaagcagtacccagtaaaacgttattacaagccattagatgtgtttaaaaagttgatacctaatttataaccctgtaattggtaaatggtgcatgacttaaatgttaaaatcctgtattttaaggatagtcttctgcagttacaaatcccatatacccagatttcctgtaggcttcacaaatcggaggggtacatagaatgtgcaagagtcaaaggataaataatattataaatatatattaactatattacctaattaaaaccataatctgttaatacagctatggattaatttcaaaaaaatgtaatcaaatatattactaatggtgtagttggctgttttccaatgttggtaaagttattaaagttcttcactttcatagagtccagattgagctgccaaacgctgaaattctccttctgggttaaaagcttgttttacattcaaacctttcccattaagtgctaaatatttgctgaatgttggtcgaacccgtaactgcttaggagctggaagagtttggtttggacgtgccgtaacgtctaatcttgtgttacatgtagtcactccagcttcattaactgctgacacagtataccacccagcatctttcttgtttacatcttttatcagtaaagtaactcttccagtgttatcttgatataagcttattcggtcagtgttgaattgtaccatttcattatttcttttccagaaaagctttggtggaggtatagccgagatctggcattctagtttcactgaatctccctctaaaacttttttgctctgtggtttgtagataaacattggtgctcttttatgttcttttgcaaggacatccagctgcacagtgaaggtggcttctcctgctctattcttggcaacacatgcataagcccctgcatctgaagctctgactacttcaaagatgagtgaatgaagacccttctcagacactatcattttgtgcaaatcatctgattgaactgttcttccatttagataccatgacacatcaggagctggcagtccactcactttgaagtccattctgcagaatcttccttcatcaatcgacatgttctctggcacttgaatgaaacgtggtgggtaaaatttctcctggattgcatcctgatcattcacatctccccttgaggttgatctacttcttacttgtgatgtaggaacttgcagtcgcgcatgttctgagttgtgttgctgcgagtcttgtgcaccactgtcatcctgagcttgaaacacagcagctgcattctgtggtcctagcaatctgcgagccatcttctcttcatatgttagacgttgatttccattatgaagaagggtgtccttgcatttcagctttctttccaaatcttgaatcaaagcttcttttgatccttgtatttcatgatcaggagttcttggtatgggcttaaccatttgcagtttgggatggctttgccatttatagggttggcccagctgaggactgttgatagttggaatccatagcggaagggattttactgctattgtaatcaggctgtgatggtaatatggagctgaggaagctggctggggactggttataggtggttgtaaccctttggcctgggttggagccagcatgctgctggggagaagcagggaaagcagaggaggacatggtgatgtgagagctcagtgttgaggaggcagaaaatctttgctctgtacactggcggggctggatgataatggaagactgtttggtctggctagagaagctggaggtttctggtccaggaggctgcaatctggagccacatgggttttgggactggatgaagtgttttggacgttcgtagttaaacatgcttagttggtatatggaagatgaaggcaaattattactataatgatttgttcctggaagggtggggccctgaatttggggccacaagcctggaattacggaaggttgtaaggaatcagaagcaaccttggtctgctcttccttgttgagatcctgagaatactgtgctcctggctttggtagagtgaccttctcttgaagaatattgttcccgtagttccagagggtgccagctgggtttaacccactattgaagggaaggaagaggcatctcctt

SEQ ID NO: 61740 - DNA, 2263 bp, Homo sapiens
gcgaccgcaccccccggccgggccgtgcttctgcccctacaaggtttgggccgaggtgggggagggtcctggttgccggccccgcccggtccctccccgccttttaggcgcccgcgtggccgggacgtcccagtcccgctccgtcctcctcgcctgccaccggtgcacccagtccgctcacccagcccagtccgtccggtcctcaccgcctgccggccggcccaccccccaccgcaggccatggacgccatcaagaagaagatgcagatgctgaagctggacaaggagaacgccatcgaccgcgccgagcaggccgaagccgacaagaagcaagctgagagtccgctgcaagcagcatggaggaggagcagcaggccctccagaagaagctgaaggggacagaggatgaggtggaaaagtattctgaatccgtgaaggaggcccaggagaaactggagcaagccgagaagaaggccacttgatgctgaggcagatgtagccatccttgaaccgccggattcagcatgatgaagaggagctggaccgggcccagggagcgcctgggcttacagccctgcagaagctggaggaggccgagaaggcggcttgatgaggagcgagagagggaatgaaggtcattcgaaaaccgggccatgaaggatgaggagaagatggaactgcaggagatgcagctgtaaggaggccaagcacatcgctgaggattcagaccgcaaatatgaagaggtggcccaggaagctgttgatcctggaaggagagctggagcgctcggaggagagggctgaggtggccgagagtaaatgtggggacctagaggaggagctgaaaattgttaccaacaacttgaaatccctggaggcccaggcggacaagtattccaccaaagaagataaatatgaagaggagatcaaactgttggaggagaagctgaaggaggctgagacccgagcagagtttgccgagaggtctgtggcaaagttggagaaaaccatcgatgacctagaagatgaagtctatgcccagaagatgaagtacaaggccattagcgaggaactggacaacgcactcaatgacatcacctccctctgagccccacgccagcgtggccacctcagctctcttctctcctctcctttccattctctctatggggaggggagcaggcaggaggagcagaaattgccaacattgcacagccaggctgggagcagcctagggagagcccccatcatgcccaccacccactctggcactggcttcatcctttacctatccccttccaccctcctttgctgcttaataaattctgaacttggactccatgctgttttcctgccctccagagagcacctctatcgccaccacggagcactggttcactcctgacaccctggcacttactgacacccccagcccctgcactgagcccacccacaaaacaccatggcccacgctgaaacccctctgcacaggcactccctggctgtcgctctctgattcaccactgcatgtgggcacgtgtggccccatcaaaccatgaccgcctctggtgccaatccctgacctcagagcacttagctggggttccaggatcaaacagagtgactggaaaggaagtagggtggtgaggtgcaggacaggggcaagaaggttgcaaaaggtctggaatggagcttggaaaaatgttggatatcagcaacatggggctttcactgcagcagcaggtctgttttctacctcaagtctgtctgtctggcccttcctttcctggcgcagtctttgtcttaccttctgtctccaacttccttaaaccttctaaagaagaggataaagtagtttatgactcagccctccccaccccacctctatgaccccaaggccttgatctgaggcatccacgtccgtcctgttcccctcatcctagtcagtccatctggtttgtccctgccatggggccctgaaggtccgtgaatgcatgtgtcttccttgaaccactccgatgtctatatgtcaccttcccctggccctgcctccccacgtctcccccttgtggtttcccttctccctcacctgctgcttcccctcacagagaccttggccagtgccaaggaggagaacgtcgagattcaccagattcttggaccagaccctgctggaactcaacaacctgtgagggccagccccacccccagccaggctatggttgccaccccaacccaataaaactgatgttactagcctctc

SEQ ID NO: 61741 - DNA, 1143 bp, Homo sapiens
cggacgcgtgggcaagccaggaaggccctggagaatccggtgtgccccctcctccggcagagcttgggcctgggctcacgaggaaggggctgcagttctccaaggattcccgcctgctcccagacccccgggagtcgtaggaacccgttcctggacgctgacgtcggctttcagggatccctcgccggacgccgcggagggacagagcctgggaagccgtcgccccgccccgtccccgcccccgcgcgcagtgggcccggggcgctgagacccgcgtagagcaaagcgcaaggtcccagcgccccttggatcctcggtggcagggtccgggcaagtgtcattgcgagggttcaggaagccccggcctgtgatcgtgagcggaaacccctcctggagtttccccaaagccatggacagccctagtcttcgtgagcttcaacagcctctgctggagggcacagaatgtgagacccctgcccagaagcctggcaggcatgagctggggtcccccttaagagagatagcctttgccgagtccctgaggggtttgcagttcctgtcaccgcctcttccctccgtgagcgctggcctgggggaaccaaggccccctgatgttgaggacatgtcatccagtgacagtgactcggactgggatggaggcagccgtctttcaccatttctaccccacgaccacctcggcttggctgtcttctccatgctgtgttgtttctggcccgttggcatcgctgccttctgtctagcccagaagaccaacaaggcttgggccaagggggacatccagggggcaggggccgcctcccgccgtgccttcctgctgggggtcctcgccgtcgggctgggcgtgtgcacgtatgcggctgccctggtgaccctggccgcctaccttgcctcccgagacccgccctagttgcccctacagccctcactgtgaaccctgaggccggcagcccagcaaatctgtgggcagagagtggagaatcttggtggatgaggctgcggcggcggcaggagcatctagaaacgggagcgagctggactggaacccttccccttcctggccaccgctcttcgggcggcagcaacctgagattaaaccccagacacccttgcagccaaaaaaaa

SEQ ID NO: 61742 - DNA, 2548 bp, Homo sapiens
agccgcaaacccagcggagggcgggaagaaggaggaggcctctagggtggtcgggggactgggggccccgccggcagaggtccctcggcctcctgactgactgactgcggccgcctccggcaaggtacgctagggagctgcctgacgggaaggtgcggggagcggacgcatggcctccggtgctttataacccgtatatagagataattgaacaacccaggcagaggggaatgcgttttagatacaaatgtgaagggcgatcagcaggcagcattccaggggagcacagcacagacaacaaccgaacatacccttctatccagattatgaactattatggaaaaggaaaagttgagaattacattagtaacaaaagaatgacccatataaacctcatcctcatgatttagttggaaaagactgcagagaccggctactatgaagcagaatttggacaagaaccgcagaccttttgtttttccaaaattttgggtattcgatgtgtgaagaaaaaagaagtaaaagaggctgataattacaaggaataaaggcaggaatcaatccattcgatgtcccctgaaaacagctgaatgatattgaagattgtgacctcgatgtggtgagactgtggtttcgagtttttctccctgatggacatggtaatttgagcgactgctcttcctcctgtgtgtctcgagcccaatttatgacaaccgtgctccaaatactgcagaattaagggtctgtcgtgtaaacaagaattgtggaagtgtcagaggaggagatgaaatatttctactttgtgacaaagttcagaaagatgacatagaagttcgttttgtgttgaacgattgggaagcaaaaggcatcttttcacaagctgatgtacaccgtcaagtagccattgttttcaaaactccaccatattgcaaagctatcacagaacccgtaacagtaaaaatgcagttgcggagaccttctgaccaggaagttagtgaatctatggattttagatatctgccagatgaaaaagatacttacggcaataaagcaaagaaacaaaagacaactctgcttttccagaaactgtgccaggatcacgtagaaacagggtttcgccatgttgaccaggatggtcttgaactcctgacatcaggtgatccacccaccttggcctcccaaagtgctgggattacagttaattttcctgagagaccaagacctggtctcctcggttcaattggagaaggaagatacttcaaaaaagaaccaaacttgttttctcatgatgcagttgtgagagaaatgcctacaggggtttcaagtcaagcagaatcctactatccctcacctgggcccatctcaagtggattgtcacatcatgcctcaatggcacctctgccttcttcaagctggtcatcagtggcccaccccaccccacgctcaggcaatacaaacccactgagtagtttttcaacaaggacacttccttctaattcgcaaggtatcccaccattcctgagaatacctgttgggaatgatttaaatgcttctaatgcttgcatttacaacaatgccgatgacatagtcggaatggaagcgtcatccatgccatcagcagatttatatggtatttctgatcccaacatgctgtctaattgttctgtgaatatgatgacaaccagcagtgacagcatgggagagactgataatccaagacttctgagcatgaatcttgaaaacccctcatgtaattcagtgttagacccaagagacttgagacagctccatcagatgtcctcttccagtatgtcagcaggcgccaattccaatactactgtttttgtttcacaatcagatgcatttgagggatctgacttcagttgtgcagataacagcatgataaatgagtcgggaccatcaaacagtactaatccaaacagtcatgtttttgttcaagatagtcagtattcaggtattggcagtatgcaaaatgagcaattgagtgactcctttccatatgaattttttcaagtataacttgcaagatttaaatccttttaaatcttgataccacctatatagatgcagcattttgtatttgtctaactggggatataatactatatttatactgtatatataatactgactgagaatataatactgtatttgagaatataaaaaacttttttcagggaagaagcatacaactttggacatagcgaatacaaaattggaagctgtcataaaaagacaactcagaggccaggcgcaggggctcacacctgtaatcctagcactttgggaggccaaggcgggtggatcacttgagaccaggaattcgagaccagcctggccaacatggtgaaaccccgtctctactaaaaatacaaaaattagctgagcatggtggtacgtgcctgtactgtcagctacttgggaggctgaggcacaataattgtttgaacccaggaagcagaggttgcagtgagctgagatcacaccaccgcactccagcctgggtgacagagtgagactctgtctc

SEQ ID NO: 61743 - DNA, 959 bp, Homo sapiens
cagagcgagaccctgtctcacgaaaaacaaaaacgatcaaaaagctcccaaataacatggatggggacaggcgccatgaagggctgacatgggagggagacataggcagtggctggcagggggcaggtggggatgggggtcagggggaggaggtgcctgctgggcctagtgtgtcatgtcccctccacacacgccaccaaactcccactgctccgagccgcactacatccctgctccccagcctaggggctgtgctggggcctgaccctttgtgagctctcctcagtcccagtcaagtggacctcctccctccctctccacagcccttgcccttgtccaggccaccatcaccatcaccaacaccatccttgccagcctggagtcccctctcttcattctgtggggctaatgggggtggctgtgtgggaagcctctggggtctaccgttggggagctctgcatggctgaggttgggggttctctgggaacctgtggccaagggtctctggtcacagtgccgaggtgggcctggcttttccacagtggagtccattgatgattacgtgaacgttccggagagcggggagagcgcagaagcgtctctgggtgagtgaccggtgcttgtcggtgcctgcccctgcaccccgctgccccaccatgctctcagtgtgaccagatcccaccctggggctacccacaccctctgccccctctgtctgggcgtccccttgctctctcgccctcctgacccctttgcgtggctgcccctccttctgatctgtccccacagatggcagccgggagtatgtgaatgtgtcccaggaactgcatcctggagcggctaagactgagcctggtgtgttctgcgggaggggcaggagctggggtagctgctttgggcttggggggatagcttgcaagctggagaccaacctcccctcccttacagccgccctgag

SEQ ID NO: 61744 - DNA, 1424 bp, Homo sapiens
ttgttgggtatcctgatgatggcaaatgtcttcatttattttattatggaagtctccaaaagcagtagccaagaaaaaaatggaaaaggggaagtaataatacccaaagagaagttctggaagatatctacccctcccgaggcatactggaaccgagagcaagagaagctgaaccggcagtacaaccccatcctgagcatgctgaccaaccatacgggggaggcgggcaggctctccaatataagccatctgaactactgcgaacctgacctgagggtcacgtcggtggttacgggttttaacaacttgccggacagatttaaagactttctgctgtatttgagatgccgcaattattcactgcttatagatcagccggataagtgtgcaaagaaacctttcttgttgctggcgattaagtccctcactccacattttgccagaaggcaaggcaatccgggaatcctggggccaagaaagcaacgcagggaaccaaacggtggtgcgagtcttcctgctgggccagacacccccagaggacaaccaccccgacctttcagatatgctgaaatttgagagtgagaagcaccaagacattcttatgtggaactacagagacactttcttcaacttgtctctgaaggaagtgctgtttctcaggtgggtaagtacttcctgcccagacactgagtttgttttcaagggcgatgacgatgtttttgtgaacacccatcacatcctgaattacttgaatagtttatccaagaccaaagccaaagatctcttcataggtgatgtgatccacaatgctggacctcatcgggataagaagctgaagtactacatcccagaagttgtttactctggcctctacccaccctatgcagggggaggggggttcctctactccggccacctggccctgaggctgtaccatatcactgaccaggtccatctctaccccattgatgacgtttatactggaatgtgccttcagaaactcggcctcgttccagagaaacacaaaggcttcaggacatttgatatcgaggagaaaaacaaaaataacatctgctcctatgtagatctgatgttagtacatagtagaaaacctcaagagatgattgatatttggtctcagttgcagagtgctcatttaaaatgctaaaatagatacaaactcaattttgcatagaaaggtgtattttgaatagttcccatgttgtgttctcacattatagtaatttctatattataccatgaaaattgtctttatgagtgatacccaattgagggcctctaaacctttctctttgttactaaccttatcattgatagtcttatttgtttttttcttttttatctctcttgtgtattctttcatctttattcttactatttgtactatctcttttatatattcg

SEQ ID NO: 61745 - DNA, 2634 bp, Homo sapiens
tttcgtaagacgacgaggaggctgcgaaaagttaagggccggaccgcaggctgtgctcgcttccggaagtggcttctgcgacaacatgcttgcggacctcggcttaatcggaaccataggcgaggatgacgaggtgccggtggagcccgagtctgactccggggacgaggaagaggaggggcccattgtgctgggcagacgacaaaaagctttggggaagaaccgcagtgctgatttcaaccctgatttcgttttcactgagaaggaggggacgtacgatggcagctgggccctggctgatgtcatgagccaactcaagaagaagagggcagccactacattagatgagaagattgagaaagttcgaaagaaaaggaaaacagaggataaagaagccaagtctgggaagttggaaaaggagaaagaagcaaaggaaggctctgaaccaaaggagcaggaagaccttcaagagaatgatgaggaaggctcagaagatgaagcctcggagactgactactcatcagctgatgagaacatcctcaccaaagcagatacactcaaagtaaaggatcggaagaagaagaagaagaaaggacaggaagcaggaggattttttgaagatgcatctcagtacgatgaaaacctctcgttccaggacatgaacctttcccgccctcttctgaaggccattacagccatgggcttcaagcagcccaccccgatccagaaggcgtgcatacctgtgggtctattggggaaggacatctgtgcctgtgcagccactgggacaggtaaaactgccgcctttgccctgcctgttttggagcgtctgatttataaaccccgccaggctccagtcacccgcgtgctggtgctagtgcccacccgagagctgggcatccaggtgcactctgtcaccagacagctggcccagttctgcaacatcaccacctgcctggctgtgggcggcttggatgtgaagtctcaggaagcagctcttcgggcagcgcctgacatcctcatcgccaccccaggccggctcatcgatcacctccacaactgcccttccttccacctgagcagcatcgaggtgctcatcctggacgaggctgacaggatgctggatgagtactttgaggagcagatgaaggagatcatccgaatgtgttcccaccaccgccagaccatgctcttctcggccaccatgacagacgaggtgaaagatctggcttctgtctccttgaagaatcctgtccggatatttgtgaacagcaacacagatgtggctcccttcctgcggcaggagttcatccggatccggcctaatcgtgaaggagaccgggaagccatcgtggcagctttgttgacgaggaccttcactgaccatgtgatgctgttcacgcaaaccaagaagcaggcccaccgcatgcacatcctcctggggctcatggggctgcaggtgggtgagctccatggcaacttgtcacagacgcagcggctggaggccctccggcgttttaaggatgaacagattgacatcctcgtggccactgatgtggcagcccgtggacttgacattgagggggtcaaaacggtaatcaacttcacaatgcctaataccatcaaacattatgtccaccgggtggggcgaacagcacgtgctggcagggctgggcgctcagtctctctggtgggagaagatgagcggaagatgctgaaggagattgtaaaagctgccaaggcccctgtgaaggccaggatacttccccaagatgtcatcctcaaattccgggacaagattgagaaaatggagaaagatgtgtatgcagttctgcagctagaggcggaggaaaaagagatgcagcagtcagaagcccagatcaatacagcaaagcggctcctggagaaggggaaggaggcagtggtccaagagcccgagaggagctggttccagaccaaagaagagaggaagaaggagaaaattgccaaagctctgcaggaatttgacttggccttaagaggaaagaagaaaaggaagaagtttatgaaggatgccaaaaaaaagggggagatgacagcagaggaaaggtctcagtttgaaatcctcaaggcgcagatgtttgctgaacggctagcgaagaggaatcgcagagccaagcgggcccgagcaatgcccgaggaggagccagtgagaggtcctgccaagaagcaaaagcaggggaagaaatctgtatttgatgaagaactcaccaacacaagcaagaaggccctgaaacagtatcgagctggcccttcctttgaagaaaggaaacagttgggcttgccccaccagagacgaggaggaaactttaaatctaaatccagatacaagaggaggaagtagctgtcgtggcctgaagaaattcatgggggcagcccttaaatcccttccctgtgggaagtcatcctggctggtctgtcttttctccatttgtttaaaaaaaaaacaaaaacaaaaaacaacactttggtgtggtggtatggtacgtagctattttcctaagcatgtctgtcaatctcccttcttgctgattagctttcatagactattattaaatggaagtatttttgggaaaagagaaaccaaaaaaaaaa

SEQ ID NO: 61746 - DNA, 897 bp, Homo sapiens
ttttttttttttctgattgacaatgagaatatttattgagggtttattgagtgcagggacgaagggcttgatgcccctggggtgggaggagagaccccctcccccgggaatcctgcagctctagtcctcccgtggtggggggtgaggggttgagaacctatgaacattctgtaagggcccactgtcttcctcccacggtgctccccttcaatgcgtgaccctggcaactgtaaccttctgtgggacttcccactgctcaagccgtcaagcctaagataagctgctggccgcgtacttgttgttgctttgttgtggagggtgtgggggggtctccactcccgccttgacggggctgctatgctgccttcccaggccacttgtcacggctcccggggtagaagtcacttatggagacacaccagtgtggccattgttgggcttgaagctcctcagaggagggctgggaacagagtgacccgaggggagcagccttgggctggacctaaggacgggtaagcttggtcccctccgccgaataccacatgatcactactactatcccacacctgacagtaatagtcatccctcatccatagcctgtgtcccgctgatggtcaaagtggctgttgttccagagttggagccatagaatcgtttatggatccctgagggccggtcgctatcaccatagacgaccagcacaggggcctggcctggcttctgctggtaccagtgcacacttttacttgcaatgttgattcccccacaggtaatcctggccgcctttcctggggccactgacaccgagggtggctgagtcagcacataggaggtcacagagcctgtgcagtgagagaggaggccgaggaggagaacggtccaggccatggctgaggc

SEQ ID NO: 61747 - DNA, 2352 bp, Homo sapiens
tttcgtctgcgcgagagtttctgctcgctcaaccgagttgtcgtgttgccctcgcttctcagatccccgccggaagtgaagagagcaagcagatttgaacctatctgctttcaagctggtcatcatgatgaaacttagacacaaaaataaaaagccaggtgaaggttccaagggccacaagaagataagttggccctaccctcagcctgcaaagcaaaatgggaagaaagcaacctccaaagtgccctctgcacctcattttgttcaccccaatgatcatgccaatcgagaggctgaattaaagaagaagtgggttgaggagatgagggagaagcagcaagccgcccgggagcaagaaagacaaaaacgcaggaccattgagagctactgtcaggatgtcctaagacgccaggaggagtttgagcataaggaggaagttttgcaggaattaaatatgtttcctcagctggatgacgaggccacgaggaaggcttattacaaggagttccgtaaggtggtggaatactctgatgtgattctggaagtcctggatgccagagacccattaggctgccgctgcttccaaatggaggaggctgtcctgcgagcacaaggcaacaagaagctggtcctggtcttgaacaagattgacctggtccccaaggaggttgtggagaaatggctggattaccttcggaatgagttgccaaccgtggctttcaaggccagtacccagcatcaggtcaaaaacctgaatcgttgcagtgtgccagtagatcaggcctctgagtcactgctgaaaagcaaagcctgctttggagctgaaaacctcatgagggttctggggaactattgccgccttggtgaagtgcgcacccacattcgtgtgggtgttgtgggtcttcccaatgttgggaagagcagcctgatcaatagcctgaagcgcagccgcgcatgcagcgtgggagctgttcctggaattaccaaattcatgcaggaggtctacctggacaagttcatccggctcttggatgctccaggcattgtcccagggcccaactcagaggtgggcaccatcctgcgtaactgcgtccacgtgcagaagctggcagaccctgtgaccccagtggagaccatcctgcagcgctgcaacctggaggagatttccaactattatggcgtctctgggttccagaccactgagcactttctgacggcagtggcccaccgtttggggaagaagaagaagggaggcttatatagtcaggaacaggcggccaaagctgtcctagctgactgggtgagcgggaagatcagcttctatataccaccaccagccactcacactctgcccacccatctcagtgctgagatcgttaaggaaatgaccgaggtctttgacatcgaggatactgagcaggccaatgaagacaccatggaatgcttggccaccggagaatctgatgagctgttgggtgacacggacccacttgaaatggagatcaagttgctccattctccgatgacgaaaatagcagatgccattgaaaataaaaccaccgtgtataagattggagatctcactgggtattgcaccaatccgaaccgtcatcagatggggtgggctaaacgcaatgtggaccaccgccctaagagcaacagtatggtggatgtctgctcagtggaccgccgctcagtgctgcagaggatcatggagacggaccccctgcaacagggccaggctctggcatctgccctgaaaaataagaagaagatgcagaaacgtgcagataaaatcgccagcaagctgtctgattccatgatgtctgctctcgacctctctggcaatgctgatgatggtgttggtgactaatcgactgatctcacttcccttccgctccaagcaccagttccggtggtacgggggaataccagtgaaatagtttggttctccctgaagcatctgcatattgaaagaacgctttccccactgtgtgtcttctccccctcctccagtaaaaacagtcccggctgggtgctgtggctcacgtctgtaatcccagcactttgggaggccgaggtgggcggatcacctgaggtcgggagttcgagaccagcctggccaacatggtgaaaccccgtctctactaaaaatacaaaaaaatttagccgtgcttagtggcacctatagtcccagctacttgggaggctgaggcaggagaatcgcctgaacctgggagactaaggcgggagaatcgcctggacctgggaggcagaggttgcagtgagcccagaccccaccattgcactctagcctgggcaacaacccgaaactccgtcccaaaaaaaaaa

SEQ ID NO: 61748 - DNA, 1898 bp, Homo sapiens
cgtcgactttttttttttaaagtttcatagtggttctcttatttataaaataatcacattcaagtcttaccagagagtagcaaagtcttcaattcctttcctttcctttgaagaaataatgtagagcaatcactcataaatccctctaattataaataaaatccaagatattatttgacaatgagatgctttatttaaacttgatacatttactatataagaattctgtgaaaaaatggggtatgaaattattttggatctgaatctttgcattataaaatctaacccaaaactatgtcatttcactgtattctgtgactattagcagatggatgaccaaaggcaactacttcctttcctggcaaaacaagacaagtttcagctgacttccccatggtgttacaagttctcctagtgaagtaaaaagtcccaacccctctttctatgcatgtcatctccaggaaggtaagctttgggaagcacctgcgccagccctatatctgtgcttggcatgaggttcacacaggttcggccttgagatggggatgttcctctcaaccaaacaactctacttgaattattccgagactccttggaggggtgaaacttcaggcctgggtgtctctgcagtgagatgtctgtggttggtaaacagttctgtagagtcttgttctactgatctttcttctaggtctgactctgggattgtagtacaaccacctggcatgaccatggtctggtgggggctgctgcatcggtacttaggcagagacggccacctttggataatctatcgcagagcaaggtgatatgtttcttcagttggcttgtgtcctttgggtatgttcaagctggctgttgaaggttcaaaagcctgctcccttagaaactcttcgacaggcaagtcttccaacaggtgggaaatggcggcatccaccgtttcttcccagcccaattcttgagtgtcttcttgtagcggcagaaatgccgcttccagaatagcaacctggtcagcactaagcttctgccacagcgcgatcagcagaatcaccaaatgggtggcactcttcagcctggtgaatgactggaacagattgccttggttttcctccactgcatctgctagagcaattacctgcttgtaggttccatctaacaaggtgtccaggtgttgaagaggggcaggagttttatctttgaatcttgctagtagccggcgttgaatggcccgaaattgtacagctctctcagataagagttcttctaatttttcaccatttatccgtagctcaaaatggatggatccaatcaactccaaaatattccttgaaaggggtaatagatccccgaaaaagaacatgcaaaatctttgactccctgtttttcaaaatattcttgaaggcgaagaataagctcattggttaatgaagcccaaagatccttcaaattgttccactcctggaatgcgaatatccgttgaagaagttttggaagcaagaacagtaattccgagcacctccctaagaagtgaaaacccattacattcacctgatcatcatctgactgactggcaaaacctgggaagagactaagaagactgactggagatttgttggtatcaatagtaattttgtggcttgcagtttttgaaggctgacctggtaggcaaattaactttaggggaagtctaaatttacattggataactcgcggaatgccatcaggatttcgattcataaattcaaaggtgaactgatcacaagtcaattctaatggtggttgcacgtagactgataatttggctttttgcaatatcactctgttctgcagtgtgaccttcaccgtgacagaagggacaaggtcagttcccacctcaacatcggtcgcttgagaaactg

SEQ ID NO: 61749 - DNA, 704 bp, Homo sapiens
cggcacgagatcatctcagtgagacaggttaactctatcacagccacagagctgataatgcagtgagtcccagatataaacctcatttgtctaatcccagagaattctctaggtgactttttcaggataagacacagttttatctttatgaaaatttccttaacttttcaggagagaaggctcttatgaccgatacctacgaatggatgactattgcaggagaaaggatgactcttattttgaccgttacagagatagctttgatggacggggccctccaggcccagaaagtcagtctcgtgcaaaaggtaaagtagctgaaacagtctattcctattattgatagaacactttacaaaagagagaggaaactaataaccagtacccccatctgaaaaagggctagtgccttggccaagcagtgtataaaaagaagaaatataagtagcttattagtgggtaaagagcatttggcttgaaaatgatttttaagatgcaaattagtaccatcatctggtttagtcatccaacaagaagaaataaatatgaaattccagcaataagaaatgaacaaaatgctggtcactgtggccaccacctgtaatcctagcactttggaaggccaaggccggcagatcacttgagcccaggagttcgagaccagcttaagcaacatgataaaaccccatctctacaaaaaaaaa

SEQ ID NO: 61750 - DNA, 2203 bp, Homo sapiens
tttcgtgaccgatggagatggcggctgcggctgagtgacggacggtggaggcccagagcccgggcctgaagggggggacaaacctgggtgcccgcaggagcccggcagggtgtcttacaagtatcaagaacttactatatgtggttgaataaacaatcaaggtaaagagcatcaagtaaaaacttctgcttgttgataagtacttcagacattcccccagtggctgaagtggcatatgaattatgaagttggatcatttggaatgaatgtaagagaattgccaagggctcctcctactccagagaggaaacctcatccagggccatgaagccacttcctcaccatctgtgtgctgcttaagctaatgctgcgggaaccatggttccttgggaggaatcaagctgactcttggcatgagattcctgccttcctagggttgagagcggcactgccatggcttctctggacgacccaggggaagtgagggagggcttcctctgccctctgtgcctgaaggatctgcagtctttctatcagcttcactcacattacgaggaagaacactcaggggaagaccgtgatgtcaaagggcaaattaaaagtcttgtccagaaggctaaaaaagcaaaggccaggttgttgaaacgagaaggggatcatcgagcagagtcagggacccaaggatatgagtctgtcagctatggaggggttgatccgtacatgtgggaaccccaggagcgtggtagctgtgactatgccatctttccgacttcaaaaaacaccgagctgctagaattgaccactatgttgtggaagtcaataaactaataatcaggttagagaagctcactgcatttgacagaacaaatactgagtctgcaaagattcgagcaatagaaaagtctgtggtgccttgggtcaacgaccaggatgtccctttctgtccagactgtgggaataagttcagcatccggaaccgccgccaccactgccgcctctgcgggtctattatgtgcaagaagtgtatggagctcatcagccttcccttggcaaacaagctcaccagtgccagcaaggagtccctgagcacccacaccagccccagccagtcacccaacagtgtccatggctcccgccgaggcagcatcagcagcatgagcagtgtcagctcggtcctggatgagaaggacgatgaccggatccgctgctgtacacactgcaaggacacgctgctcaagagagagcagcagattgatgagaaggagcacacacctgacatcgtgaagctctacgagaaattacgactttgcatggagaaagttgaccagaaagctccagaatacatcaggatggcagcatcattaaatgctggggagacaacctacagtctggaacatgccagtgaccttcgagtggaagtgcagaaagtgtatgagctgatagacgctttaagtaagaagatcttaaccttgggcttgaaccaggaccctccaccacatccaagcaatttgcggctgcagagaatgatcagatactcagctacactttttgtgcaggaaaagttgcttggtttgatgtcactgccaaccaaagaacagtttgaggaactgaaaaagaaaaggaaggaggaaatggagaggaagagggccgtggagagacaagctgccctggagtcccagcgaaggcttgaggaaaggcagagtggcctggcttctcgagcggccaacggggaggtggcatctctccgcaggggccctgcccccttgagaaaggctgagggctggctcccactgtcaggaggtcaggggcagagtgaggactcagacccgctcctccagcagatccacaacatcacatcattcatcaggcaggccaaggccgcgggccgcatggatgaagtgcgcactctgcaggagaacctgcggcagctgcaggacgagtatgaccagcagcagacagagaaggccatcgagctgtcccggaggcaggctgaggaggaggacctgcagcgggaacagctgcagatgttgcgtgaacgggagttggaacgagaaagggagcagtttcgggtggcatccctgcacacacggactcggtccctggacttcagagaaatcggcccttttcagctggagcccagcagagagcctcgcacccaccttgcttatgctttggatctaggctcttccccagttccaagcac

SEQ ID NO: 61751 - DNA, 2547 bp, Homo sapiens
aatttccggttcgacgatcccgtcccctggcggagccggcgcgcccggggtgccgctccctgcctggcgcgctccgcacctggaggtgccttgcccctctcctgcccacctcggaatttccctgtggctcctttgatccttcgagtctccagctcctctcccttccacctgtttcccccaagaaaggcaggatcctggtccctgctacgtttctggggccatggctggtctgggccccggcgtaggcgattcagaggggggaccccggcccctgttttgcagaaagggggctctgaggcagaaggtggtccacgaagtcaagagccacaagttcaccgctcgcttcttcaagcagcccaccttctgcagccactgcaccgacttcatctggggtatcggaaagcagggcctgcaatgtcaagtctgcagctttgtggttcatcgacgatgccacgaatttgtgaccttcgagtgtccaggcgctgggaagggcccccagacggacgacccccggaacaaacacaagttccgcctgcatagctacagcagccccaccttctgcgaccactgtggctccctcctctacgggcttgtgcaccagggcatgaaatgttcttgctgcgagatgaacgtgcaccggcgctgtgtgcgtagcgtgccctctctgtgcggtgtggaccacaccgagcgccgcgggcgcctgcagctggagatccgggctcccacagcagatgagatccacgtaactgttggcgaggcccgtaacctaattcctatggaccccaatggtctctctgatccctatgtgaaactgaagctcatcccagaccctcggaacctgacgaaacagaagacccgaacggtgaaagccacgctaaaccctgtgtggaatgagacctttgtgttcaacctgaagccaggggatgtggagcgccggctcagcgtggaggtgtgggactgggaccggacctcccgcaacgacttcatgggggccatgtcctttggcgtctcggagctgctcaaggcgcccgtggatggctggtacaagttactgaaccaggaggagggcgagtattacaatgtgccggtggccgatgctgacaactgcagcctcctccagaagtttgaggcttgtaactaccccctggaattgtatgagcgggtgcggatgggcccctcttcctctcccatcccctccccttcccctagtcccaccgaccccaagcgctgcttcttcggggcgagtccaggacgcttgcacatctccgacttcagcttcctcatggttctaggaaaaggcagttttgggaaggtgatgctggccgagcgcaggggctctgatgagctctacgccatcaagatcttgaaaaaggacgtgatcgtccaggacgacgatgtggactgcacgctggtggagaaacgtgtgctggcgctggggggccggggtcctggcggccggccccacttcctcacccagctccactccaccttccagaccccggaccgcctgtatttcgtgatggagtacgtcaccgggggagacttgatgtaccacattcaacagctgggcaagtttaaggagccccatgcagcgttctacgcggcagaaatcgctatcggcctcttcttccttcacaatcagggcatcatctacagggacctgaagctggacaatgtgatgctggatgctgagggacacatcaagatcactgactttggcatgtgtaaggagaacgtcttccccgggacgacaacccgcaccttctgcgggaccccggactacatagccccggagatcattgcctaccagccctatgggaagtctgtcgattggtggtcctttggagttctgctgtatgagatgttggcaggacagcctcccttcgatggggaggacgaggaggagctgtttcaggccatcatggaacaaactgtcacctaccccaagtcgctttcccgggaagccgtggccatctgcaaggggttcctgaccaagcacccaggggaagcgcctggggcttcagggccttgatgggggaacctaaccatccgtgcacatgggttttttccgctgggatttgactgggagcggctggaacgattgggagatccccgcctccttttcaagaccccgcccgtgtggcccgcagcggcgaggaatttttgacaagttcttcacgcgggcggcgccagcgctgacccctccagaccgcctagtcctggccagcatcgaccaggccgatttccagggcttcacctacgtgaaccccgacttcgtgcacccggatgcccgcagccccaccagcccagtgcctgtgcccgtcatgtaatctcacccgccgccactaggtgtccccaacgtcccctccgccgtgccggcggcagccccacttcacccccaacttcaccaccccctgtcccattctagatcctgcaccccagcattccagctctgcccccgcgggttctagacgcccctcccaagcgttcctggccttctgaactccatacagcctctacagccgtcccgcgttcaagacttgagcg

SEQ ID NO: 61752 - DNA, 847 bp, Homo sapiens
tttcgtcgcagttcggaaggacccgagtcccttatctaaccgagagctaacaggtcggggactgcgggacggaagagggaggggaagatgaagaaaatcggtgatgaatggctggcggaaatgattggcggaaagaaagagccagttcacagtgcgcctttgtattcggcgggaaacccggccgaagagggagctggaaaggactccggaatccggccgtaattccagccaatcagggagtagagttgcggcgcggggttggggcggggcagtctcgcgggagatagtttcgcgggttcgggaggcgagtctccggtttccgcccagtctctggggacgcggtggcggggtctgaatcgcctggcttccagggagttttgggcgggtccccgcacgggagcgtggcaggcgctggactcgacagcagatgtggaactggagagcttggcgcgccctcatactttgtcacacacctacgccaccagactggggtcgggcccctccgcgttctgctctggagggcctgggtctgggcccagcatagcgcttttagaatctcctcagctgaatctgacgctcagccgtaggtgaagcttagcccgctgtttcaggccccgccgatctggaaggagtgtcagagctggagcgcgcgtggcctcatcggtgttggggtcaccccggggttgccagggctcatggagggtcgtagtctggattttgtcacccccacgtccccgccccgcagcaagtctggggttggagaactcacgcggtcttcgtaagctacatgccagttgaccctcgaggagggatgccccctccccttaagcgtccacgctggagaagg

SEQ ID NO: 61753 - DNA, 1171 bp, Homo sapiens
  misc_feature (1)...(1171): n = a,t,c or g
tttcgtgtgtgtgtgagagggagagacgacgtgaggcgagaggaaaagtctttagtcggccttaaaagcaaacaaatcagagatggaataagagcggtaattgcagcaagaccgccttgattcttgcagtccagggagctgagcgcaccgcgcgcatccggcgaggacaggaggcgaccgcgggcgctgccaagggctgcgggactttggcttttcctcagtaaacaaatcttttgattactttgacactgtggaataaagaagcggggagaaggatcaggctcaccttcacccgcttcagggggattccagcttggatgtcagattcctgaaccgtctttgccatcggaggaggaaacacatccacacacgcgcgcgcacactcgcacgctcagggccacactcacacgccgccctccacgatcacacagcaccagacttcggttccctatgcccctggatggtgacggcggattggcatcttggaagcgatgcgagagcgataaggctggcgccggcccgcaaaagctgcaggagcatcgctaggtgttgccgccaccgggaagcggggctgcaggatgagtaagagatacttacagaaagcaacaaaaggaaaactgctaataataatatttattgtaaccttgtgggggaaagttgtatccagtgcaaaccatcataaagctcaccatgttaaaacgggaacttgtgaggtggtggcactccacagatgctgtaataagaacaagatagaagaacggtcacaaacagtcaagtgctcctgcttccctgggcaggtggcaggcaccacgcgagctgctccatcatgtgtggatgcttcaatagtggaacagaaatggtggtgccatatgcagccatgtctagagggagaagaatgtaaagttcttccggatcggaaaggatggagctgttcctctgggaataaagtcaaaacaactagggtaacccattaacccaggagaaatcaagtgatcctcaaggctgatgacattgaacatgcgcataggaaacttaactcaactcctgaggtgatctttgaagatttttattaccactttgaaaagagggcgttcantagtctattttcccaaggggattttcngggcctctttctttgaattcaaggattttttaaaagttcagacatgaa

SEQ ID NO: 61754 - DNA, 4397 bp, Homo sapiens
  misc_feature (1)...(4397): n = a,t,c or g
cagctcggtcgcccccaccggccccatggcagcccccggcgccccagctgagtacggctacatccggaccgtcctgggccagcagatcctgggacaactggacagctccagcctggcgctgccctccgaggccaagctgaagctggcggggagcagcggccgcggcggccagacagtcaagagcctgcggatccaggagcaggtgcagcagaccctcgcccggaagggccgcagctccgtgggcaacggaaatcttcaccgaaccagcagtgttcctgagtatgtctacaacctacacttggttgaaaatgattttgttggaggccgttcccctgttcctaaaacctatgacatgctaaaggctggcacaattgccacttatgaaggtcgctggggaagaggaacagcacagtacagctcccagaagtccgtggaagaaaggtccttgaggcatcctctgaggagactggagatttctcctgacagcagcccggagagggctcactacacgcacagcgattaccagtacagccagagaagccaggctgggcacaccctgcaccaccaagaaagcaggcgggccgccctcctagtgccaccgagatatgctcgttccgagatcgtgggggtcagccgtgctggcaccacaagcaggcagcgccactttgacacataccacagacagtaccagcatggctctgttagcgacaccgtttttgacagcatccctgccaacccggccctgctcacgtaccccaggccagggaccagccgcagcatgggcaacctcttggagaaggagaactacctgacggcagggctcactgtcgggcaggtcaggccgctggtgcccctgcagcccgtcactcagaacagggcttccaggtcctcctggcatcagagctccttccacagcacccgcacgctgagggaagctgggcccagtgtcgccgtggattccagcgggaggagagcgcacttgactgtcggccaggcggcccgccagggggaagtgggaatctgcctcaactgagagaaagcactttccactgactccccagctggggaatgcaagacatggagatgactctggagcgagcagtgagttatgctcgaggcagaccacatgccgcccatcccaggatttctgctgcagctactttcattacagcacgagtgcttccagaaatctgaagctcggaagagggttaaccagcttcgtgggcatcctcaagcttctgcagctcctaaaagttcaggaatgaaggacgtttcagccgagctgtgtgtggggggccttgaggaaacttaggtattttgaaggacaattgaccaacaaattgggaggtgggctgaactaaatgggggtacctcggctgctccagggtgctgaagcaaaccagagacttgggagactaaaaaacaaataacagaccatacagtcaatttaagaagtaggaatggctggccgggcgcggtggctcacgcctgtaatcccagcactttgggaggccaaggcgggcggatcacgaggtcaggagttcgagaccagcctgaccaacatggtttgctgtggaatttgtcatctaatgacaaactcaagaatctcatgataacagaagcattgcttacgctgacggagaatatcatcatccccttttctgggtggcctgaaggagactacccaaaagcaaatggtttgctcgattttgacatattctacaacgtcactggatgcctaagaaacatgagttctgctggcgctgatgggagaaaagcgatgagaagatgtgacggactcattgactcactggtccattatgtcagaggaaccattgcagattaccagccagatgacaaggccacggagaattgtgtgtgcattcttcataacctctcctaccagctggaggcagagctcccagagaaatattcccagaatatctatattcaaaaccggaatatccagactgacaacaacaaaagtattgggatgttttggcagtcgaagcaggaaagtaaaagagcaataccaggacgtgcccgatgccggaggaaaagagcaaccccaagggcgtggagtggctgtggcattccattgttataaggatgtatctgtccttgatcgccaaaagtgtccgcaactacacacaagaagcatccttaggagctctgcagaacctcacggccggaagtggaccaatgccgacatcagtggctcagacagttgtccagaaggaaagtggcctgcagcacacccgaaagatgctgcatgttggtgacccaagtgtgaaaaagacagccatctcgctgctgaggaatctgtcccggaatctttctctgcagaatgaaattgccaaagaaactctccctgatttggtttccatcattcctgacacagtcccgagtactgaccttctcattgaaactacagcctctgcctgttacacattgaacaacataatccaaaacagttaccagaatgcacgcgaccttctaaacaccgggggcatccagaaaattatggccattagtgcaggcgatgcctatgcctccaacaaagcaagtaaagctgcttccgtccttctgtattctctgtgggcacacacggaactgcatcatgcctacaagaaggctcagtttaagaagacagattttgtcaacagccggactgccaaagcctaccactcccttaaagactgaggaaaatgacaaagtattctcggctgcaaaaatccccaaaggaaaacacctatttttctactacccagcccaagaaacctcaaaagcatgccttgtttctatccttctctatttccgtggtcccctgaatccagaaaacaaatagaacataattttatgagtcttccagaagacctttgcaagtttgccaccagtagataccggccacaggctcgacaaatagtggtctttgttattagggcttatggtacatggcttcctggaatcaaaatgtgaattcatgtggaagggacattaatccaataaataaggaaagaagctgttgcattactgggattttaaaagtttgatttacatttatattccttttctggttcccatgttttgtcactcatgtgcacattgcttcgccattgggcctccagtgtattgttctgcagtgttgaaacagaatggaaatgacaagaaatatctgcagttatccagggagaaagtataatgggcaaaattattggtttctttctttactttgtgcttgtttttatccccttggggntgtttttctctggatttttaaataaacttacacttaagaaatttagattaccagagtatgcctgactgtaagaaaaagaaattgagaggaagtgatcatagcaaattaaagaagtcttttcctcccagaacttaaagtaaaataaaaaataaataaataaataaaatcttttccacagagaaaggcaactgtgatgataaaatttaacgttcccccaaacactgagtcaatgagatttttctcaggagatactttacctataacaacgccgttaaatccaaatctcttctaaacgatggcattctatgtaatgcctttcctggacttttttggccactgccctggactagtgaaagaatggactctatctttatctgcaagaggaactaaggccttctatcagactgcctggccagcctggggcactgaaaatacggctcatgttaatgagttacattatcagccagcccagccttgcccaccatttaagaaatatcacagagccactagatctcatatgatcttcttcaagccattattttaactcaagaaaactctagagaagaaaagtgaagaagtcatgttgaagaagatgtaagaatgtgtcaagaccatccagaaatgatatgagaaatactgatattttaaatggttgacatcatccagcgaaatgaatctacattaaatgttgttttaactgcgctatggattaaaaccattcatataggagttaggtctttaccaactactattctgttatttttttttttaatctggacaacatttgtccctaggtaggttagggcaaaaaaattctttcaactccttttggcgaagaaaactgtaacagaaaataaattttgaatgtgtacttaagtctttattatatttgaaacaatttttttttcaattttaaaagctgaatgaagacaacttaggttgcctaacctagttcaaaatgaaattatttagataccaatttttaaaatactggagagaatttatatgtctttttccagagttctgatgataagcatttggagtgcatttattcctccagataataaatgtgtgttcagaactttttgtgttttttaaggcattaataaagccttcgataatattaaatacaaaaaaa

SEQ ID NO: 61755 - DNA, 1978 bp, Homo sapiens
attcccgggtcgacgatttcgtaaggagattcggaggacaaagcgagctgttagggagtatttgggagtggatttgggggctgaatgcagatcttggtattgggagggtttgcatcacgtggcaggtgcgagcccagagagaccggcgcagggatcctgatcttgaaagattgggagagggcaggaggccagtctctatgggggcggttcccgtaggatcaccaggtgggttcgcgtgcccagattgactgcttgtgggtggcatggcctcaggtggagaggcttgctgcggactcaggctggcgaatagccctggcgaacaacgggcggaggggaaggtgtctttcaagtcggtatttactctgaactgagggaagaaaagaacggaggccgcgtcagaccgagagctgctctgcggcggccagagagggaatcccaagctcttaatgggcgggggtgggggtagaaatgtctttttctattgtgtttgagaccggtaatattggggagggggagaacaagtattatcccacgcagtacaccccaatctcccagttcatttcctaatccttaaactccggtttcaaactccctcgctttgctcttcagttgcaggttccgatctttgggtactccaggagctgttctatagcccctgcttctggacctatggattctccatctagcgtttcttcctattcctcctactctctctcttcgtcttttcccacctccccagtgaacagtgactttggcttcccctctgatagtgagagggaggacaagggggcccatgggcccaggccagacactgttgggcagaggggaggttcacggcccagcccgggtcctatccgctgcaggcatcgatcgaaggtttccggtaaccagcatacaccatctcatccgaaacagcggggttcggcttctcctatggcaggatctggggcgaaaagatcaagagatggtgaactggagaccagtctaaacacccaaggttgtaccacagagggagacctgctgtttgcccagaagtgtaaagaactccaaggatttatacctcctctcacagacctactcaatgggctgaagatgggtcgttttgagagaggattaagcagttttcagcagagtgtggcaatggacaggatccagcgtattgtaggtgttttgcagaggccacagatgggggaacgttacctaggaaccttgctacaggtagaagggatgttaaagacttggtttccacaaatagctgcccagaagtcatcattgggtggtggcaagcatcagctgaccaagcattttccaagccaccacagtgattcagctgcttcctctcctgcatctcctatggaaaagatggaccagacacagctaggacatctagctttaaaaccaaagcagccttggcacctcacacaatggccagctatgaacctcacctggatccacaccactccaatttgcaacccccctctcagctccccaggtactatctcctttagccatggtcctttaggcactggaaccggcattggcgtcattcttttcctccagcatggagtgcaacccttcacccactctgccccaaccacccagtcccacctactacagcatctcctgttcattccctggtgagcctatgaaactatctggagagggtcctcgttgctacagtttgcccagtaactctgccattcaggactggagctataccctatcccctcccagtctacccaccttggccagaaagatgaccataggacaccgggagcagcagagaagccatcctccagttgctgctgatgctcatcttctcaaccttctagcccagggcatacagctgtccactgtgacttctaatttgtgtaaatatttatgtatatatgtatttttactattaatgtgtgcatttgtgttgagggaagataaatcctttctgattaaagaaatttttttatacctaaaaaaaaaa

SEQ ID NO: 61756 - DNA, 2000 bp, Homo sapiens
  misc_feature (1)...(2000): n = a,t,c or g
aagaatgcttgcctctctggggcttgagtttgaaaggcgccacgaggggccgggtagccagccctcaagttaagtgcactagcccacgggttcccgaaaaggtgggattggatagctcatgctccatctccccgccacagcatggcaccttgggcagtggccgctcctcggacaaaggcccgtcctggtccagccgctcactgggtgcccgttgccggaactccatcgcctcctgtcccgaggagcagccccacgtgggcaactaccgcctgctgaggaccattgggaagggcaactttgccaaagtcaagctggctcggcacatcctcactggtcgggaggttgccatcaagattatcgacaaaacccagctgaatcccagcagcctgcagaagctgttccgagaagtccgcatcatgaagggcctaaaccaccccaacatcgtgaagctctttgaggtgattgagactgagaagacgctgtacctggtgatggagtacgcaagtgctggagaagtgtttgactacctcgtgtcgcatggccgcatgaaggagaaggaagctcgagccaagttccgacagattgtttcggctgtgcactattgtcaccagaaaaatattgtacacagggacctgaaggctgagaacctcttgctggatgccgaggccaacatcaagattgctgactttggcttcagcaacgagttcacgctgggatcgaagctggacacgttctgcgggagccccccatatgccgccccggagctgtttcagggcaagaagtacgacgggccggaggtggacatctggagcctgggagtcatcctgtacaccctcgtcagcggctccctgcccttcgacgggcacaacctcaaggagctgcgggagcgagtactcagagggaagtaccgggtccctttctacatgtcaacagactgtgagagcatcctgcggagatttttggtgctgaacccagctaaacgctgtactctcgagcaaatcatgaaagacaaatggatcaacatcggctatgagggtgaggagttgaagccatacacagagcccgaggaggacttcggggacaccaagagaattgaggtgatggtgggtatgggctacacacgggaagaaatcaaagagtccttgaccagccagaagtacaacgaagtgaccgcaccctacctcctgctgggcaggaaaacttaggagggtggggaccggggcgccccagggctggccctggcacgggtgcgggcgcccaacgacaccancaacggaacaagttccagcaaaggcaccagccacagcaaagggcagcggagttcctcttccacctaccaccgccagcgcaggcatagcgatttttgtggcccatcccctgcacccctgcaccccaaacgcagcccgacgagcacgggggaggcggagcttaaggaggaacggcttccaggccggaaggcgagcttcaagcaccccggggagtgggagtcgagggctgccccccctccagccccatggtcagcagcgcccacaaccccaacaaggcagagatcccagagcggcggaaggacagcacgagcacccccaacaacctccctcctagcatgatgacccgcaggaacacctacgtttgcacagaacgcccgggggctgagcgcccgtcactgttgccaaatgggaaagaaaacagctcaggcaccccacgggtgccccctgcctccccctccagtcacagcctggcacccccatcaggggagcggagccgcctggcacgcggatccaccatccgcagcaccttccatggtggccaggtccgggaccggcgggcagggggttgggggtggtttttcaacaaacacgccctccaaagagcaccccgaaatgcaggggcaccatcactgatgcccggacacagaacggtcctcataaattatgggggggggcaagatcttaaaaactgggaaacatgccttgccgcccctccgaataagcatagaagga

SEQ ID NO: 61757 - DNA, 1105 bp, Homo sapiens
tttcgcgtgtgtttagttgtatgagtagatgggagccctaggaagagagtagacaatataaactgggcccagcactgggtccagggtaaccctaacattcaaaatgggggacagggagcaggcaaaagaggctgagaaggagcatccagagaggtaggggggaaactgggaggatggttgctcaggaaagaggggagctgactcagccacgcttctcctggtcccctttgccttctggtctaaggtatggttcagggtgggtgttcaggagggagaaacccttcggcctcccccttccctatccctcttccctctctccctacccttttctttctcccggcttcttcctcccctgcctctgtcctttctacccttcctccctcgcagccctctctactccaccccattccttctccttccctccagtattttggttccccccacctgtaggcccaggctgaagcccagagggaacatgaaggagccgtgcagctgctggaggtagggcgcctggaagtggcccccagttccaccatcttgggaggaaggcgggggtcctccagatagagctgaaatggactatggcggtggggagaggggttgcaggaggggcccttaaatgctccaggacctgggggagtcccctccaccactggcctatttctcagggtgggcacggctgggcagggggctcccaagtctggtggcagcagtctcccattgctgccacccccagaggctgccttcaccctgagatatccttccatttaggaactgctagtcagtccagggagctgactggatgatatccacttaggcccccttctccgcctccctctctgggttagcaacccacagcgctcagggttctaacctgttctctgcttcctttcctgcaacagtctaccttggattccatgcaggtagcgcctcgttctccacttccccacacctctccaggctggctgagttgcatctcctccctcagggcccaggcagtccccctctctcatccagcagagggggtgtcactgggagcaggcatgagaatccatagggggtggagtttccacaggacacgtgcggctgtccccttgtcccaggc

SEQ ID NO: 61758 - DNA, 6215 bp, Homo sapiens
cccgcaattcccgggtcgacgattatctgggcacccggcagccacagcgcagcgagagcggacggtcgccatggttccctccccagccagtcccaggcgcccggtgcactatgcggggcacgtgcgccccccagctctaatctgcgcgctgacaggagcatgatctgtgcccaggccagggctggcaagaatctgtaccacaacaggtttttaggcctggccgccatggcgtttccttctagaaactcccagagcctacgccggtgcaaggagccgatccgatacagctacaaccccgaccagttccacaacatggacctcaggggcggcccccacgatggcgtcaccattccccgctccaccagcgacactgacctggtcacctcggacagccgctccacgctcatgggcaggagctcctactattccatcgggcactctcaggacctggtcatccactgggacataaaggaggaagtggacgctggggactggattggcatgtacctcattgatgaggtcttgtccgaaaactttctggactataaaaaccgtggagtcaatggttctcatcggggccagatcatctggaagatcgatgccagctcgtactttgtggaacctgaaactaagatctgcttcaaatactaccatggagtgagtggggccctgcgagcaaccacccccagtgtcacggtcaaaaactcggcagctcctatttttaaaagcattggtgctgatgagaccgtccaaggacaaggaagtcggaggctgatcagcttctctctctcagatttccaagccatggggttgaagaaagggatgtttttcaacccagacccttatctgaagatttccattcagcctgggaaacacagcatcttccccgccctccctcaccatggacaggagaggagatccaagatcataggcaacaccgtgaaccccatctggcaggccgagcaattcagttttgtgtccttgcccactgacgtgctggaaattgaggtgaaggacaagtttgccaagagccgccccatcatcaagcgcttcttgggaaagctgtcgatgcccgttcaaagactcctggagagacacgccataggggatagggtggtcagctacacacttggccgcaggcttccaacagatcatgtgagtggacagctgcaattccgatttgagatcacttcctccatccacccagatgatgaggagatttccctgagtaccgagcctgagtcagcccaaattcaggacagccccatgaacaacctgatggaaagcggcagtggggaacctcggtctgaggcaccagagtcctctgagagctggaagccagagcagctgggtgagggcagtgtccccgatcgtccagggaaccaaagcatagagctttccagaccagctgaggaagcagcagtcatcacggaggcaggagaccagggcatggtctctgtgggacctgaaggggctggggagctcctggcccaggtgcaaaaggacatccagcctgcccccagtgcagaagagctggccgagcagctggacctgggtgaggaggcatcagcactgctgctggaagacggtgaagccccagccagcaccaaggaggagcccttggaggaggaagcaacgacccagagccgggctggaagggaagaagaggagaaggagcaggaggaggagggagatgtgtccaccctggagcagggagagggcaggctgcagctgcgggcctcggtgaagagaaaaagcaggccctgctccttgcctgtgtccgagctggagacggtgatcgcgtcagcctgcggggaccccgagaccccgcggacacactacatccgcatccacaccctgctgcacagcatgccctccgcccagggcggcagcgcggcagaggaggaggacggcgcggaggaggagtccaccctcaaggactcctcggagaaggatgggctcagcgaggtggacacggtggccgctgacccgtctgccctggaagaggacagagaagagcccgagggggctactccaggcacggcgcaccctggccactccgggggccacttccccagcctggccaatggcgcggcccaggatggcgacacgcaccccagcaccgggagcgagagcgactccagccccaggcaaggcggggaccacagttgcgagggctgtgacgcgtcctgctgcagcccctcgtgctacagctcctcgtgctacagcacgtcctgctacagcagctcgtgctacagcgcctcgtgctacagcccctcctgctacaacggcaacaggttcgccagccacacgcgcttctcctccgtggacagcgccaagatctccgagagcacggtcttctcctcgcaagacgacgaggaggaggagaacagcgcgttcgagtcggtacccgactccatgcagagccctgagctggacccggagtccacgaacggggctgggccgtggcaagacgagctggccgcccctagcgggcacgtggaaagaagcccggaaggtctggaatcccccgtggcaggtccaagcaatcggagagaaggtgaatgtcctatactccataattcccagccagtaagccagcttccttccctgaggcctgaacatcatcactacccaacaatcgatgagcctcttccaccaaactgggaagctcgaattgacagccacgggcgggtcttttatgtggaccacgtgaaccgcacaaccacctggcagcgtccgacggcagcagccaccccggatggcatgcggagatcggggtccatccagcagatggagcaactcaacaggcggtatcaaaacattcagcgaaccattgcaacagagaggtccgaagaagattctggcagccaaagctgcgagcaagccccagcaggaggaggcggaggtggagggagtgactcagaagccgaatcttcccagtccagcttagatctaaggagagaggggtcactttctccagtgaactcacaaaaaatcaccttgctgctgcagtccccagcggtcaagttcatcaccaaccccgagttcttcactgtgctacatgccaattatagtgcctaccgagtcttcaccagtagcacctgcttaaagcacatgattctgaaagtccgacgggatgctcgcaattttgaacgctaccagcacaaccgggacttggtgaatttcatcaacatgttcgcagacactcggctggaactgccccggggctgggagatcaaaacggaccagcagggaaagtcttttttcgtggaccacaacagtcgagctaccactttcattgacccccgaatccctcttcagaacggtcgtcttcccaatcatctaactcaccgacagcacctccagaggctccgaagttacagcgctggagaggcctcagaagtttctagaaacagaggagcctctttactggccaggccaggacacagcttagtagctgctattcgaagccaacatcaacatgagtcattgccactggcatataatgacaagattgtggcatttcttcgccagccaaacatttttgaaatgctgcaagagcgtcagccaagcttagcaagaaaccacacactcagggagaaaatccattacattcggactgagggtaatcacgggcttgagaagttgtcctgtgatgcggatctggtcattttgctgagtctctttgaagaagagattatgtcctacgtccccctgcaggctgccttccaccctgggtatagcttctctccccgctgttcaccctgttcttcacctcagaactccccaggtttacagagagccagtgcaagagccccttccccctaccgaagagactttgaggccaagctccgcaatttctacagaaaactggaagccaaaggatttggtcagggtccggggaaaattaagctcattattcgccgggatcatttgttggagggaaccttcaatcaggtgatggcctattcgcggaaagagctccagcgaaacaagctctacgtcacctttgttggagaggagggcctggactacagtggcccctcgcgggagttcttcttccttctgtctcaggagctcttcaacccttactatggactctttgagtactcggcaaatgatacttacacggtgcagatcagccccatgtccgcatttgtagaaaaccatcttgagtggttcaggtttagcggtcgcatcctggggtctggctctgatccatcagtaccttcttgacgctttcttcacggaggcccttctacaaggcactcctggagactgccctgtggattttgagtgacctggaatatttggatgaggaattccaccagagtttgcagtggatgaaggacaacaacatcacagacatcttagacctcactttcactgttaatgaagaggtttttggacaggtcacggaaagggagttgaagtctggaggagccaacacacaggtgacggagaaaaacaagaaggagtacatcgagcgcatggtgaagtggcgggtggagcgcggcgtggtacagcagaccgaggcgctggtgcgcggcttctacgaggttgtagactcgaggctggtgtccgtgtttgatgccagggagctggagctggtgatagctggcaccgcggaaatcgacctaaatgactggcggaataacactgagtaccggggaggttaccacgatgggcatcttgtgatccgctggttctgggctgcggtggagcgcttcaataatgagcagaggctgagattactgcagtttgtcacgggaacatccagcgtgccctacgaaggcttcgcagccccaccgtgggagccaatggggcttcggcgcttcctgccatagaagaaatgggggaaaattacttctctcccccccaggggaacacacatgccttcaaccggactgggatcttccaaccgtatcccctcgtactcccatgttgtatgaaaaagctgttaacagcaagtagaggaaaccagcacctttgggacttgagtgaggacatggaacctcgcctgacattttccctggccagtgacatcacccttcctgggatgatccccttttccctttcccttaatcaactctcctttgattttggtattccatgatttttattttcaaaccaaatcaggattgacaaaagctgtgcatgaagaactgccttcttctaagatctaaccttcaggcttctctcctctgttttcaatgaactgctagcctgtatgcaatattaaaaaacagctgtctcaaggtctgtgtatatctccacatacctccattactaacaatgaaatatgaatgcaagttaagctacacttgaccaaatggtaataaatgtttacttccatttctatcattgaagggaaaatgtgagcattaagcactccaggctttcatatgcccatgtcttctgagcagagccaccattttttataatttctaataaccaactccagaactaggagctgatcaactctttgttttcctctccatctacttttccctgtgcataatatccatccaaaggacaacagtggcaaagctgaaatttttatacattcaactcatgattcacatgtggcatcagtcccatcagccggaactagcctagacatacggtgcaaatatgacacttctaacgattaacaacagcaagaaaacacctgctgctgatgcaatgcaatgcatcccaatggttgtggggattgtgggctcaactcaagagaagtttaggagggggagcatccctagtgaatactcacaccacaagaaggacaaacttgtgcacatgtccaagaaagaaagcttcttgattgaggtagcataaaggatgaggcttcagcccccattgtcttatgtagaatgtggcaatgccaactggagaaagggaagaaggacatattaccttggtttgaatccctgagttctgtactgttctgttttgtttagtctagccacagttcttcacaaaggaaaaaaaaatgtgtagatgataccatgacttttgttaaagccatgacttttgtttgcttggcagacaaaccctttttttaaaactttgatatttttttttcacgtttttttttccttttcctttcttaatcatggagttcaagttcctttgcattcgattgtccatcgggaccacactaggaagctgcagagagtaatggtgcttgttagggatcaagggcaacatctatt

SEQ ID NO: 61759 - DNA, 1525 bp, Homo sapiens
ttcttttcatctgctttaggaaagctcagtaagctttcttttttttccagaggcagggtctggctgtatcacccaggctggagtgtatggcacaaccattgctcactgcggcctcaacctcctgggctcaagtgatcctcccgcctcaggctcccaaagtgctgggatagcaggcatgagctgtcgcacctagccagcaatatacaaccttgaagggttaatagtgacatggacagaggcaaggtgcccagttacacattttcagacatcatcttgtttattacaaaacttaaaacaccttccaggcaagatccaaagcaattttatcctaacattgttcaccttcatctgtagagtcaaatgtatctgccagcttgtgttgacaagggggaatgcttcccatttggtcaaggttgagggacagtaaaggaatcttgtattctaatgagtacagcatcctttcattgtccaagccatccaccttagggctttgaggttcaagtccaggtctggagaagagaaagtttcatacccaaccttgtggtctttccttcggtagtacattcgtgtcagcacagtcattagaaaagtctccagtatgaggaggtggcaattcatcacttgagacctggttttagaggaatagggaggcgaacaagcaatctgcccaccgttggccaagactgagaagatggagggctgtagggcagtcaggatgaggagaacctggaacagagcaaatttggctcccatgttctgctcacccaggtgtagcctggcttgacgggaaatgatgcccagggtccagagagccagcagtgtggacacgccgaggaaagtgttgatccatagagctgtgctcccctcagaaatgtctgctgggtcatagatgccgtcggggatgagaaacaggcccaccagggtcagcgttatcttcaagaaggcgtattggaaagggcccaacatcagcagctgaagcttcttcctggtgagcagcagccgtggacagcaggggcagcagcagcagcaggggcctgtgtggaccatcatcggggtgtccctcagcgtcctcagcactgcctccttccccccaaagccttccaccatgaccagcatcagcaggtaaaagcacacggcataaaacgaggtgatggtcatttccaccagcaccagggaacgagggatccagagaccaaagcagcacagcacagacaccaccgtgggtgccgagctcttccagagcagagtccgcctcttgatggggcaaagggtgttcttgtacaggtagacggcatcctccaggaagatggcaatggagcccagcgccagcaaggtcaggatgctagtgagggcaagttccacagggcccagggctctcaggagttgggctgctgtgggaggctgagagaagcaggcggaggggatgccgtaattggtcttcagcacctccagaagatctgctgtgtacctggggtcaagctttatctgggtcctgcccggctccatcgccgcgaattccgccacg

SEQ ID NO: 61760 - DNA, 1840 bp, Homo sapiens
tacggctgcgagaagacgacagaaggggacggcgccggagagatggcggagttggacatcgggcagcactgccaggtggagcattgccggcagcgagattttcttccatttgtgtgtgatgattgttcaggaatattttgccttgaacacagaagcagggagtctcatggttgtcctgaggtgactgtaatcaatgagagactgaagacagatcaacatacatcttacccatgctctttcaaagactgtgctgagagagaacttgtggcagttatatgtccttattgtgagaagaatttttgcctgagacaccgtcatcagtcagatcatgagtgtgaaaaactggaaatcccaaagcctcgaatggctgccactcagaaacttgttaaagacattattgattccaagacaggagaaacagcaagtaaacgatggaaaggtgccaaaaatagtgaaacagctgcaaaggttgcattgatgaaattaaagatgcatgctgatggcgataagtcattaccacagacagaaagaatttactttcaggttttcttacctaaagggagcaaagagaagagcaaaccaatgttcttttgccaccgatggagcattggaaaggccatagactttgccgcttctctagccaggcttaaaaatgacaataacaaatttacagctaagaaattaaggctgtgtcacattacttcaggagaagccttacccttggatcatactttggaaacctggattgctaaggaggattgtcctttatataatggtggaaatataatcttggaatatcttaatgatgaagaacaattctgtaaaaatgttgaatcttacttggaatagtcattcaaagattcaagtcagaaatcacagggaaaattctattacatgtttaagtccatttattttactacaaatactatttttgtaatttttaaaagttgctttttaacttatttccccttatgtcacattttaaattatgagttttctattagagttttttggttttaagtttaattgtgtacggatcctcaattattagcaaattcttatatttaattagctttcattagtttatgctgtagtgacaacaacaaagatgtatttcctggtgggggatgtcagctgttgattggctgtgacactgctttgtgtcatcttcttaccatgatcaaaggcgaaggaagggatctcttttgggacattgtgattgttttagcagagagagaaagagatgaaatacacttcggttttctcttaaaagatgcatgtatcatacgtgctttaagcaagtcatgtggccaagcctagcatcatggagccagaaagtatagccttgctgtctgtctacatcatgatgtataaattgatatatctacatgaattatagaaacttagaagtgatctttattcagtcttataatttttacatgaagaatcttaggcctaggaggagaaaatgattttctttctattacctaactagattggggcatatttctgataaagacccacctctagtgagattcatcttttttgtttgtgtgactatattccatagagaagaaagatgggatagctcaacttcattatataccaaagcaaaacacatgccaaatgatgactacattttaccaacatatttagacgagtattcttgactagtgtttactatctatacccccaaaactactactatatagacagaatggaaagtatttctatttgtcctttttttggtttctggtctaattgtcagggacatatgtagtggctataggtttacttaaaaggaataaatttggaatgctcctttggtttaaaaaaaaaa

SEQ ID NO: 61761 - DNA, 2234 bp, Homo sapiens
cagatggactgacccacaggcatccacatgtggtgctgaagaagccatgaggaaagggggaggtgggaagggcctcgtccagggtgtctggctgcacaggagacatagcagctcccactggcaccctgcatacaagggaaaggcctcgaaatgcgctcaccaaagcctcagagttttattatcaggagctcacattcaggagcaggtctgcttgtcaagaatccaagcacgcctgtgttctgtggccacaggagaggaggggccgcttttaaatacaagcctactcctgtcgttggaccagaacaaagacctactggccagaagcacatgagaggaggagtttcactcttgtcgcccaggctggagtgcagtggcacgatctcggctcactgcaacctccgcctcccaagttcaagcaattctcctgccccagcctcctgattagctgggattacaggcgtgtgccaccatgcccagctaatttttgtgtttttagtagagacggggtttcaccatgttggtcaggctggtcttgaactcctgacgtggtgatccacctgcctcggcctcccaaagtgctgggattacaggcgtgagccaccacgcctggccgaaaaacccactctcataacagaagtgcagactcattgctagattcagtgcccttgagtgtgccagaggtcctctgtgtttgagacaatcctgtgtgtgccaggaggctccgtgtgcaccaggggctctcagaatcccgcttacccagctggagaccatgcctctggcagccccatctcagccagccctgctctctccctcttccctccaggtgaggcaaacttcataggaatctgtacctgaatgtgagctcctgataataaaactctgaggctttggtgagcgcatttcgaggcctttcccttgtatgcagggtgccagtgggagctgctatgtctcctgtgcagccagacaccctggacgaggcccttcccacctccccctttcctcacggcttcttcagcaccacatgtggatgcctgtgggtcagtccatctgtccatgggcaggggccgctgtgagagaccccatgcgcgtgggatgtggtagatgctgattatggggccagccacccatacaggtctatcaggtcgcaatggaggccccactggagcgggaggcaggctggcctggacttctgttggatgatgggggccaggggatggtaggaggggcaggagagcaggtctgcatctgtctcagccccaggagctcctggtttggggccagctctaaggagcttcatccctgagcctggccgagtataagggggtcccggatatccaatgctgagacctagacttttctaagcctctgcacccaacccctaacttggccttttcagacccatgagagtgcagggtgggtgtggacctgcgccagggcttcccagcctgattgtgacatgatgtgagtccacctagggaggagcaggggcctccccgtctcttccccttcttgcccagaccactttgctgggctcagagccttccatggctcactttgaactcagaagagtttcccagctgcgacccaggctgcacccccaggcctgaggagaaactgaggccccacatcccatacgtgtcctctgagtcaggacaacaggctcccggctgggggcactgcccttgctgccaacacattcacctgccccagtggctaccatgtcctgtgccggtgaccagtgccagtccccaacctggatggtgccctgccctcatgaagagccccccggatgttcacctctgcccagagacccggcctgcccaggaagagcagtctctgctcttgtgtgggtccctctgcccccaccctgcccagggctccccagcagcctgaggcccctaaggaagaacagccctcaatggtgattctattggtgttatgagttgtgtccccaaagagatatatcagtgtcctgacccacagtacctcagaatgtgactgcatttggagatagggttcttccaggggtaaccaaggtagaatgaggtcgttagtgtgggccctaatccaatatgacggctatccttataaaaagaggaacatttaggctggatacagtggctcatgcctataatcccagcaccttgggaggctgaggcaggaggacttgcttgagctcaggagttcaagaccagcctggggcaacatgtcgaaacgctgtgtctaccaaaaaa

SEQ ID NO: 61762 - DNA, 1596 bp, Homo sapiens
ggtggaattcctcagcaccgcctctcaacagggatgactcagcagggatgactcagcaccgcccctcaacaggcatgactctgcagagatgactcagcactgtcccttagcagggatgacacagcaaggatgactcagcactgcccctcagcaaggatgactcagcactgccgctcaacagggatgactcagggatggcttagtactgcccctcaacagggatgactcagcagggatgactcagcaccgcccctcaacaggcatgactctgcagagatgacttagtactgcccctcagcagggatgactcagtactgcccctcagcagggatgactcagcactgcccctcaacagggatgactcagcagggatgactcagcactgtcccttagcagtgatgacacagcaaggatgactcagcactgcccctcagcaaggatgactcagcactgccgctcaacagacatgactcagggatggcttagtactgcccctcagcagggatgactcagcaccgcccctcaacagggatgactcagcactgcccctcaacagggatgactcagcagggatgactcagcactgtcccttagcagcgatgacacagcaaggatgactcagcactgcccctcaccaaggatgactcagcactgccgctcaacagacatgactcagggatggcttagtactgcccctcagcagggatgactcagcagggatgactcagcaccacccctcaacagggatgactcagcagggatgactcagcactgcccctcaacagggatgactgcagggatgactcagcactgcccctcagcagggatgactcagcactgcccctcagcagggatgactcagcagggatgactcagcaccgcccctcaacaggcatgactctgcagagatgactcagcactgcccctcagcagggatggctcagcagggatgactcagcattgcccctcaacagggatgactcagcagactcagcagggatgactcagcactgcccctcaacagacatgactcagcagggatgactcagcaccacccctcagcaaggatgactcagcagggatgattcagcagagataactcggggatgactctgattgtccttcagcagggatgagtctgttttgctccgatggaagcatctgtagtgtccatcagcaggtgaatggccaaagtggtatatactgtagtcacattcagctataaaaaggaataaagtatcgatgcatgccacaacatgggtgaacctagaaaatactgatctaaatgcaagaagccaggcacaaaaggccacatagtatatgttcccatttatgtgaaatgtgcagaataataataaaaatgtatagaatagcaaatctgtagggacagacatgaggtgagtggttgccagaagtggaaatgggagttaactataaattgcacagggtaccttacagagatgatggaaatgtcctaaaactagattatggcaatagttgcactacgtgatcagtttattaaaaatcgttgatgtgtgtgtgtaaaatgggtggattttatggtttataaattataccttaataaaggttaacaaa

SEQ ID NO: 61763 - DNA, 599 bp, Homo sapiens
actaaatgtgccagtaccagaaattccaggaaaaacaagaaatttgtttttgcaattagccaagcatgtagcccagtctctcaatgtcacttcatgttatgtatgtggagaagctgtaataagagatcaatggccatgggaagcctgagaattagtacctacagtacctgatgaattcctggctcaaaagaatcaccctgataatttctgatcctaaaagcctcaattattaaacaatattgcatagctagagaaggaaaagaattcactcaccgcgtaggatgacttagttgtcggagacagaaactgtataatggtaccacaaaaacaatcacttggtggagttcaaatcacacagagagaaaatttagtaaattctcaaagttgcaaactgggacccacctgggagtcccaccgggcttgggaacagcccccactgggatttttactgggatatgttagggcttggagcttattgacaggtttactggaccattgggcaggtagttgttgtttattgggcactatttaaaccatctttcttccctactgccccataaaaacagggcaaactccttggggtttcccctgttcttacg

SEQ ID NO: 61764 - DNA, 5666 bp, Homo sapiens
ttttttttttttgggtttctactgaaacttattatttgccattaagaattgcaaactatactactaagaatgaacaacattctcttcattaagcctttttcaaaacacacgagacaaagctcccctttggtcaaggtgtcccacacattcccactgcagctcccagcacagcggcgcaccatgaactcggacgcggagcccaaggaatggagatcgcaccagccttccctgcttccccaccccaactacacccaagggagaaaggatacgaggaaatacactatgtcttcaatgcttggggggctgggggtgtcctctgctaccaggtgggccggtcagtgccgactgtccggcgcgcgtcctcggggatctccggctccccgacctacacaagcagcagcagcagcagcagcgagtcctgccaacgccgcagtagctgctcatgagaaaagtgcccacgctccccaagccctcctgtttacatttcctagtggggcaaagctactttcccaggacaggcagcagagcagtggggcagagtgcactctgggacccgggacagcaggttacacagggtcaggcggtggtgggtgctggaatcggggctgaggttctggaaatgccaccaggtgatgccaccctgtggtgtctgcccaccacacaccacaagactcaagtggttttccccttttggccctaaaccacctaacacctcagcggcatgggagggcaattctcagcaaggcaaggacatggggaaggctcctgggagaggcacgccgtccaccctcaagcctgactgtcacaggtggaggccccgccccccccccgtcaccacacctggggaagctgccacagaatgccacagcactggaaagggacactctgagggcaggctccagcagcagctccaggacagccagccgcccttctgcccaggccgaccacgctgtgtcctgtgcacgccatcttcaggtttcccacacacccacttcctgaatacttttctccccaaagcaaggaggaacctcgccttcgttcctccaacctcatctcccactgaggtagcccttggtaagccaggctgggcagagaggacacagcggtgggcgcgcccccctcgagagcagcccagtccttgggcgtggggccgcagtgtggctgccgctcctctcacgccagcctgcacaggtcttctgagactgactcagggagcgccccagaaattcatgtctgtgtctgacaacttcaaacaggactttaattccaaaccaaccacagaaccggcgcctgggagcaagtgggactgaggcccaggtgctaacacggggctggcagtgtcgagagaacgctctggaagctcctaacagacggctccgcgtgcggatgcacaggccctgacgggcactctgagctgggcagtctgacaccaagcagtaaggcctcccgggcagcgcagcctcagtccacgagcacagcgggtggccctctggggggaggcagcacggggcgcagccctcggcaggcgagcgggcgggatggatgaaacgcagcggcaccaggagccccaggctctcacaggtgccacccccgaccccaggattttcaaagggacaggatttcaaagtcttcatcttctgagtcgaagaatctttccagtcgctctacatcagaagaatctagaaggaacaggacatagcgcatcaggcatcttgggtgggccacctgggtgtgagtcaagggcccttggcgtggggcagactgagcagtgcctgctctgcagcccacagacagctgtccccatgcgggtgtgaacaggtccgggggttgtgcagacctgcgaatatggggggagggagcagagaagaggagcagggcagggtgaggagggcagggggcggccggcacaatctcaggcctgaggggcctctgtcccgcgtctgaccctcgtggtcatcaggagtggttccattgccattgccttgtttgtagagtttcccacagggagacagagatgaggaggacgcgctcacggccactcacttcactgcacgagcccaggccggctcctgcggcacgctggccatggtccgaggggtctacgccacccatggccagtggtgcccaagtgaaccagtcccccacccaggactgcgtcaccacagagcctgcatgttctgtctgctccagacccctgaggactccatggtagcacgcccagctccacagcgccccggcaggcagcgctggtggggaagacgaggtgggtcctgggctgctgggcgcaagcttggaggaggggacgctccactccatacctggtctcacaggcgaaccactgccaagtgctcacggctcaggctcacacacaccttaatggtcaaaaccaagggggccaggactggggaagcaagggcacagatcgtacctccgagggaccccacctggacttggcagctctcacctagggacaggttcaggacgtcggggcaggccagatgtgaaggctgctgctccaccagctcaaacatgggcagggcacctccaagcagagacagctttttgacttgctggcaccaatcactgaagtcatcttcagtcttacagaaaaacccctaaaacgaaatgacgatgagcagaacacgacacccccatctgcagtcggataagaggtgggggcttccattcccactgccagtggcgcagcagaggcccccagcatgcaggtgctggacattccagcctgccttggctcctgtggccgggaatggagctccgagggtgccctgtgcatggtcccctgcaccagtgcccggctcccctcaggctccactgcgttgctgtgccttgattcgcccacgagatgttacgtggtgtgcatctctcaaacctcaccgagtgttccgggattggggcaggttatgagttagggccaagtggggagctcttctctctgtgactgtgagacagggccgctgggtctcagccttcgcccagcagctccctggaagcttggcggcaaaggccaccgagaactgcccaaggacaccgtgacacagggagcctcctgctgaggagccaggagacaggggaccggccaagggtcaccggcaatcacatccttaaagctgccgcctgtaatgacagtcactaggaattctcaacgctgccagatgcgcagatgttaacacaaaaagaaacgaaatggggggagaagctcaaactgggcactctcttcccctgaagacaccattctgccgcctcggcgctggtgtaggagcactctcccccggggacaggggacattcctcctcctcacgggtgaggacagttatcccaccaggtggcccctttggtctcaactcaacgttcacgcgtccactcctctgtctgcggtggctggctctctagcctgacctgactgttagagtgccaatcactgtaagccaccaagctgcgtttacagtaacaaacatacctaattctagttcgacgaggaattcgtgactaggttctggtaagaagtgtgcgccaggctgcgcgcagtggctcacgcctgtaatcccagcactttgggaggccgaggtgggtggatcatgaggtcaggagatcaagaccatcctggctaacacagtgaaaacccgtctctattaaaaatacagaaaattagccaggcgtggtggcgggtgcctgtagtcccagctaatccagaggctgaggcaggagaatggcgtgaacctgggaggcggagcttgcagtgagccgagatcgcgccactgcactccagcctgggcgacagagtgagactccgtctcaaaaacaaacaaacaaacaaaaagtgtgagccacagagctccagcccatgttccccactactgccaccctgcccaggaggtgcatggagcgtggtgtgcactctggggctgcgccacagctcagagaccgtcccatttcaggcccagatctgccttcttcctcctaaatggggcggagcatccacaacagagcccccgattcggttaactgcttccctgagcatgtcaccgtcattcatgatttctaggggggttttttggcctctttccccatcaaatatatttgagggcaggcaggtctgcataaatcacacaccaaaaatcacaactaggtaatcaaaatggaaaaacagggaagctccttcttaggaaatcccccagagaggtcaagtcagagcctccggaaaacaaaaggtggtgcaggagtgggtgggtggaggggccgcccgtgtttaaatgtgggtgtgacgaaggtggtgcaggggtgggtggaggggccgcccgtgtgtttaaatgtaggtgtgagggggacacactcaccatggctcacactcatccatgcacactcagcacgcgcccacacacgctcacatccagacacacgctctctgggccactcgaaggccatgaaggctgcacaggaggtggtgcctgggggagggacgtgagggtgcaaggacacagttccggctcttatacccttcagattcccaaccacgtgaacacagtacttatcccaacatgctgaaaaaaaaacgcaaaaatccgaaagttttcctcgtcattcccaaacagcattcagcaccaaatgcctgtgtgctcaggtggccgccacgtaccacagcgatggacgggtcaagctccgcgatgctcatgcggcacggcgggtgctggcagtggaagctctcgtccgggatgaagcagccatcagtgggctccacggctggctgcgtggtgtgggggtccaggtagatgagctcctcacccaacttagccgatgaaataagtgggcgctgttgggcttcccctcccgatgaacgccccagggaactggggccatccatgaaagcagtgcttcaagcgtctcccacgtaggcctcgttgatgtccgtgaagccccaggcgcaggggaatgagaagtaccaggggtctccatggcgacggcctgttggtgacctcagctccggcagggaatccgttgcagtgccggtcggaatctgcaggaaacgtagtggcgcctgcacagggaacgctggtcctgcacaaccttctgatttcctccatcacaacagtgttgtccattgcaatgtggaccgccaaggagctccacgtatcgaagacagcaagcctcctcaggacctgggcgacagtgttgggcccgtaccactggcctatggacttgccttcgccaactcccatttgcgctatctggtgaatggagtagtaactgtccttcctgtcgatgaatgcgttgaggacgctgaagtagctgtctggctgcctcttcctttgtgtccacctccaatctcggcctaggtgccggcacaccagggcttgggcaaagatcatctgtccacaccgcagcatgcagccccagcctgtgtccgaggtggggcctgtccccccaatggctggaaagtttttcctgtatgtaaaccaaagtctagatgccacatcagacaagatctcgtccttttctgtgaaaatgctgtattttctacccagtatccaaacgggctctgaggtctcaggaaaatcttcaaactcagcaaaccggagagtgtcgtaggtcagagtagctgcgtccatcttcccagtccggccgccgactgacccgagcggcgtcgctcc

SEQ ID NO: 61765 - DNA, 3318 bp, Homo sapiens
gagcttgcgccagtctcttcgcggcgtccaccacttagacgcaagttgctgaagccggccggggagaaggtgttgttgccggagctgagaccgggcggccacagtccgcagggatgaacctcgagttgctggagtcctttgggcagaactatccagaggaagctgatggaactttggattgtatcagcatggctttgacttgcacctttaacaggtggggcacactgcttgcagttggctgtaatgatggccgaattgtcatctggggatttctttgacaagaggcattgcttaaaataaatttagtgcacacatccatccagtgtgttctttatgctggagccgagatggtcataaactcgtgagtgcttccactgataacatagtgtcacagtgggatgttctttcaggcgactgtgaccagaggtttcgattcccttcacccatcttaaaagtccaatatcatccacgagatcagaacaaggttctcgtgtgtcccatgaaatctgctcctgtcatgttgaccctttcagattccaaacatgttgttctgccggtggacgatgactccgatttgaacgttgtggcatcttttgataggcgaggggaatatatttatacgggaaacgcaaaaggcaagattttggtcctaaaaacagattctcaggatcttgttgcttccttcagagtgacaactggaacaagcaataccacagccattaagtcaattgagtttgcccggaaggggagttgctttttaattaacacggcagatcgaataatcagagtttatgatggcagagaaatcttaacatgtggaagagatggagagcctgaacctatgcagaaattgcaggatttggtgaataggaccccatggaagaaatgttgtttctctggggatggggaatacatcgtggcaggttctgcccggcagcatgccctgtacatctgggagaagagcattggcaacctggtgaagattctccatgggacgagaggagaactcctcttggatgtagcttggcatcctgttcgacccatcatagcatccatttccagtggagtggtatctatctgggcacagaatcaagtagaaaactggagtgcatttgcaccagacttcaaagaattggatgaaaatgtagaatacgaagaaagggaatcagagtttgatattgaagatgaagataagagtgagcctgagcagacaggggctgatgctgcagaagatgaggaagtggatgtcaccagcgtggaccctattgctgccttctgtagcagtgatgaagagctggaagattcaaaggctctattgtatttacccattgcccctgaggtagaagacccagaagaaaatccttacggccccccaccggatgcagtccaaacctccttgatggatgaaggggctagttcagagaagaagaggcagtcctcagcagatgggtcccagccacctaagaagaaacccaaaacaaccaatatagaacttcaaggagtaccaaatgatgaagtccatccactactgggtgtgaagggggatggcaaatccaagaagaagcaagcaggccggcctaaaggatcaaaaggtaaagagaaagattctccatttaaaccgaaactctacaaaggggacagaggtttacctctggaaggatcagcgaagggtaaagtgcaggcggaactcagccagcccttgacagcaggaggagcaatctcagaactgttatgaagaccttcgaagttcttcattctttctcactttgccatcatgtggcctctggacactgtggtcagtcatttgaaaattgactttaatttaaaacaaaggcctgtgcctcccacccaggaggtgggagggtgaattttatgtttaaatgaagaagtgaattatggaagaagagtatacgaccttcccttccctttcaagcataagtccaaatagactctcaggaatgaagatttgtgaagacatcagataggaattttgactcatttaaactttgatgcttagttatgttgctggagaaaagatacttatgttttgctcatctaacttcattgtacccagcgtcattttgacatgtcatttcctatctcccatttgccttcggtcctcaatgcatgtctttgagtgacttcttatctgaaattttgctactggtatcctaggaaagcttttgttggatactctcattttaaacttctcctctccccagatacctcctatatttccatattgtgtgcaaaggatgggcaaaaaagaaagtgcttgaaagatttcaaattttcagaaagggaacaacgaaggccctctcttcctctcataccacgttttgctcaagaagctgggctgtaacaattcagggttttcccttgttttcctctcattgcatgtttccctccaatattggttcattgtcatcaatcatggtttttgaagatagctagttttatccatctccagcaaagaatcatcaatagtttatattgctttacctgtgctggcttccagagatggaaacaaacccaggtgtctctcaacaagctacttttttactggggtgggggaatctatgcaaggagtaaagtaaaaccatccagaatcaaagcagcaaccacatagttcaaatcaaagatcaaggtgaattttttgtatcactgcctgtggaaatctatcctcatcagtcattgcatttttccctgcctatacctgtgctcctttttcttactgtgttttcagtcacttcctttctgtgaaaggttgcttagctttttttttgacatttgttgttctttatataaaaataacagattggatagatgtgtacatttggtgtttgaaattctctgaaaatcccattaggaaaccaggtgtgaaaagggctcagtagcttctctgagtggcgtttttagctgactggaagtgcttaatctggatcgtctttttttttttttttttttttcaatattttaaaaggagaatttaaatactgtgcttactgtgaaatatatcagttggtgagccgggcgtggtgggtcacgcctgtaatcccagcactttgggaggccaaggcgggttgatcacccgaggtcaggagttcaagaccagcctggccaacatggtgaaagcctgtatctattaaaagacaaaaattagctgggcgtggtggtacatgcctgtaatcccagctacactggaggctgagtcaggagaatcacttgaacgtgggaggcagaggttgcagtgagtggagatcgcaccactgccctccagcctaggtgacagaatgagactctatctcaaaaaaaaaa

SEQ ID NO: 61766 - DNA, 861 bp, Homo sapiens
gtggtggaattcgcagcgcgtgtgcctggagcgcgtgcagtgctcgacggcctcgggcgctgaggtgaagggctccggccgggtgctcagctgccctgggcccagggccgtgaccgtgcgctacacctttaccgagtggcgctccttcctggacgtgccggctgagctgcagcccgagccgctggagccacagcagccagaggcaccgtctggggcctccgagccagggtccggggatgccaagaaagagccaggcgccgagtgcttccacttctcgctgtgcctgcccccgggcctgcagcctgaggacgaagaggacgccgacgagcgcggcgtcgcggtccacttcgctgtctgctaccgctgcgcgcagggcgagtactgggacaacaacgcgggcgccaactacacgctgcgctacgcgcgccctgcggacgcgctctgagcctggagagtttcgaagagccgtggggcggggttgattagcacgtggagctcgggctgccgcctcaaggaacttgctgggacgctttgctgagcgtggcgagtctggcgtgaggggcgcgtggagggaaaggagggagactttgaaccgtcgactcgcacccccgcagacaagtgagcgagcttagagagcccgggcaatgctccgaaagcctctgacctcagtcttctcgtccgtttgaccttcctacaaggcctctagaattcccagcctgcgtcagagtaggaagaaacttccaaggcccggagcagctgcctccaagaaaaaggctcccaactcccgggcatggttctaaggccttgggattggtttttaactctaaatatcatattgtagcccttgcagtttgctggaga

SEQ ID NO: 61767 - DNA, 1345 bp, Homo sapiens
ttttttttttttcacaatgattgtactttattgatgtgttacaggaggtaaggactttctgcttaaaatatttaaaatttacatgtgcacacaaacaaacacaggttcccccacccatggggaagggcgagatgactctgaataaaggatggaggagaagaagagggtgtagacggagggcccttgacccctacaggggcagcaggataaggaatagagtggggcagaaggtgggttattaagaagcatcttgcttactgacatgaagccacgtgcccagcgagagcacagatgaggcctcattggcgtagaggaggcccttggagggcaggcacacggtgcccaactagccagccaaggccaacgtcccaggggtagggcggaagtggggtggcgtgcacagggcacccagcccaggcctctgctgcccccacctccctccccaccctttgagagaaaagacggtttgggcctcagccacggaccgacgccgttaccggcagcgtctcctgaaactacagagatacaatgtgtatcaacagggtgatcgcttctgacccactgaggcagacagctagaggtgctgcatgggccagaaccaatcctacagtatctttggtttgtgggtttccttcccgacttgaatcctccctctgtccagcctctggggtgggcctcagggctgggaatgggctgctcaatggcccaaagcccagcctgacggcccttggaggctgggggtgctgcccttgccagccacaggcagcttactcactggggtgctgggacttgtaggagaggatctcggcagccagctgctgggggtccaggagctgtgggaagcgccccatcacagcctccaccaggtgcgggggaaacacaccacacagcttagtatacacgctggcctgctccttggccaggctgcctgccctgccccacgggctcctgccagcccctgggctctgcactgggggctcctgaaggactgatgtgggtgggggcagtgggtatggttcagaccagtactctcgaggtggaaaggcagggggcgcgggtgggtagtcggcagggacactgaagtggccagcacccatggcccggccaaaggcagagaaggctgcggtggctgggagctcagatccatagggactgtagcccgtgtaaggggctcggggtgggcccggctcaccagggcctcctcctcgaaccccccaaagttccgacatctggctctccagggagccaatgcccgagtccaggcaatcctgggagacgtacgggagtgagtccagcgtctgtgggagccagtctgtgggcccgaattccaccgcactgtactagg

SEQ ID NO: 61768 - DNA, 1346 bp, Homo sapiens
ctttacatgaccttgctgtcctcccttcccttctcccaccttccagcctctggctacaacacgcgtgcagtttaaggcaaaagctcagcaaacccagcccccaggattgaggagctcccgcccccccatgcagctggactccacctcagcagaggacaccagtccagctctcagcagtggcagctctaagcccagggtgtccatcccgatggtccgcatactggccccagtcctggtgctgctgagccttctgtcagccgcaggcctgatcgccttctgcagccacctgctcctgtggagaaaggaagctcaacaggccacggagacacagaggaacgagaagttctgcctctcacgcttgactgcggaggaaaaggaagccccttcccaggcccctgagggggacgtgatctcgatgcctcccctccacacatctgaggaggagctgggcttctcgaagtttgtctcagcgtagggcaggaggccctcctggccaggccagcagtgaagcagtatggctggctggatcagcaccgattcccgaaagctttccacctcagcctcagagtccagctgcccggactccagggctctccccaccctccccaggctctcctcttgcatgttccagcctgacctagaagcgtttgtcagccctggagcccagagcggtggccttgctcttccggctggagactgggacatccctgataggttcacatccctgggcagagtaccaggctgctgaccctcagcagggccagacaaggctcagtggatctggtctgagtttcaatctgccaggaactcctgggcctcatgcccagtgtcggaccctgccttcctcccactccagaccccaccttgtcttccctccctggcgtcctcagacttagtcccacggtctcctgcatcagctggtgatgaagaggagcatgctggggtgagactgggattctggcttctctttgaaccacctgcatcccagcccttcaggaagcctgtgaaaaacgtgattcctgggccccaccaagacccaccaaaaccatctctggggcttggtgcaggactctgaatttctaacaatgcccagtgactgtcgcacttgagtttgagggccagtgggcctgatgaacgctcagacccctccagcttagagtctgcatttgggctgtgacgtctcccacctgccccaataagatctgctctgtctgcgacaccaagatccagctggggactcccctgaggcctgcctaagtccaggccttggtcaggtcaggtgcacattgcagggataagcccaggaccggcagagagtggttgcctttccatttgccctccctggc

SEQ ID NO: 61769 - DNA, 1632 bp, Homo sapiens
  misc_feature (1)...(1632): n = a,t,c or g
tttttttttttttttttttcacaaaagccatctctctttagtgttttcattcctgcccgttcaaaccagtttgtgcaagctgaggatgagtgggtttttggaaccgggaggcagagcatctgggggacaagacccctcctggaaaatggtcctnatgcaacactgctgaaggctggttagacttgagaagcaattgaacaataaactctacagaacctggaaaatgttcaaaagtgtcaaggtggcttctggctgttttcctgcctccctgtggggggtcagttatacccatcagtcctgtgcaaaggtcctggggactggcccaggggcagccggattcttccgctggggacaggaagcttgtccttgcttaaccccaagcagaagccatgccaaatggaacaaggttgctcgggttgtgtgccccaaggtgctgtggccccccaaaactccgtggctcctcaaagcaatgtctttcatcctgtctctatgttatgtccgccccttttgaaaagtgttcattcaaggttgtaggtttccttgagaattttgtggatctcctcgagtgcaagcctgtggaagtatgcttttcaagataacgagggcatgcattgtccatgggaggaggaggagggcctggttgagctgcacagcttccacttgttcttccgggccaccgtctccggctttcagtgggggaaagaggttgggaaaacctgaactctcaatgcccctggaacatctcggtgcttgttgtggaaagggcaagcactgtggtggcgcttgactcccggacaagtcccagcaagcccccagggtcaaggctctccatgaaggcgaaagctgacgctttggaatgtgcaaattaatcgaatggcaccgggggaatggcaagaacaatgcccagcaacggaagttgaaggcaacacgaatgtggccattctgctgtttccagcataacttgccagagaagggcccctggtggttccaaaactggccccagggtgttgatgtgttgggacttgaggagggcatcatcatcactgtccattaggcccttcccatggaccacggcggcattgttcaccaggatggtgatgtcacccaccttctcccggacggccttggccgtctggtacacctcctcccggttgcccacatcacagatgaagtaatggcactcagtgcccatctgccggatctcctccgtcgtctccttcaggcatttctcagtccggccccagagaacaatctttctggcgccgcgctccgcgaactcgcgggcgagctgacgcccgatgcctctcccgccgccggtgatgaggacgttctcccgcgacaggtcccgcagcttggcgggcagcaccagtccgacggctgctttcaccaccagatagatcatctgtagagggaacatcaccagcgcgcccagccgtttccacaccatcctccgcgccgcggagccgggcagggggcgaaactccccgggccgagcaatacaggaattaaaaaacaccccgaacaataaatagtaaaccgaataaggaggagagaggcgtcccacctggccactcttgaaatcacctcttcccaaatgcaaagcaccgggtgagaaaaagaagaaaaaaaaaa

SEQ ID NO: 61770 - DNA, 1771 bp, Homo sapiens
tcactattccatgtggcggaattcgcgcacagtaagggagaatgtggggactcagagcaggagcctttggagtcagagaagttttccagaaggaacatctaagcagagcccggctaggcaaagtgaactgccatggcgagggcctggagacttccagaagcgtgataactgctcttaattgttcaaccctcaccaggagctaagccctgtgaggtgggtgctattagggtccccattctacagatgaggaaactgaagctcaggaagtctcctggctcgccagcaaggcagctggaggttgctgacctccgagggaggccccagccaaggtgggtgctgagtgggcgccccctcctctcccctctcaggcccagtaccgccgaggcctggagctgtccaagcaggccgctcagctgggagctacagccagaggggctggggaggcagaacgtgcagagttcccagagctggcagcctttgcctctacccagcgggccttccaggctgagctgacccacttttacatggcggccgagcggcaacgcacggacctcgagacgctgctccacctgcaccgcttctgcaagaggatgacctggttccacatggactgtcaggacctgatggcccagctcaggctggacaagacctcaagggtcagtcctggggaccagcgccgcctccaccgctacctgcagcgactggcatctgagttccctgctgagaagctcgcagccgtggggctgcaggtggcctccctgagccgggcaggcctgggccaggagctatgggaggaggcccggatcaggcatgaggagatctggatgctcctggagaaggcactgacccacagctcttgcccagaggctccagctgctcactcagcgcgcccagaacgaagaggggtggcagccaagggccagggtgtgagtgtagaggtcacttccaaggggaggtgggatcagcctccactagactcactgggcatggaccatttgccaaagtcctattggcttctcaggagctgtctcagccaagagtcacacacttgatacctaaaatggcttcaggaatcttccaagactgaagacttccccaggtgtggtctagggcctgcctgcctcagagccatgagcagagccggtcaaaaggcttcctagggaatcctaccccagacattaaaatagactcttggtgctggcaggtggctggaatctgcgtttgtagccaagtgctcttcctgtgtgactcagcaaagtgggggtgcatttggggaacacccggggctggggcctgagtcctccacccaaagccaggtttgattcttgcattcccctccctgccttccatccagacaggcccaaggatgcaagaggcgttgatcagcccatctccatccatgcctgttgcctcagagagggccgacggcttttaaaatgctgttgccatagcaacagcattccagccagtgggtaccacaggcagggagccacagaaactggggtgctgggatggaaactgacttgtgagagaccacagctactgctagaaggaaggggggcaaagcgggcacaggtaatctaagaatacttgggcgggaggagtccccaaggttaccttgtgcatccctctgtccccagaaagaactgtaccccaacaatctctcccctcactgcatcccctggggaagaagggaatgcagaaatgaaatgtcataatgagtaacaatgtataaaaatatcgaataataacagctaacatttcttttgca

SEQ ID NO: 61771 - DNA, 979 bp, Homo sapiens
atttgacatagatctcttaaagggaatttattgcttccatggagattttagatccgatgttactgagggaaattaggtagctgggcggctttaccccaggcatctcttagtaggtaaacaccttccttttcaggatgggattcacaagggcccttggtcgtctggaagcaccaactgaacgcaggcctcggatgatcaagacggtccccaccacaatgcccacgaggcccacagacaaccccagggcgcagaccacacgtctctgtgagctctgactaaggttgttggaatctcagctccccagtgtttcagaagaggctcaaaccaggcccccagttgctccacctttgcagttcataaatctcatcattcaaaagggaaggaaggggaggtaacctgatcttgaagaaggaaatgatcactctttggagaggaaggcctggtctcagaaacaccttctgtgactgagtgcccattgctcagccaggtgatgttgaccacaggaggaaagatgttgtccacaagacagatgagggtgttgggctgacccagtgtcacgggagacttggaaaacactgtgacctcaggaacctcattggtagcagcggtagagttggagcgtttaatcacgatgttcaagttatgttttagcacagcgatgtttgtcagtgcaaattgcgggtcaaatcttctaaatctgcggaacagaggcaactgccagacagtctccttcctctccaggtccacatagaactcctcgtctccatcaaattcatggctgtactgcccagagggaccataagactggtacaagtttacaccgtaagaggcaacatggtcagccacaatgtcttcacctccacaagggctcatcacggtggtcagggcgagggcccccagcatcagagctttgtttaggatcatcctcttcccaaggcagcctcagcagttgctgttctgagcgaattccacgcacact

SEQ ID NO: 61772 - DNA, 621 bp, Homo sapiens
ttttttttttttttggggagttgcaacaattcatctttatttcttattttcctctggagatgcagaatttggtatatttcaccccaggtatatttgggatagttggctcctcgctgggtcaggatggctgggtgccttctcccctggcatggttctcttctctgcaagggcgaggggcagggagctagtagaacctcgcaatgacagcccgcaatggcagacccaatggagcccaggatgaacttggtcaatccggagaagtccagttgctcccagtgactgcagaagtagccacaaaggctgccccggggaaactccacccccattgggcaatggccgccgcggacatcatcttggctgctatggaggacgaggcgattcccgcgcgcagtgaagccccatggcacttgagcaccatgggcacagcctgccatgggccaccaactcttcaatcacaacttgtagcaatcctggccaggggcaaaactacggcagagccagaggccacccctgaccactttggccacactggtcacttgctgatttagtgagagcagaggcctccatgcctgctcgggttaattccgtggcttagagagtaagagatcctcaacttcagct

SEQ ID NO: 61773 - DNA, 1682 bp, Homo sapiens
ttttttttttttgatggagtcttgctctgtcgtcaggctggagtgcagtggcgcgatctcggctcactccaacctccacctcccgggttcaaaggattcccctgcctcagcctctcgagtagctgggactacagatgcgcgctaccacacaaggctaatattttgtattttagtagagacgggatttcaccatgttggccaggatggtctccgtctcctgacctcgtgatctgcctgccttggcctcccaaagtgttgggattacaggcataagccattgcgccatgctcaaggttcttaattacatctttaaaggccctttttccatgtacagtaacatattcaatggttctggggattaggacttggagccattattctacctacaacaattagtattggacttccatcattttctatcactcttgtaatcgagaacggactatttcactgggagtagcaagtcataatgtttgcgttggcatttgtgtgggggtttatcttcattcattaaataattgcatgtaaagaaaattcctgtcactatttcaaatgtttcatgtagttattatagtgcttcagaatccaaagggttatgtgttacttatgtaagatgagcagtctagggggtggagaacaggtcatctagtgcagattcttcctagctgaagtgtgttttctctggggacaaccaagtaggatttaattgttttgcttccttttttgggaacttagacccatcttgcgatgtcctaagtctccaagcatcttatttgacctgcttatacacatttgactaaatagctaaatatgaccacattgacgtggtaaagctttaacacttttgtccagattgaatcactccatctgctatcagttaagcagtggaaaactgttatggaaaagcaaacatgttttgatagatttaatgtgtaaagaaggtatccatactctggaatgctgctgatcaataaatgagctgcaagactttgttcgaaacaacactcaagcacaactgttttactttccataccaagtttggctgtgactgaaatgaagaacatcagcattgatctttgctttgcacttgtacaagagactatttgcagagagccaaatataggcaacagaggatttaatatcttgccaaaaaatacaaaatctgttcccctttaaagcatggacactctatcctttcttgtgggatcttggctaaaaggaaaatataggcttttaaactcccctatttccttctgttgaaagcttaagaatctttttcaaatgagctatgtatggttttgtggtattttatgtttccaaaagaaaatggctacatgaaaaatctgtccagtgttatcatttttcttacaaaaaatacttctagttatggttgtattaattaatttgattgtgataatgattacacaatgtttacctatatcaaatcatcatatcgtataccttaaatatatataacttttatgtgtcaattataactcagtaagtctgggaaaatatcgttaagtcaaagattagagtcaacagaaataaagaaaaatcatactttgataacttcaggactaatcaaggatcaatgggtgacatgatatcatgctatgtgccattttgtgttaaacaaattacaccaacaataaaaaaaattggcttcaatcaaaaaaaaa

SEQ ID NO: 61774 - DNA, 2167 bp, Homo sapiens
ggaaccgctgggagccggggcccagcgcgtgaggacggagcgcgctgagcgagggggaggtggctgccgcttctcccgcgtccgccattttgttgctgtggctattgggaacaagctgggcaaaagcaccccggaggcgcgacgctccttcgagttcggtgcctcgtgtgacggcgggggtcggtgaagacccgtcgagctgcggcgccggcgcgttccaggccgggagtcactggaggcacccctggggacgccgagcagcccgagaaccccggggtggcctccgctgcggctcgggtttgcctgccccgaccccccggctctgccgtgcattcccgggcggctctctccgtgtggcggccccggagcaggcgggcggcgtcggaggatgctgcgggcccggagccgagaggaaagtgctggcccagccctctgagcgctcctcgaggtgtgcgagaggcccttcctcggccccaaagccgtctgccgggctaaggcgtgcagagcaggcgaggacagccgccgcccctaccgccgcagagtccccggtccaacaccatgtcctccgccaggttcgactcctcggaccgctccgcctggtatatggggccggtgtctcgccaggaggcgcagacccggctccagggccagcgccacggtatgttcctcgtccgcgattcttccacctgccctggggactatgtgctgtcggtgtccgagaactcgcgggtctcccactacatcatcaactcgctgcccaaccgccgttttaagatcggggaccaggaatttgaccatttgccggccctgctggagttttacaagatccactacctggacaccaccaccctcatcgagcctgcgcccaggtatccaagcccaccaatgggatctgtctcagcacccaacctgcctacagcagaagataacctggaatatgtacggactctgtatgattttcctgggaatgatgccgaagacctgccctttaaaaagggtgagatcctagtgataatagagaagcctgaagaacagtggtggagtgcccggaacaaggatggccgggttgggatgattcctgtcccttatgtcgaaaagcttgtgagatcctcaccacacggaaagcatggaaataggaattccaacagttatgggatcccagaacctgctcatgcatacgctcaacctcagaccacaactcctctacctgcagtttccggttctcctggggcagcaatcacccctttgccatccacacagaattgacctgtctttgcgaaagcaatccagaaaagagtaccctgtgctttatgacaagactgccttggcattagaggttggtgacatcgtgaaagtcacaaggatgaatataaatggccagtgggaaggcgaagtgaacgggcgcaaagggcttttcccctttacgcacgtcaaaatctttgaccctcaaaacccagatgaaaacgagtgattgctgttgccctgtttcctgctgctttgttgttctgcctgtcctagtctcctttgaagtgggaaagcattttctctcataggcaagtcacactgcattgccgaagtccagctttctgcagactggcagtcgcacacacatttggaatgcacacagcggctgcctcctgatgtttgtatcatagtcgtattgtgcaaagagtagccgattttagagttcttttggatcataaactggaaatactgatggaagcacacaagtggagagaagttgacgtggaaagggtcttccttctcattgctgcccgtttgtacatgggactgattctgtcgtgttcaccagagaaagcttgaggccatggcgagatactgcatgtttgctgttccacaaagcagtggcttagctgccatcttgcttttctttggacaacaggaagtgaacctggggttggggaggtggggacagagccgggcgcagtcgggggcacagccctgaggcggggctgagggccaggccgccacgtccctggaccctgaaaacgggctcggacccccgctgcagcgtggactccggtgtggccgcggggcgtgcaacccggaccctggccagctccgtgtcctccagacctttactcatggccccgcatcgccaggccgagctgcaccttcggtccccgcccgcggcagccgaggtagg

SEQ ID NO: 61775 - DNA, 1295 bp, Homo sapiens
ttttttttttttaaggttgttggaaataatttttatttaacagatataaaaaaaattcttaacatttacaaattgtacaaagattggtagcttttatatttttttaaaaatgctatactaagagaaaaaacaaaagaccacaacaatattccaaattataggttgagagaatgtgactatgaagaaagtattctaaccaactaaaaaaaatattgaaaccacttttgattgaagcaaaatgaataatgctagatttaaaaacagtgtgaaatcacactttggtctgtaaacatatttagctttgcttttcattcagatgtatacataaacttatttaaaatgtcatttaagtgaaccattccaaggcataataaaaaaagaggtagcaaatgaaaattaaagcatttattttggtagttcttcaataatgatgcgagaaactgaattccatccagtagaagcatctccttttgggtaatctgaacaagtaccaacccagatagcaacatccactaatccagcaccaattccttcacaaagtccttccacagaagaagtgcgatgaatattaattgttgaattcatttcagggcttccttggtccaaataaattatagcttcaatgggaagaggtcctgaacattcagctccattgaatgtgaaataccaacgctgacagcatgcatttctgcattttagccgaagtgagccactgaacaaaactcttagagcactatttgaacgcatctttgtaaatgtacactccgcaattttcccaagatctatgccataattcaatgaactccatgaacactgcttgtagttgggtgtccaggactcctcaaagctttccctcagacattcccccttttctcctttgaatccatcccgacctgggatcccaggtgtacccggaatgccattggccccagggctcccgtctcgaccaggcactcctgctggcccttgtaagcacattccattatacaggtccaccacctccctctgccggagctgcgccttttgcttccccttggggatctcagaggcgctcgacggcgcgggcagctgcagcagcaggagcagcaggaggccgcggagccgctgcggggaggcggcggggccctggggtcgcatggctcccggctgccgggcagcgcggagctggaggcggaggagaccgaggagaggaacgtggtcagcgtctggctccgccgcgctccgaggccgccgcaggctgcatcaatgcgcctttcacccgagcgcctctctccctcccttaattcctcccgccc

SEQ ID NO: 61776 - DNA, 5696 bp, Homo sapiens
ggtctacgaagaccaagtgggcaagtttgattggagacagcaatatgttgggaaggtcaagtttgcctccttggaattttcccctggatccaagaagttggttgtagccacagagaagaatgtgattgcagcattaaattcccgaactggggagatcttgtggcgccatgttgacaagggcacggcagaaggggctgtggatgcccatgctgctgcacggacaggatgtgatcactgtgtccaatggaggccgaatcatgcgttcctggggagactaacatcgggggcctgaactgggagataaccctgggacagtggcagtttccagggcacttgggctcggttggcctgcaggagtctgtaaggtacatccgcagtcctgaagaagactacacttgccctccatcacctctccagtgggcacctcaagtgggtggaacatcttcccagaaagttgacagcttccattaccagatggtgtaatcttaacggctctggggtggtgtgggcccctcggagttgttcccttcagcccatgtgaacattgtcaagtttaatgtggaagatggagagattgttcagcaggttagggtttcaactccgtggctgcagcacctgtctggagcctgtggtgtggtggatgaggctgtcctggtgtgtcctgacccgagctcacgttccctccaaactttggctctggagacggaatgggagttgagacagatcccactgcagtctctcgacttagaatttggaagtggattccaaccccgggtcctgcctacccagcccaacccagtggacgcttcccgggcccagttcttcctgcacttgtccccaagccactatgctctgctgcagtaccattatggaacgctgagtttgcttaaaaacttcccacagactgccctagtgagctttgccaccactggggagaagacggtggctgcagtcatggcctgtcggaatgaagtgcagaaaagtagcagttctgaagatgggtcaatggggagcttttcggagaagtctagttcaaaggactctctggcttgcttcaatcagacctacaccattaacctatacctcgtggagacaggtcggcggctgctggacaccacgataacatttagcctggaacagagcggcactcggcctgagcggctgtatatccaggtgttcttgaagaaggatgactcagtgggctaccgggctttggtgcagacagaggatcatctgctacttttcctgcagcagttggcagggaaggtggtgctgtggagccgtgaggagtccctggcagaagtggtgtgcctagagatggtggacctccccctgactggggcacaggccgagctggaaggagaatttggcaaaaaggcagcaattcaagatggcttgctggggatgttcctgaaacgcctctcgtctcagcttatcctgctgcaagcatggacttcccacctctggaaaatgttttatgatgctcggaagccccggagtcagattaagaatgagatcaacattgacaccctggccagagatgaattcaacctccagaagatgatggtgatggtaacagcctcaggcaagctttttggcattgagagcagctctggcaccatcctgtggaaacagtatctacccaatgtcaagccagactcctcctttaaactgatggtccagagaactactgctcatttcccccatcccccacagtgcaccctgctggtgaaggacaaggagtcgggaatgagttctctgtatgtcttcaatcccatttttgggaagtggagtcaggtagctcccccagtgctgaagcgccccatcttgcagtccttgcttctcccagtcatggatcaagactacgccaaggtgttgctgttgatagatgatgaatacaaggtcacagcttttccagccactcggaatgtcttgcgacagctacatgagcttgccccttccatcttcttctatttggtggatgcagagcagggacggctgtgtggatatcggcttcgaaaggatctcaccactgagctgagttgggagctgaccattcccccagaagtacagcggatcgtcaaggtgaaggggaaacgcagcagtgagcacgttcattcccagggccgtgtgatgggggaccgcagtgtgctctacaagagcctgaaccccaacctgctggccgtggtgacagagagcacagacgcgcaccatgagcgcacctttattggcatcttcctcattgatggcgtcactgggcgtatcattcactcctctgtgcagaagaaagccaaaggccctgtccatatcgtgcattcagagaactgggtggtgtaccagtactggaacaccaaggctcggcgcaacgagtttaccgtactggagctctatgagggcactgagcaatacaacgccaccgccttcagctccctggaccgcccccagctgccccaggtcctccagcagtcctatatcttcccgtcctccatcagtgccatggaggccaccatcaccgaacggggcatcaccagccgacacctgctgattggactaccttctggagcaattctttcccttcctaaggctttgctggatccccgccgccccgagatcccaacagaacaaagcagagaggagaacttaatcccgtattctccagatgtacagatacacgcagagcgattcatcaactataaccagacagtttctcgaatgcgaggtatctacacagctccctcgggtctggagtccacttgtttggttgtggcctatggtttggacatttaccaaactcgagtctacccatccaagcagtttgacgttctgaaggatgactatgactacgtgttaatcagcagcgtcctctttggcctggtttttgccaccatgatcactaagagactggcacaggtgaagctcctgaatcgggcctggcgataaagaacaaagactgtgcctaaaagtggagagccaggggagtgtgggtcagataagcagctacagctgcagtttggtggattggtggagtatgtgtgtgtgtcagtgctcagctaagaactgtagggaagatgggtgacctttcacggcagaactcctttttgggatatacatgaatgcagaaaggatccttacatgggagagaagacagaactctctcaagctgacactctcagagattcctgatgggcctttctctttgaagtccaaagggcgtctgcattgcttcctttctttgcccatccatgaatgttctgttttgttttgttttttttaataagaattccggctgatttttgtgaggcctgtttaaattgactttactttgccttttgtgtttctcaattttatctagaaatctttctgactttttccatctcttgcttcaaagtaagaggggaactctccttgccgactccaccttataggtacatttggtgttttgcactgggaagaaataggatccatccttagctgaggcttgaggactgatccagcctctcatggcttccctccaaagtaacttagggttgagggatctatatgtgatgtcaaaacttactttaaacctctagtttcgtgctgtcatttattaggctgggccaccaaatctttgtttcaatttatcagaagccaagtgcatactagcgtcttgtttgttgcccattgcctatacttttcacctgagatgtgtgagttggggccttttaaaaactactgaattgtctgagccttgaagacatttccagggagaagagataatctctcatttcacccacaggctggtctaatcataacctagttaaagatgtccttgtttaagaaccccattatttatttttagtttttaatataaattaacatgtgggtcattatatttctccttaaatgaggaaattttaaattttattgatctaacctttgaagctttaaaaaaggagaaagagggtaggggtgggaaactggcatactgtgtgtatagcactgccgattggctaggccactgtgtctctgctacaaattaaagaaatcctaaaagttttccttggtcatagagttggggaatgacagaatttttctttgttgtgaaatgtatgtacagagtagaccattctctaggccctgtgggtggaaagaggtacactcgaatgtttgcataaagcaagtgacaaatgacactgtttaagtcctcttttgtgtcttagaagatcattttgaggctattttcacattagaggggataaaagcagtgaagacatggagtaagtgtattttattttagtaaggaaaggtcagtttaatcatatatgggttggttaggttatctaaaaatttgtcatctttctatggtcatatgctgatggtagattatggcagagaaggaagaggaaatgacaaccattttattaattgtcagtttgatattgagtgactgaatgtctaagaatctccagaaaaaaacaggcatctatcatcctgacccaaggcatattttaacataacctgggagaagagagttaagtacaagttaaaaaaaattctgccctagttttgagaaagcctggctggaattctgactgtcttacatacatatgtgcaaggttagcctgcaagattctagtttttatttaccagtgtgccagaatctgaaacaagctactgggagggaaggtatttgtcctttagtaaaattccctgtatttcagctgtaatcaaagttacctcaaagcaggtgctttttttttttttgagaccctggctcaaaaacaaaaacaaaaactagtttgttttagtattcattaattacgtatatgagcactggtagtctagtgtttgttcttgtatacagtgttttcttaaatgagatgatgctatttaattctgttacttgttttttcaactaatggatcttttaaagttttttatttaaattttttgtgggtacatattaggtacatatacttatggggtacatgagatgtttttataaaggctcagctaatgtatcttgaatatcatgtattcataaagatgactgaaatagtttctggaacaaagtctgatagaaaaaatactcaattcctaatttaagtgttagagactttaatgtaagctatctaatctgaactagtttcattatttgtgtgtgggtacatgttatgtgctccgtaaggcatctttcaatttgaaaatttcataattgtaatttcactgcctttataaattgctttttttttggaggcagggtctctgtcacccaggctggagagcagtggcacagtcatagctcactgcagcctcgaacacctgggctgaagtgatcctccctccttagcctcccaaagtgccgggattacaggcatgagctactgcacctggcccataaattgtcatacttttaaagagcctattacacaaagtatcatcagaatcatcccaagactcatttcctgattcctaattatttaaaattttgcttttaggcgaggcatggtggctcgggcctataatcccagcactttgggaggccagggcaggcggatcatttggggtcgggagtttaggaccagcctggccaacatggtgaaacctgaagccccatctctaccaaaaaaataaaggaatttagccgggtgtggtggtgcatgcctgtagtcccggctacttgggaggctgaggcaggagaatcgaacccagga

SEQ ID NO: 61777 - DNA, 1993 bp, Homo sapiens
ttttttttttttactgttttatccaaatttattctcagggaaaaagaaagtagtggctctacgcaactttttcattcaccaaccacctttccatgcatcagaacctatgctgtgattgttagctgaacttcaatagtttccacctacttaagagagatgcctcaaacaaattaactttattttcagacaacaggtccaagaagacttcacagctcaatcatgacgaacatgtggctgtttcctcacagccaggaaccctcggtattagaagaaaactccaaccccccacaccatcatctagcctcttttctcactgtgaagaactgatgagacagaattcctgagaagggaacatttaggtaatctgggatagaagggcatggaaggactggacaaactaagcctccccatgaaggaagggaaaagaatattacaaaacagactaacagaaaacaagacccatcagtatcttcaggataaacaagaggccactctagatgctctgattaaaggttgtccatgcctacagaggcggaggataaatctaagaaacagaaatgtataaccagcccaatgcttccatactctgcattaggtcagtgtgaacatggctttgctcccaatggtcagacctgacatgggtccttctgaagatggtgggtcaggtatatcccagccaccctcaccagagaatacatctatgacaaacccaaattcctaatcctgaagtactttgagccactctacattgtggccactcaataatagaataaatttgtgaaaaagctgcatgttttaatttaggaaatgagtagaagttcacaagcaacccagaataggtgccagcagtttgctccagtgggccacaccacagcagcagctcaggctctgcagaatcactgtgtccagtgcttcctgagatgttctttcagctgaggaatggaaggcagcagctgctggcactcatgacaacgaaggggcagcttcaagagctcaggcatcccatctcggacagttactctaccagcctcttgtaccatctcgatcacagcttgtgattctaggaagtattctgtattgaaagaattccaatgttttttgtttttaaggcaaggagaatcaaaatcctggctgatcacatgaagatgtacatggctcatactcggaatggcgtggtagcccaatcggaagcggagtttgctggacccagcaaaatctacaatcaccttttcccccacagtgtgcatatgcttaaggagttcaaggtgttcccctggccacagccttcagactggaaatggaggtccacggtaagaccagccaatggtaacgggcctttgggtatttatcctttatcaccaccacctgctcatctttgtaaacctgcattttggggtcctgcatagaaatcttcaagccttgactccagtggcccagggattcctttttgataggtgcatcttttcccttctttaggggcacagagcattggccagagttgctcccaggttccagccctgtcccagcctcagcttcctgagcagcatccctttctatagaatcactgttgcctgatctctttctcttcctgtgtgtttccaggccagggttctttgcctcttcctcaaactctacaatatatggataaagttcattcaccatgtggagaacctggccaggctgcagcttcacctcttggtccttcccaattacgactgagtcaatgctggtgggattgactcctacctgctttaccttgacatatcccttgttacactctgctttcaactgtacttgctgtcgagaacatttcttatcagtgatcttggtctctgggccacgcccaatcacaactgcttccaaatgtggaagtctgattcgctggtgccggctgtcctgtctcaccaaccagcacacccgcatcatcactctccagaagtcggagacggacaaattcaccctcgtgccaagcatggcggaatgcatctaacag

SEQ ID NO: 61778 - DNA, 542 bp, Homo sapiens
gacgtccgggtttacccacgcgtccgcccacgcgtccgaagtgctgaagaaggtactggaatgtaacaaggaagaggtacccaacaaggatgaactggttggaaacttgtatagctgcatagggaatgcccagattgagctggggcagatggaggcagccctgcagagccacagaaaggacctggagatcgccaaggaatatgaccttcctgatgcaaaatcgagagcccttgacaacattggcagagtttttgccagagttgggaaattccagcaagccattgacacgtgggaagaaaagatccctctggcaaaaaccaccctggagaagacctggctgttccacgagatcggccgctgctacttggagctggaccaggcctggcaggcccagaattatggcgagaagtcccagcagtgtgccgaggaggaaggggacattgagtggcaactgaatgccagtgttctggtggcccaggcacaagtgaagctgagagacttcgagtcagccgtgaacaattttgagaaggccctggagagag

SEQ ID NO: 61779 - DNA, 1362 bp, Homo sapiens
ggaattatttggtttcggttgttttctattagactatggtgagctcaggtgattgatactcctgatgcgagtaatacggatgtgtttaggagtgggacttctaggggatttagcggggtgatgcctgttgggggccagtgccctcctaattggggggtaggggctaggctggagtggtaaaaggctcagaaaaatcctgcgaagaaaaaaacttctgaggtaataaataggattatcccgtatcgaaggcctttttggacaggtggtgtgtggtggccttggtatgtgctttctcgtgttacatcgcgccatcattggtatatggttagtgtgttggttagtaggcctagtatgaggagcgttatggagtggaagtgaaatcacatggctaggccggaggtcattaggagggctgagagggcccctgttaggggtcatgggctgggttttactatatgataggcatgtgattggtgggtcattatgtgttgtcgtgcaggtagaggcttactagaagtgtgaaaacgtaggcttggattaaggcgacagcgatttctaggatagtcagtagaattagaattgtgaagatgataagtgtagagggaaggttaatggttgatattgctagggtggcgcttccaattaggtgcatgagtaggtggcctgcagtaatgttagcggttaggcgtacggccagggctattggttgaatgagtaggctgatggtttcgataataactagtatggggataaggggtgtaggtgtgccttgtggtaagaagtgggctagggcatttttaatcttagagcgaaagcctataatcactgcgcccgctcataaggggatggccatggctaggtttatagatagttgggtggttggtgtaaatgagtgaggcaggagtccgaggaggttagttgtggcaataaaaatgattaaggatactagtataagagatcaggttcgtcctttagtgttgtgtatggttatcatttgttttgaggttagtttgattagtcattgttgggtggtgattagtcggttgttgatgagatattttgagggtggcgatcaatagagggcggcacagaatgatcatgtactgcggcgggtgaggccctaggattgtgggggcaatgaattgaaagcgaacagattttcgttcattttggttctcagggtttgttataatttttttatttttatgggctttggtgagggaggtaggtggtagtttgtgtttaatatttttagttgggtggatgaggaatagtgtaaggagtatgggggtaattatggtgggccatacggtagtatttagttggggcattcccttctgtcgtcttctcgcagccgtaccc

SEQ ID NO: 61780 - DNA, 1224 bp, Homo sapiens
gctcacacctgtaatctcagcacttcaggtggccgagacgggacaattgcttgaggccaggagtttgagaccagcctggccaacatggcaaaaccccatccctacaagaaatataaaaattagctgggcttggtagtacacgcctgtaatcccagctactacttgggaggctgaggcatgtgaattgcttgaacccaagagacataggttgcagtgagccgagaccacgccactgcactccagcctgggcaatggagtgagactctgtctcaggaaaaagaaaaataaatgaagcataagcattgaaaatgaggggtcagagtgtctttacttacattatactaatgtgaaattccctatgtgagaggtgtagtaattgagttggggtggctacgtggaatagtttataaagggagtttgcatgaattttggcaataagcagaccagcataaataaatggtgcacatttcactttcttttccactctttccagaggcgcaggaattggtgggcttggcataactgttgagggaccatcagagtcgaagataaattgcagagacaacaaggatggcagctgcagtgctgagtacattcctttcgcgccgggggattacgatgttaatatcacatatggaggagcccacatccctggtgagctattcctcagagaggaccccagagaataattgattttgcaggaaaatgggtttgattttgcttatctctctgagtggggaaaacaatctgatatttgtaatagctgcaaaaggagagtttttcttagggctacatctccaagattatctcaactcccagtagaaccggtaacatggcaaaaagcatcggcttagaattttgactggaaacagttgtgcgtgtgttggaggacctagttcttgattcaggggaaagctggttctttacaaagttgaaaatcacagtggctcacacctgtaatccccaaactttgggaggccaaggcatgcagattgcttcaggtcaggagtttgagaccagcccaggcaacatggggaatccccatctttacaagaaatacaaaacttagctgagtgtgatggtgcgtgcctgtaatcctagctatgtggggtgggggctgtgatgggacgatgtctgagatgggagcctgggaggttgagtgagctgagattgcgccactgcgctccagcttgggtgacagaggaagaccctgtctcaaaaaaa

SEQ ID NO: 61781 - DNA, 8182 bp, Homo sapiens
tgacttatccgctcgacccacgcgttcgagacagtggtaccttttttccttttaggtgatgaaatggtctctgcaagatgttttgttcttgaattggaaatttttaaggctgatatatgctggtacttcatcttctatatgtggactataatttcttcccttaggataactacataaagagacaaaaaaaagaaaaaagagcaaagatctgtgctgtgtcaagtatgacagccatcactcatggctctccagtaggagggaacgacagccagggccaggttcttgatggccagtctcagcatctcttccaacagaaccagacttcatcacctgattcttccaatgagaattccgtagcaactcctcctccagaggaacaagggcaaggtgatgccccaccacagcatgaagatgaagagcctgcatttccacatactgagctggcaaacctggatgacatgatcaacaggcctcgatgggtggttcctgttttgccaaaaggggaattagaagtgcttttagaagctgctattgatcttagtgtaaaaggccttgatgttaaaagtgaagcatgccaacgtttttttcgagatggactaacaatatctttcactaaaattcttatggatgaggctgtgagtggctggaagtttgaaattcatagatgtattattaacaatactcatcgcctagtggagctttgtgtggccaagttgtcccaagattggtttccacttctagaacttctcgccatggccttaaatcctcactgcaagtttcatatctacaatggtacacgtccgtgtgaattaatttcctcaaatgctcagttgcctgaagaagaattatttgctcgttcttcagatcctcgatcaccaaaaggttggctagtggatctcatcaataaatttggcacattaaatgggttccagattttgcatgatcgtttttttaatggatcagcattaaatattcaaataattgcagctcttattaaaccatttggacaatgctatgagtttctcagtcaacatacactgaaaaagtacttcattccagttatagaaatagttccacatttattggaaaacttaactgatgaagaactgaaaaaggaggcaaagaatgaagccaaaaatgatgccctttcaatgattattaaatctttgaagaacttagcttcaagaatttcaggacaagatgagactataaaaaatttggaaatttttaggttaaagatgatactcagattgttgcaaatttcctcttttaatggaaagatgaatgcactgaatgaaataaataaggttatatctagtgtatcatattatactcatcggcatagtaatcctgaggaggaagaatggctgacagctgagcgaatggcagaatggatacagcaaaataatatcttatccatagtcttgcaagacagtcttcatcaaccacaatatgtagaaaagctagagaaaattcttcgttttgtgattaaagaaaaggctcttacattacaggaccttgataatatctgggcagcacaggcaggaaaacatgaagccattgtgaagaatgtacatgatctgctagcaaagttggcttgggatttttctcctggacaacttgatcatctttttgattgctttaaggcaagttggacaaatgcaagtaaaaagcaacgtgaaaagctccttgagttgatacgccgtcttgcagaagatgataaagatggtgtgatggcacacaaagtgttgaaccttctttggaacctggctcagagtgatgatgtgcctgtagtacatcatggaccttgctcttagtgcccacataaaaatactagattatagttgttcccaggatcgagatgcacagaagatccagtggatagatcactttatagaagaacttcgcacaaatgacaagtgggtaattcctgctctgaaacaaataagagaaatttgtagtttgtttggtgaagcatctcaaaatttgagtcaaactcagcgaagtccccacatattttatcgccatgatttaatcaaccagcttcaacaaaatcatgctttagttactttggtagcagaaaaccttgcaacctacatgaatagcatcagattgtatgctggagatcatgaagactatgatccacaaacagtgaggcttggaagtcgatacagtcatgttcaagaagttcaagaacgactaaacttccttagatttttactgaaggatggccaactgtggctctgtgctcctcaggcaaaacaaatatggaagtgcttagcagaaaatgcagtttatctttgtgatcgtgaagcctgttttaagtggtattccaagttaatgggggatgaaccagacttggatcctgatattaataaggacttctttgaaagtaatgtacttcagcttgatccttcccttttaactgaaaatggaatgaaatgctttgaaagatttttcaaagctgtcaattgtcgagaaaggaaactaatagcaaaaagaagatcctatatgatggatgatttggaattaattggactagactacctttggagggttgtgattcagagtagtgacgagattgctaacagagctatagatcttcttaaagagatatacacaaaccttggcccaagattaaaagccaatcaggtggttatccatgaagacttcattcagtcttgctttgatcgtttaaaagcatcatatgatacactgtgtgtttttgatggtgacaaaaacagcattaattgtgcaagacaagaagccattcgaatggttagagtattaactgttataaaagagtacattaatgaatgtgacagtgattatcacaaggaaagaatgattttacctatgtcgagagcattttgtggcaaacacctctctcttatagttcggtttccaaaccagggcagacaggttgatgagttggatatatggtttcatacgaatgacacaattggttcagtacggcgatgtattgttaatcgtattaaagccaatgtagcccacaaaaaaattgaactttttgtgggtggtgagctgatagattctgaaaatgacagaaagctaattggacaattaaacttaaaagataaatctctaattacagccaaacttacacaaataaatttcaatatgccatcaagtcctgatagctcttccgattcctcaactgcatctcctggaaaccaccgtaatcattacaatgatggtcccaatctaaaggtggaaagttgtttgcctggggtgataatgtcagtgcatcccaaatacatctctttcctttggcaatttgcaaacttaggtagcaacctgaatatgccacctcttaaaaatggagcaagagtacttatgaaacttatgccaccagatagaacagctgtagaaaaattacgaactgtttgtttggaccatgcaaaccttggagaaggcaaacttagtccaccccttgactcccttttctttggtccttctgcctcccaagttctatacctaacagaggtagtttatgccttgttaatgcctgctggtgtgcctctaactgatgggtcctctgactttcaagttcacttcttgaaaagtggtggcttacctcttgtactgagtatgctaataagaaataacttcttgccaaatacagatatggaaactcgaaggggtgcttatttaaatgctcttaaaatagccaaactgttgttaactgcgattggctatggccatgttcgagctgtagcagaagcttgtcagccagttgtagatggtacagaccccataacacagattaaccaagttactcatgatcaagcagtggtgctacaaagtgcccttcagagcattcctaatccctcatccgagtgcgtacttagaaatgagtccatacttcttgctcaggaaatatctaatgaggcttcaagatatatgcctgatatttgtgtaattagggctatacagaaaattatctgggcatcagcatgtggggcattaggactattttttagcccaaatgaagaaataactaaaatttatcagatgaccaccaatggaagcaataagctggaggtggaagatgaacaagtttgttgtgaagcactggaagtgatgaccttatgttttgctttacttccaacagcgttggatgcacttagtaaagaaaaagcctggcagaccttcatcattgacttattattgcactgtccaagcaaaactgttcgtcagttggcacaggagcagttctttttaatgtgcaccagatgttgcatgggacacaggcctctgcttttcttcattactttactctttaccatactggggagcacagcaagagagaagggtaaatattcaggtgattatttcacacttttacggcaccttctcaattatgcttacaatggcaatattaacatacccaatgctgaagttcttcttgtcagtgaaattgattggctcaaaaggattagggataatgttaaaaacacaggtgaaacaggtgtcgaagagccaatactggaaggccaccttggggtaacaaaagagttattggcctttcaaacttctgagaaaaagtatcactttggttgtgaaaaaggaggtgctaatctcattaaagaattaattgatgatttcatctttcccgcatccaaagtttacctgcagtatttaagaagtggagaactaccagctgagcaggctattccagtctgtagttcacccgttaccatcaatgccggttttgagctacttgtagcattagctattggctgtgtgaggaatctcaaacagatagtagactgtttgactgaaatgtattacatgggcacagcaattactacttgtgaagcacttactgagtgggaatatctgccccctgttggaccccgcccaccaaaaggatttgtgggactcaaaaatgctggtgctacgtgttacatgaactctgtgatccagcagctatacatgattccttctatcaggaacagtattcttgcaattgaaggcacaggtagtgatttacacgatgatatgttcggggatgagaagcaggacagtgagagtaatgttgatccccgagatgatgtatttggatatcctcatcaatttgaagacaagccagcattaagtaagacagaagataggaaagagtataatattggtgtcctaagacaccttcaggtcatctttggtcatttagctgcttcccaactacaatactatgtacccagaggattttggaaacagttcaggctttggggtgaacctgttaatctccgtgaacaacatgatgccttagagttttttaattctttggtggatagtttagatgaagctttaaaagctttaggacacccggctatactaagtaaagtcctaggaggctcctttgctgatcagaagatctgccagggctgcccacataggtttgaatgtgaagaatcttttacaactttgaatgtggatattagaaatcatcaaaatcttcttgactctttggaacagtatatcaaaggagatttattggaaggtgcaaatgcatatcattgtgaaaaatgtgataaaaaggttgacacagtaaagcgcctgctaattaaaaaattgcctcgggttcttgctatccaactcaaacgatttgactatgactgggaaagagaatgtgcaattaaattcaatgattattttgaatttcctcgagagctggatatgggaccttacacagtagcaggtgttgcaaacctggaaagggataatgtaaactcagaaaatgagttgattgaacagaaagagcagtctgacaatgaaactgcaggaggcacaaagtacagacttgtaggagtgcttgtacacagtggtcaagcaagcggtgggcattattattcttacatcattcaaaggaatggtaaagatgatcagacagatcactggtataaatttgatgatggagatgtaacagaatgcaaaatggatgatgatgaagaaatgaaaaatcagtgttttggtggagagtacatgggagaagtatttgatcacatgatgaagcgcatgtcatataggcgacagaagaggtggtggaatgcttacatacctttttatgaacaaatggatatgatagatgaagatgatgagatgataagatacatatcagagctaactattgcaagaccccatcagatcattatgtcaccagccattgagagaagtgtacggaaacaaaatgtgaaatttatgcataaccgattgcaatatagtttagagtattttcagtttgtgaaaaaactgcttacatgtaatggtgtttatttaaaccctgctccagggcaggattatttgttgcctgaagcagaagaaattactatgattagtattcagcttgctgctagattcctctttaccactggatttcacaccaagaaaatagttcgtggtcctgccagtgactgatgtttctgttttaggtatgatgcactgtgcgttcttctccgtcacagcaaaaatgtacgtttttggtttactcataatgtcctttttaatgtatcaaatcgcttctctgaatacctcctggagtgccctagtgcagaagtgaggggtgcatttgcaaaacttatagtgtttattgcacacttttccttgcaagatgggtcttgtccttctccttttgcatctccaggaccttctagtcaggcatgtgataacttgagcttgagtgaccacttactaagagccacactaaatctcttgagaagggaagtttcagagcatggacatcatttacagcaatattttaatttgtttgtaatgtatgccaatttaggtgtggcagaaaaaacacagcttctgaaattgaatgtacctgctacctttatgcttgtgtctttagacgagggaccaggtcctccaatcaaatatcagtatgctgaattaggcaagttatattcagtagtgtctcagctgattcgttgttgcaatgtgtcatcaccaatgcagtcttcaatcaatggtaatccccctctccccaatcctttcggtgaccttaatttatcacagcctataatgccaattcagcagaatgtgttagacattttatttgtgagaacaagttatgtgaaggaaaattattgaagactgcagtaactcagaggataccatcaaattacttcgctttttgctcttgggagaatcctcagttctcatctactgtcctcagcgaacttctctggcaggttgcatattcatatacctatgaacttcggccatatttagatctacttttccaaattttactgattgaggactcctggcagactcacagaattcataatgcacttaaaggaattccagatgacagagatgggctgttcgatacaatacagcgctcgaagaatcactatcaaaaacgagcatatcagtgcataaaatgtatggtagctctatttagcagttgtcctgttgcttaccagatcttacagggtaacggagatcttaaaagaaaatggacctgggcagtggaatggctaggagatgaacttgaaagaagaccatatactggcaatcctcagtatagttacaacaattggtctcctccagtacaaagcaatgaaacagcaaatggttatttcttagaaagatcacatagtgctaggatgacacttgcaaaagcttgtgaactctgtccagaagaggagccagatgaccaggatgccccagatgagcatgagccctctccatcagaagatgccccattatatcctcattcacctgcctctcagtatcaacagaataatcatgtacatggacagccatatacaggaccagcagcacatcacttgaacaaccctcagaaaacaggccaacgaacacaagaaaattatgaaggcaatgaagaagtatcctcacctcagatgaaggatcagtgaaaagcaataattaactgcttcctttatgactatgcactaaggtcttatagtccaaactttctctgtgtctggctagtattgaaaactagataaactgctccaaaccaacatggagtaaagagcatattcactggtttatttgcagtaatttgcaatttgtcagtgtataagacacatgcagggtgaagtgtacagagttttgtaacaaatgactggtcctaatctgtaaatgagaaaggtatatatactatgttaatgtctgactgttaatt

SEQ ID NO: 61782 - DNA, 5332 bp, Homo sapiens
cttcattctctcatccagctcctcggcctcatcggaacatttccaccaccattactcctttggaaactggtggcccggttccttcaaggggcacaggatgtctttgcctttttatcagaggtgccaccagcactatgatctcagctaccgcaacaaggacgtgcgcagcaccgtgagtcactaccagcgggagaagaaacgctccgccgtctacacccagggctccacggcctacagcagccgctcctccgccgcgcaccgccgggagtccgaggccttccgtcgggcgtccgcctcctcctcccagcagcaggcctcgcagcacgccctgagctctgaagtcagtcggaaggcagcctcagcctacgattatggctcctcccatggacttacagattccagtctgctgttagatgattattcatccaagttgagccccaaaccaaagagagccaagcacagcctactgtctggagaagagaaagaaaatttgcccagtgactacatggtacccattttctcaggacgtcaaaagcatgtcagtggaattactgatacggaagaagaaagaattaaggaagctgctgcttatatagcccagaggaatcttcttgctagtgaggaaggaatcacaacacctaaacagtccacggcatccaagcagaccacggcatctaagcagtccacggcatccaagcagtccacagcatccaagcagtccacggcatccaggcagtccacggcatccaggcagtctgtggtttccaaacaggccacatccgctcttcaacaggaagaaacttctgaaaagaagtcaaggaaagttgtgattcgaggaaaggcagaacgcctgtccctgaggaaaacattagaagaaaccgagacatatcatgccaagctgaatgaagaccatcttctccatgctcctgagtttatcattaaacctcgctcccacacggtttgggagaaggagaatgtaaaattgcattgctccatagcaggatggccagaacctcgtgtcacgtggtataaaaaccaggtgccaataaatgtccatgcaaaccctggaaagtatattattgagagtcgatatggaatgcacactctggagattaatgcatgtgattttgaagatacagctcagtaccgggcctcggcgatgaatgttaaaggagagctttcggcatatgcttcagttgtggtaaaaaggtataagggagagtttgatgagactcgcttccatgctggggcttccaccatgcccctcagctttggtgtgaccccatatggttatgcatcccggtttgagatccactttgatgacaaatttgatgtgtcttttgggagagagggagagacaatgagtctaggctgacgagttgtcatcactcctgaaattaaacatttccagccagagatccagtggtacagaaacggagtacctctttctccatcaaaatgggtgcaaacactttggagtggagagcgggcaacgctgacattttcccatctcaacaaagaagatgaaggcctctatacaatccgtgtacggatgggagaatattatgaacaatatagtgcttatgtctttgttcgagatgctgatgcagagattgaaggagccccagctgctcccttggatgtgaagtgcttggaggccaacaaagattatatcatcatctcctggaaacagccagctgtcgatggagggagtcctattctcggatattttattgataagtgtgaggtgggcacagatagctggtcgcagtgcaatgacacacctgtgaagtttgctcgttttcctgtcactggattgatcgaaggtcgttcctatatcttccgagttcgagctgtgaataaaatgggaataggtttcccatctcgagtttccgagcccgtggctgctctggatccggctgagaaagctagacttaaaagtcgcccctcagcaccctggactggacagatcattgttactgaagaggaaccttcagagggtattgtgcctggccccccgacagacctctctgtcactgaggccacccggagctatgtggtgctcagctggaagccccctggccagcgtggtcatgagggcattatgtactttgtggaaaagtgtgaggcaggaacagaaaactggcagcgagtgaacacggagctccctgtgaagtctccccgctttgctctgtttgacttggccgaggggaaatcctactgtttccgtgtccgctgttctaattctgcaggagttggtgagccctcagaggcaacggaggtgactgtggtaggggacaaacttgatatccccaaggctcctggcaaaatcatcccaagcagaaacacagacacctcagtggtagtttcgtgggaggagtccaaagatgccaaagagctggtcgggtactacatagaggcaaacgttgctggctctggcaagtgggagccctgtaacaacaaccccgtgaaaactcaccgattcacttgtcatggattagtgactggtcagagttatattttccgggtcagagcagtcaatgcagctggacttagtgaatattcccaggattcagaagctattgaagtcaaagctgctattgcaccaccatctccaccctgtgatatcacctgtcttgaaagttttcgtgactcaatggttcttggatggaagcaaccagataagattggaggggcagaaattactggctattatgtgaactatcgcgaggtcattgatggggtaccaggaaaatggagagaagccaatgtcaaggctgtcagtgaggaggcatacaagattagcaacttgaaggaaaacatggtgtatcagttccaagtggcagccatgaacatggctgggctgggcgcgccctccgcagtaagcgaatgcttcaaatgtgaagagtggaccatcgccgtcccaggaccaccgcacagtctcaagtgtagtgaagtcaggaaagactcactggttctccagtggaagccgccagtccactccgggcggactccggtcactggttacttcgtggacttgaaggaggccaaggccaaagaagaccagtggcgagggctcaatgaggcggctattaaaaacgtatacctgaaggttcgaggcctcaaggagggcgtcagctacgtgttccgtgttcgagccataaaccaggcgggagttgggaagccatctgaccttgctggccctgttgtggcagagacccgtccaggaaccaaagaggttgttgtaaatgtggatgatgatggagtcatttcattgaacttcgagtgtgataagatgactccaaagtccgagttctcctggtccaaagattatgtatccactgaggactctccacgattggaagtcgaaagcaagggcaacaagacgaaaatgaccttcaaagaccttgggatggatgacttgggtatttactcttgcgatgtaacagacactgatggaatagcatcaagctacttaatagatgaggaagaattgaaacgtttacttgctctcagccatgaacacaagttcccaactgtcccagttaaatcagagttggcagttgaaattttggagaaaggccaggtccggtttttggatgcaggctgagaaactgtctggcaatgccaaagtcaactacatatttaacgagaagggaatttttgaaggcccgaaatataaaatgcatattgaccgaaacactggcatcatcgaaatgttcatggaaaagctacaggatgaggatgagggaacgtacactttccagcttcaagatggaaaagcaactaaccattctactgttgttctcgttggagatgttttcaaaaagctccagaaagaagctgaattccagcggcaagaatggatcaggaaacaaggtcctcactttgttgagtatttgagctgggaagtgactggtgaatgtaatgtactattgaaatgcaaggtggcaaatattaagaaggagactcatattgtgtggtacaaagatgagagggagatatcagtggatgaaaagcatgactttaaggatggtatatgtaccctgcttataacagagttttccaagaaagatgctgggatttatgaagttatcctgaaagatgaccgaggaaaagataagagcagactgaagcttgtggatgaagcctttaaggaactgatgatggaagtatgcaaaaaaatagctttgtctgctacagacctgaaaatccagagcacagccgagggcatccaactgtactcttttgtaacttactatgtggaggatttgaaagttaactggtcccacaatgggtccgccattaggtactcagacagagttaagaccggggtcactggagagcagatctggctacaaatcaacgagcccaccccgaatgacaaagggaagtatgtcatggagctctttgatggcaaaactggacatcagaagacagtggatctctctggacaagcatacgatgaggcttatgctgaattccagaggttgaaacaagctgccattgccgagaaaaatcgtgcccgggtgttgggaggtctcccagacgtggtcaccatccaggaggggaaggcccttaatctcacttgcaacgtgtggggagacccgcctccggaggtgtcgtggttgaagaacgagaaggccctggcctcagacgaccactgcaacctcaagttcgaggctgggaggaccgcgtacttcaccatcaacggcgtgagcaccgctgactcgggcaaatacgggctggttgtgaagaacaagtatggctcggagaccagcgacttcaccgtcagcgtgttcatcccagaggaggaggcgaggatggccgccttggagtccctgaaaggcggcaagaaggccaagtgaccggaggtgcgaggagagccagccggcctgtgtgacttgggtgtgaatggtttgggttaaggatgagacgtcttcatgctttctcctccctattattttctggcttgaggggaaaataatgtcaggtctttcactcatataaaaaagcaccaactaatgacactttaattgtttttctttatctacaaaattatgtgttaagaaaataccattcatagcatgaagattaggaaacagttttaaggagaagacttgaatgaagttggagggacattgaatgatggtcagagggcagacgaatgtgtcgtggggcgaattgggatttgctgcagctgtgaagccatggccgtgtctcgtgtgttgttacagaggtgatgtgcttttcgacgggcgcctcgtggcttggaacctcctctgtatgaataaacagttttcacgtctgtcctcttccccgaaaaaaaaaa

SEQ ID NO: 61783 - DNA, 1679 bp, Homo sapiens
gccgcttttcccgcctccgccggggccgagccgctgttcggctgacagttgaggatggccggagccgagggcgccgctgggcggcagtcggagctggagcccgtggtatcgttggtcgacgtccttgaggaggacgaggagctggagaatgaggcgtgcgctgtcctgggcggcagcgactccgagaagtgctcctactctcagggctcagtaaagagacaagcactatatgcctgtagtacctgcaccccagagggagaagaaccagcaggaatttgtttagcttgcagttatgaatgtcatggaagtcacaaactatttgagctatacacaaaaagaaattttcgttgtgattgtggaaacagcaagtttaaaaatttggaatgcaaattacttcctgacaaagcaaaggtaaattctggcaataagtacaatgacaacttttttggattgtactgcatttgcaagagaccttatcctgatcctgaagacgagattccagatgagatgatccagtgcgtagtctgtgaagactggttccatggaaggcatcttggtgccattccccctgagagtggggattttcaggagatggtatgccaggcctgcatgaaacgttgttcttttttgtgggcttatgctgcacaattggcagtaaccaaaatatccactgaggatgatggattggtgcggaacattgatggaataggtgatcaggaagttatcaaacctgaaaatggagagcatcaagatagtaccctcaaagaggatgttccagaacagggaaaggatgatgtccgggaggttaaagtagagcagaacagtgaaccatgtgccggctctagttctgaatctgatctccagacagtgtttaagaatgaaagcctcaacgcagaatcaaaatctggctgcaaacttcaggagcttaaagctaagcagcttataaagaaagacactgccacctattggcccctgaactggcgtagcaagttgtgtacctgccaagactgtatgaaaatgtatggagatctagatgtcttattcctgacagatgaatacgacacagttctggcttatgaaaacaaagggaagattgcccaggccactgacaggagcgatcccctaatggatacccttagcagcatgaatagagtccagcaagtggaactcatttgtgaatacaatgatttgaagactgaacttaaagactatctcaagagatttgctgatgaaggcacggttgttaagagagaggacattcagcagttctttgaagagtttcagtcaaaaaagagaagaagagtggatgggatgcagtattactgcagctagagtggagtatgaagctttctcattcaagccaatgaaaatgcgcttcccattcttggaataaaagaggtgtggttcacatttggccccctttccgtcctcctctgtttggagaggcctcgcgctcccttcattctctttagctgcagtagccaccgtgtggatgctgacttcacagccagcgtcctctgtgactcagctgatgcagctcattccacagacttcgccagtgtactcctactccagtgcacccagggttatttgcatagtttttaagtttgattttgttttgagaaagcaaatttggtgtctttgtttaatgatctgttatttcactcccagatgtgtgt

SEQ ID NO: 61784 - DNA, 1442 bp, Homo sapiens
tgaaactctcagcggaaagctacaaggaaacacagatggtgaagattaaagaggaacccatggaggttgacatccaggactcccatgtctcgatatcacccagccggaatgttggctacagcactttaatcgggcgagagaaaaccgaacccttacagaagatgccagagggcagagtacccccagagagaaacctcttcagtcaggatatctctgtgaaaatggcttccgagctcctctttcaactgtcagaaaaagtgagcaaagagcacaatcatacaaaagaaaacaccatccggaccacgaccagccctttcttttcagaagacacatttagacaatcaccattcacctccaattcaaaagaactgctgcccagtgactccgtgctgcacggaagaatatcagctccagaaacagaaaagatagtcctagaggcaggaaatggattaccatcctggaaattcaatgaccagctttttccctgtgacgtgtgtgggaaagtgtttggccgacagcagacattgtcccgacacctctcgctgcacacagaggaaagaaaatacaaatgccacttgtgcccctatgctgctaagtgccgtgcaaatctgaaccagcacttgaccgtccattccgtgaagctggtgagtacagacaccgaggacattgtcagcgccgtcacctctgaaggcagtgatgggaagaaacatccttattattacagttgtcacgtgtgtggatttgagaccgagctcaatgtccagtttgtcagccacatgtcactccacgtggacaaggagcagtggatgttttcgatctgctgcactgcctgcgacttcgtcaccatggaggaagcagagataaagactcacattggcaccaagcacacaggggaagacaggaagacccccagcgaatcaaatagcccctcttcatcctccctctcagctctgagtgattcagccaacagcaaagatgattcagatggctcccagaaaaacaagggcgggaacaatctgctggtcatctctgtcatgcctgggagccagccctcactgaacagtgaggaaaagccagagaaagggttcgaatgtgttttttgcaactttgtctgcaagacgaagaacatgtttgagcgtcatctgcagatacacctcatcacccggatgtttgagtgtgatgtgtgccacaagttcatgaagacccccgaacagctgctggagcataagaaatgccacactgtccccaccggtgggctcaatttatgttctaggatgaccaagtagaagaatactttgaaaaaattgataatgccttctggctatacagtgcccattctgcatttattccaccaaccgccccgctgccatggagtgccacctcaagacccactacaagatggagtacaagtgccggatctgccagacggtgaaggccaaccc

SEQ ID NO: 61785 - DNA, 2141 bp, Homo sapiens
  misc_feature (1)...(2141): n = a,t,c or g
ttttttttttttcagaaatggcaaatagatttaatgcagagtgtcaacttcaattgattgatagtggctgcctagagtgctgtgttgagtaggtttctgaggatgcaccctggcttgaagagaaagactggcaggattaacaatatctaaaatctcacttgtaggagaaaccacaggcaccagagctgccactggtgctggcaccagctccaccaaggccagcgaagagcccaaatgtgagagtggcggtcaggctggcaccagcactgaagccaccactggtgctggcactggcactggcactgttattggtactggtactggcacccagttgcttgggcanttgccacttctctttggggctttggcttttagctttctgtttcccgcctggggatccggggcttttggcccaggggttcccgatatcaagcttcggtcccagtttggcagggccccggcaagcattctcccaagccgaggcccaatgcccattcgaagctctaaatctcgggcccttagccttggcttccaaggtgagcctcagcttgcagccttcaaaatccgcttccattcgccccttnctttcccggggggggactgagctgcccattccctttggatccttccttttgtacccttgcaggcaaacttgaaggactttcatctttgctggtcctcatagtaagagcgcaggcccccagaagaactcatattcaaggggaattgctatgggggactctggcatagtcccaggtacttctgcttcacaaacctcatcagtgatgagcttccttcacgtcccccaagagttgaatgatgtatcccagggcgcagtccacaacttgcgcagtaccttcccagatgacagcctcacttggaccgatttccattcattgaagatgatgctaagaagcaccatgagcagacccagcttgggtgagtccttagtcgttcccagtatgcctgcatcagtgggctctaaggtgctgagaagaatgtacaagtggtcattcttatcaatttccttcaattgaatcccaaataccttcttccaaggaatagcctgctcgttcaaatgatttcggggtacacatcagtgtattctttgatgatgtccttcagcatgttccgagcgcttgatgggaatcttcgtctggtctttagccaaaaggtacttcaccaaattcatttgccctcccttgcaaaagggccacatccccaagntggtggtgcttcaggctcttgggatgaactggaacttggcaactctaacggcgaagcccctttgcctacgggctttaaggtgatctccaaggggagagcaaaggctctccgggcccaaagcaagccaaccgagtccttgatgccctgcgggcccaaaaggctatgggaccccttgaagccctgcgggccattgaggccattagagcctttgagacccttcggccacctgtggttccagaagcctgactctgatcactgctgccatcctcttccccatccagatgcttcacctttcgggctttcttggctttgaccttgggccgagtatcctgattctcctgagactgggcagctgcactctcaggctcaggttcatctgctggggcctgagagggtgcagcctcagtctcctgagcctttgtattgaccttcgtatcagccacatggctgacctttttggtctcagtggcaggcattgtcacagcctgcgggtcagcattctgtttcttggtgtcagctgctagactcttgttttcagctgccagaacctgggtatcagtcagctgagtagtagatgaggcctgggtggcaggtgcctcccgagcctctggggtctttgagacctctgtggcctttgagaccccagaggcttttgagaccttcacatcctctgagacctccagtgcctttgaggccttcggtgtctctgggacctccacattctgggtcactgtcaacagagtctgcatcatcgagctactgtccttttctgaagcttcagcctggaagcgagttagacctgcaccactctcgcttgtgtcagacatgtctcaatttggcctggcaagagctgagcctcgtcctcctacaattcccgagtgcgtccactcactccaagcccctccgaagctcgg

SEQ ID NO: 61786 - DNA, 2579 bp, Homo sapiens
cgttgctgtcgggaggctgctgcggcgccggggctccgtggcctggattgaatccgatcgggagccatgagcgtggacaaagctgagctatgcgggtctctgctcacctggttacagacgttccacgttccgtctccctgtgccagccctcaggacctgagcagcggccttgccgtagcctatgtgctgaaccagatgtgagtggagctgaaggggaggatcccaaaagtgtcccccagtctgctcatcccaccttctcgcccccagagacccctcctggttcaacgaggcatggctccagggcatctcggaagatccaggtcccaactggaagctgaaggtcagcaatctgaagatggtcttacggagcctagtagagtactcccaggatgtcctggcgcatcctgtgtcagaagagcatctcccagatgtgagcctcattggagagttctcagacccggcagagctcggcaagctgcttcagctggtgctgggctgtgccatcagttgcgagaaaaagcaggaccacatccagagaatcatgacgctggaagaatcggttcagcatgtggtgatggaagccatccaagagctcatgaccaaagacactcctgactccctgtcaccagagacgtatggcaactttgacagccagtcccgcaggtactatttcctaagtgaggaggctgaggagggggacgaattacagcagcgctgtctggatctggagcggcagctgatgctcctgtcagaggagaagcagagcctggcgcaagagaatgcagggctgcgggagcggatgggccggcctgaaggcgagggtaccccaggtctcactgccaagaagctgctgctgctgcaatcccagctggagcagttgcaggaggagaacttcaggctggagagtggcagggaggatgagcgcctgcgctgtgccgagctggagagggaggttgcggagctgcagcaccggaaccaggcgctgactagcctggcccaggaggcacaggccctgaaggatgagatggatgaactacggcagtcttcggagcgtgctgggcagctggaggccacgctgaccagttgccggcgccgcttgggcgagctgagggagctgcggcggcaggtgcggcagctggaggaacgcaacgccggccacgccgagcgcacgcgacaactggaggatgagctacgccgagcgggctccctgcgcgcccagctggaggcgcagcggcggcaggtgcaggaactgcagggccatctgcaggaggaggccatgaaggccgagaaatggctatttgaatgccgcaacctggaggaaaagtatgagtcggtgacaaaggagaaggagcggctgttggcggagcgggactccttgcgggaggccaatgaggagctgcgctgcgcccagctgcagccgcgggggttgacccaggccgatccctcactggatcccacctccacacccgtggataacttagccgcagagatcctgcctgcggagctcagggagacgctcctgcggcttcagctggagaacaagcggctgtgcaggcaggaggcggccgaccgggagcggcaggaggagctgcagcgccagctggaggatgccaaccgcgcgcgccacgggttggagacgcagcaccggctgaaccagcagcagctatccgagctgcgggcccaggtggaggacctgcagaaagccctgcaggagcaggggggcaagactgaagattccattttgctgaaaaggaagctggaggaacatttgcagaagcttcatgaggcagatctggagttgcagaggaagcgggagtacattgaggagctggagccacccactgacagcagcacagcccggcggatcgaggagctgcagcataacttgcagaagaaggacgcggacttgcgggccatggaggagcgataccgccgctacgtggacaaggcccgcatggtcatgcagaccatggaacccaagcagcggccagctgcgggggcacctccagaactccattccctgaggacacagctccgagaacgggatgtccgcatccgacacctggagatggactttgagaaaagccgaagtcagcgggagcaggaagaaaagctgctcatcagtgcctggtataatatgggcatggccttgcagcagcgagctggggaggagcgggcgcctgcccatgcccagtcattcctggcacagcagcggctggcaaccaattctcgccgtggacccttgggacgcctggcatctctgaaccttcgccccactgacaagcactgacagacctcacaatcaagccagcctgggctccacccaccctggcttcctccagctcacatggcgcccagcactgggcttcagccaggtgctcgagagctttgaggccatgatctctgctcttccctctcccagattggtggggagggagggcgggaggtagatataggcctgttctttttagcaatgtgattcttgttgttgattctctctctggagttcatgtgctgcctcaggagactctgattttatatttgagaaaaataaaggcgttcaatctgcaaaaaaaaaa

SEQ ID NO: 61787 - DNA, 1610 bp, Homo sapiens
ttttttttttttgaaattaaattttatttaaacaggtaaaaatttatacatccttttaaaaacgaaaatgcaaagtcagtaagtgaatcaataatataaacctatttatagcagtaattaaaatagaggtaacatttaccagtgtgaaaatatcacagaattcaaatcacactcggatcttcaatgattcgagtgtgtatccgacacagcgggggctggtagactgaagatgaattcctcccatgcatgcgccatccccagtcaagtccttcctcatcaccgtccaccagctcacacagtggggtagctggctgctgaggcaattccacaatggtttctccggtctttggccatctttacgtagccacccatgccccattcttcaccccagctgttcttcaccagcccaatatttattgttatccggattctgtgctttcaaattccgtagccaacccaaccagcaacaacccatgaatccatggtcttcaactgcttacaggtctggctccaaaataaaatgccttctttataggaacaggaaggactcatggacctgccatcaaatagccaaacagaaaatgggcccccacagttggcaactggccttcatcagggcccttctcctgccttaagggatgtcccacaaagccggtgtcattagcaacaggataccttgggattgtacttacaggattcttctgttgcctcaatatggataggattcctcgagagtccagggcctccattatcctgaacatactggaaagcataatccattaggcccaccattgcagccttccattgccttgaggcccatgagcagtctaaccagattctgctcactcagtgagataagcctccccagttttccggaacatctgtcctttaagagcaccagtagcactaaaagcccaacaagaaccacactgaccctgattcttcacaggagtcacgtagcctttctctctccaatccacagatctgggggcctcataaaacagaggttcctggaacactttccccttcctgggcttacggttttgaaagccattcatcacctgcctgaattcttcactggtcatgtctccaaaggcgttcatggccattgtgaagctgtgtttcccttccctgtattcctgattgtgcagttcaatcatcttcatgttcttctcccacactgctctcctccatccttcttcattcatgccgtataatctgttgtgcatcgccttccacttggtccactgtgcctctaaactgtgatcaaatgttagagtagctgaggcaattcccaggcaaaaggcagcaaggatgagtgtaggattcatgttttaaaacctgtgtccacccggctcggaggctggcctgcccgctcaaccagtcacgcgcctccgcggggtcctcaactgccctccccggcttccccacctcaaggccagcagagttcggggtagacgctctcgttgccagggctggtgcacacctactcgaccgcgtcctctcttccagtccctgtccggccacagctgggcctggccggcggcgctttcctgctgcggtcgtagctgcgcaggcgcactccacggatgccgctcaaggttgcggag

SEQ ID NO: 61788 - DNA, 1485 bp, Homo sapiens
ggccagcaacaagttagtattgcagacatgggccaaggagccagaggccatgcagtggctcagggtccgtgagtcgcctggggaggccacaggacacagggtcaccatggggacagccgccctgggtcccgtctgggcagcgctcctgctctttctcctgatgtgtgagatccctatggtggagctcacctttgacagagctgtggccagcggctgccaacggtgctgtgactctgaggaccccctggatcctgcccatgtatcctcagcctcttcctccggccgcccccacgccctgcctgagatcagaccctacattaatatcaccatcctgaagggtgacaaaggggacccaggcccaatgggcctgccagggtacatgggcagggagggtccccaaggggagcctggccctcagggcagcaagggtgacaagggggagatgggcagccccggcgccccgtgccagaagcgcttcttcgccttctcagtgggccgcaagacggccctgcacagcggcgaggacttccagacgctgctcttcgaaagggtctttgtgaaccttgatgggtgctttgacatggcgaccggccagtttgctgctcccctgcgtggcatctacttcttcagcctcaatgtgcacagctggaattacaaggagacgtacgtgcacattatgcataaccagaaagaggctgtcatcctgtacgcgcagcccagcgagcgcagcatcatgcagagccagagtgtgatgctggacctggcctacggggaccgcgtctgggtgcggctcttcaagcgccagcgcgagaacgccatctacagcaacgacttcgacacctacatcaccttcagcggccacctcatcaaggccgaggacgactgagggcctctgggccaccctcccggctggagagctcaggtgctggtcccgtcccctgcagggctcagtttgcactgctgtgaagcaggaaggccagggaggtccccggggacctggcattctggggagaccctgcttctatcttggctgccatcatccctcccagcctatttctgctcctctcttctctcttggacctattttaagaagcttgctaacctaaatattctagaactttcccagcctcgtagcccagcacttctcaaacttggaaatgcatgcgaatcacccggggttcgtgttaaatgcagattctgactcagcaggtctgagtgggtccaggattctgtgtttctcatatgttcctgggtgatgctgatggggtcagtctatgaaccacactggagcaaccaggttctaggactttctcaatattctagtactttctgaacattctggaatcctccccacattctagaattctcccaactactagggaggctgaggcaggagaatcgcttgagcacaggaggcgttggctgcagtgagccaagatcacgccactgcactccagcctgggtaacaagagcgaaactatcgcc

SEQ ID NO: 61789 - DNA, 1910 bp, Homo sapiens
cggccgcgtagcccgcgcgcggagcgtaccctgctgcggccgttggccgttagcgcggcttcggcggttgtcttggagaagcaagatggcggcgacggcggccgcagtggtggccgaggaggacacggagctgcgggacctgctggtgcagacgctggagaacagcggggtcctgaaccgcatcaaggctgaactccgagcagctgtgtttttagcactagaggagcaagaaaaagtagagaacaaaactcctttagttaatgagagcctgaaaaagtttttaaataccaaagacggtcgtttagtggctagtcttgttgcagaatttcttcagttttttaaccttgactttactttggctgtttttcaacctgaaactagcacatattttaacttcttttctagctgcaaggtctcgaaggtcgagagaatttagcccgagatttaggtataattgaagcagaaggtactgtgggtggacccttattattagaagtgatcaggcgctgtcaacagaaagaaaaagggccaaccactggggaaggtgcacttgatctatctgatgtacattctccaccaaagtcaccagagggaaaaacaagtgcacagacaacaccaagtaagataccaaggtataaaggacaaggtaagaagaagacaagcgggcagaaggctggtgacaagaaggccaatgatgaggccaatcagagtgatacaagtgtctccttgtcagaacccaagagcaaaagcagccttcacttactgtcccatgaaacaaaaattggatcttttctaagcaacagaactttagatggcaaagacaaagctggcctttgtccagatgaagatgatatggaaggagattctttctttgatgatcccattcctaagccagagaaaacttacggtttgaggaaggaacctaggaagcaagcaggaagtctggcctcgctctcggatgcaccccccttaaaaagtggactcagctccctggcgggagccccttctttaaaagactctgagagtaaaaggggaaatacagttttgaaagatctgaaattgatcagtgataaaattggatcacttggattaggaactggagaagatgatgactatgttgatgattttaatagtaccagccatcgctcagagaaaagtgagataagtattggtgaagagatagaagaagacctttctgtggaaatagatgacatcaataccagtgataagcttgatgacctcacacaagatctgactgtatcccagctcagtgatgttgcggattatctggaagatgttgcatagacacgaagaaggaagtattctaattaacaaggacagaggactgaccggttccatttttttttttttccaaacaatcactcagctggaagggcggctctctattggggccttgcatttcaaaaaccctgcagattttttttaaaagaaattttcattttactaaacaaaatacttcctatttgagcccatggggggaaaatttaatattcttaatttaactgtacatttctttatggaaatggattatctacactcagtttcattacagggaaggaacccatgaaaacatcagtgttaagagcatgatgaaaggtgtcaataaagccgtaggatcgcgcaaccctttgtgtgtgtggctgctggtacgtgtgatctttgaaaaccttggctttagccctctggaatcagagcttacccaccatagtatattttgatattaggtggttctacacatagttggcaaaatgacttggtaaatttgtaatgctgaagtatattagtataagttaaatttgatgtgtcaactttattttgtatttccttccatttggaaggtttgttagaccattaaggttatattaaagtactcttgtgtgtgctaaaaa

SEQ ID NO: 61790 - DNA, 2024 bp, Homo sapiens
gagtcctgtgcacttatcttgggggaaacattgttccattcttagtaacatgcctgtttggcctgtggtctgaggtacttacaacttgctgcagtgtggtaatgtgtcccttttgaaacactgttctggggacttcagagatgacggactgcaacctaccacctcataaatgagggatctgaggtacaaactggaacccgggtcttctgggctcagagaactctcctcactacagcagactgcctgtttccatttaggggaatgagatgctctttcataaatgataccaagtgcaagagaacttaaggcagctccaatcgaagactgtcttggctgcttctggaaactacagatcactactcccgaagtcaaaaacgactagaacacagcttaaaaatcaagccatttaattgtatctttgaaggtaaacaatatatggagctggatcacaacccctgaggatgccagagctatgggtccagaacatggtgtggtattatcaacagagttcagaagggtctgaactctacgtgttaccagagaacataatgcaattcatgcattccacttagcaattttgtaaaataccagaaacagaccccaagagtctttcaagatgaggaaaattcaactcctggttttagagataaatgaatgaagagtaccaaaatatttgttgacttctcttcatttttctcatacaatctgaagcctgagctgactatcatatccccaactcacagcagcgaaagctgcagttcagatttgagatcagtctccattcacttccacgtagcaccacagcaagagtgaccggaggcagagagctcttgttgggtcagctttctaataagcatgtcaagtgaaaaagaaccctctagcagcacactgatttagtttgtaagattttaatttacaaattaaaaaagctatttaatacatgttttactttttctcctttttctcctctttctttacatcactcttttccttatctttatctttctccttgtcctctttcctatcctttttgctctcttctttctcctgcccttctttcttctctgcatcccggttggcaatcttgttgttgatgaggttgtgcagggcgaccacggaacggatcagcgaggccaagtacactaccaccatctggtcattggtcttcaggtaaaaggccttgacgaactcctgcaggctgacatctggcagcaggttgaagacgtcctgcagctggtagataatcttgttgttgatgggcagcttgcctgtggcgacttttttccaggtagcttcctgatatccagaagcttggagttcagtccctttcaaaaccatggaccctggtttggtgaatccgctggggacaagagtgcccaccgtccgtgtctttgatatctccgtaacaagtgttcaactcccaacttcctcagcttcctctgctccaatttcactggtcacgtgttcaaatgttttcgaggttggagttccatcatcatggactttcttccactgaaatgtacgcttctgtaggcagccctaggtccttcggcttcacatcaatgatgaccaatacggaattaggacagtatcttttcatgagttcgttgatggcaatgtcattccttgtgtaggttaaaggcctgtgtggtaccccgccaaactattctttcccatggcatttgaactttcttaaacattccatacatgttttccaaataatcatggtctaaaaaccatacagaatcgtctttgtcatcttcatcaaaaggaacctgcaaaactgtcgataacatcaagtactttcttttgccatgaccccaaaagcacaccaactacacgcttctggtttccaaccttgacgattcggttgaaatgatccaccacactgagcagcaccagggggtggaccaccaccttctgcactgccagctccggcatcgcgacacaccccgctcgccaggactggctccctgccacacgcaaacaccggcagcagtagcggtcaccggtaccctttttcc

SEQ ID NO: 61791 - DNA, 1238 bp, Homo sapiens
cccccttttttttttttttaaagttacagatagtatttaattggttactgtgatatcatagaaataccaagaatcataaaagtaaaaaaagctgctaagttgtacataatgtttccggaatactaagaagttgctgctggtctacagagccctgggaggtgacggtgaggatggtcccaagaggcgcagctagggtcactggccccggtcctggtgcctcttgcctttgcctttctttttcttgttctttggccgaggcttcaaggcgcaataaaacaggcggaccctccagcgatggccttgggcaggtcgacgcccctgctccacttgtcggcctcgcggtcgtacacctgcacggtcttggagaaggcagtgttctcccagctgtagccgcccaggatgtagatgcggccctcccacactgccacgcccgactcgctgttggcgtgcagcagcggcgccacgcgggtccactggttgcactgcgggctgtaggcctccacgcccagcacgtcgaagcgctccatggactcgatgttgtcatcgctgcccccgatggagtagatgctgtcacccaggctgcacatgctgtgccagccgcgcgccgtggtcatgggccgccgctcctcccacacgtctgtccggtggtcgtagcatagcaggttcttgcggtaggggccaatttggtagtcgtggccccccgagatgtacacgaagtctttgtagatggtgcccgcgtggccgtacgtgaaccttggcaagccggccacataggaccaggagtcagtcttgggactgtacgtctctactgaagagagcgctccgttctcattccggccgcgatggccaccagcatgtcttcgatggaggcaaggtagaaatccacacggcgctggttcatggaggccacctgaataaagagggcttcttcaggtgggagctctgagcccccgaggtttcaccaagatgctctgaatccccaaaagtgggatggagacgctctgagtccccaaaagggggatggagatgctctgaacccccgaacttgtctggtcatgtcgtcagccgcgtggatgggaactctgtggtcacaggggtcagaattgctgatctagtggctttatgaaataaaaattcatctttcctctccccacatcagatttgtaaagaaagagatgctctgccactccgtgttaacagagcaggacgtggcatgggacgcgtgggtcaacccaaga

SEQ ID NO: 61792 - DNA, 1869 bp, Homo sapiens
gcgcggcctcctgtctgcaccggcagcaccatgtcgctcacggtcgtcagcatggcgtgcgttgggttcttcttgctgcagggggcctggccactcatgggtggtcaggacaaacccttcctgtctgcccggcccagcactgtggtgcctcgaggaggacacgtggctcttcagtgtcactatcgtcgtgggtttaacaatttcatgctgtacaaagaagacagaagccacgttcccatcttccacggcagaatattccaggagagcttcatcatgggccctgtgaccccagcacatgcagggacctacagatgtcggggttcacgcccacactccctcactgggtggtcggcacccagcaaccccctggtgatcatggtcacaggaaaccacagaaaaccttccctcctggcccacccagggcccctgctgaaatcaggagagacagtcatcctgcaatgttggtcagatatcatgtttgagcacttctttctgcacaaagaggggatctctaaggacccctcacgcctcgttggacagatccatgatggggtctccaaggccaatttctccatcggtcccatgatgcttgcccttgcagggacctacagatgctacggttctgttactcacaccccctatcagttgtcagctcccagtgatcccctggacatcgtggtcacaggtccatatgagaaaccttctctctcagcccagccgggccccaaggttcaggcaggagagagcgtgaccttgtcctgtagctcccggagctcctatgacatgtaccatctatccagggaggggggagcccatgaacgtaggctccctgcagtgcgcaaggtcaacagaacattccaggcagatttccctctgggccctgccacccacggagggacctacagatgcttcggctctttccgtcactctccctacgagtggtcagacccgagtgacccactgcttgtttctgtcacaggaaacccttcaagtagttggccttcacccacagaaccaagctccaaatctggtaacctcagacacctgcacattctgattgggacctcagtggtcaaaattcctttcaccatcctcctcttctttctccttcatcgctggtgctccaacaaaaaaaaatgctgctgtaatggaccaagagcctgcagggaacagaagtgaacagcgaggattctgatgaacaagaccatcaggaggtgtcatacccataattggaacactgtgttttcacacagagaaaaatcactcgcccttctcagaggcccaagacacccccaacagataccagcatgtacatagaacttccaaatgctgagcccagatccaaagttgtcttctgtccacgagcaccacagtcaggccttgaggggatcttctagggagacaacagccctgtctcaaaaccgagttgccagctcccatgtaccagcagctggaatctgaaggcgtgagtcttcatcttagggcatcgctcctcctcacgccacaaatctggtgcctctctcttgcttacaaatgtctaggtccccactgcctgctggaaagaaaacacactcctttgcttagcccacagttctccatttcacttgacccctgcccacctctccaacctaactggcttacttcctagtctacttgaggctgcaatcacactgaggaactcacaattccaaacatacaagaggctccctcttgacgtggcacttacccacgtgctgttccaccttccctcatgctgtttcacctttcttcggactattttccagccttctgtcagcagtgaaacttataaaattttttgtgatttcaatgtagctgtctcctcttcaaataaacatgtctgccctccaa

SEQ ID NO: 61793 - DNA, 1604 bp, Homo sapiens
  misc_feature (1)...(1604): n = a,t,c or g
tttttttttttttgtgtttttttgttttttttttttttnttcgtggtattgcaaaataaatttatttgaagataaactgtcttataaaaggtcagaggcaatttgagatcccagattcagcttgtctcataaaaagattcaacttcaagtagcacaatttcttgtctgcttttaatcctgaacattcttgaagcacgaaacagccaactgtttacacaacacatctgtgacatctgactctggcaccagtggcgccgcagctttcagctctgaggccccacgggctgcagccctcagctttgggagggcccagatcaggccactgtgacctctggctttgccagcaacaacaggtcccagcatcccagcccttccctcccctggcacctcccaaaagcacaagaatgcaaaccgagactggcccaccactgaggcaggggtggactcccgcttgagtgtgccaacagggcgggtggactgtcctggtgacttcctggtgggcctggccaaccaagaggccaagtggcctcaccaggccttacctggctgcctggcagcccggagaggaaggaggaaggacgctcacggtgcgacagctctggccacgctggcgggagctacgtgatgatcctggcgatggcttgcagggaggggaagtcgtcgtcccgggcagcatgcagcgcctggtggctgctggcatcgccatgcgcgagcacctgctggcaggtggggcacacacggcagtccaggcccgcctgctgggtggtggcctgccacgcgctcttcttgttcttcttggacttggtgctcagaggcttctcgcggttgcagaagtccgtgtgtgcagacaggagctcctgctgcttggccgtgtcgggcagcaggaccagcagctcattaaagaccttctggaaattctcccccagcaggtcccggcaactcttgtaatactgggctgcggagatcaggccctgtctgaactcccctgagtggctcttgaactcgctgaagcgggcctcgtcgctctgcaggaagtccctgatggactggatgagctgaaggttcctctcccggaagttctcggggactaggtacgcccgtggggcaggcagcagcctgggtgcttttgtggtggtggtggtggcggggctggggacacaggccgggtgggggctaggcagaaggccagagaagccagggggcggcttgctgattgggggcaccaggcccggcgggggtgggggaggcgtgcccttcaggagcaccacagcgctgaagcctggggacggcggcatccggggtgggcaggggccgccgagcgctgggaagtcctcctgtggcgtggggcaggggaaggaccccaggggccttgggagcccagggggttccttgggggcactccgagcaggggccgggccctccgtgtgtccattaacgacgacggcaactggcccctcggctctgctggcaggagcttccggggcctgcaaagcccctgggggacaggtacgcggccgggggctgtggcaatgtggtgcctgaattatccgagccctctttcttcttcttcccaactttagcggacgcgtgggtcgaccagggaa

SEQ ID NO: 61794 - DNA, 650 bp, Homo sapiens
ctcgacccacgcgtccgttctgaactcgcttcttacctcacataattcctgccttaaaatgtttaaaagtaggaaaagccctttgtttggggctcagactttctggacatatgtccagctgggccagtgatgaccttaatagactctcctgaaccttttttggtctctccagtctttgattgtcctgtaacatttctgggggcttatccgggattggagatggcagattttctgtcttctttgcctgtgggctagagccccaggatgtgggagatctggggtccttggcaccgctgggagagtttcagcctggaaggagaatggccctcccgcattccagagccttcccctgacagcaccaaaggaaccagtggaaagggttgcaggacagtcacaggagcagtgcacagacatctgaaccatgttgcaggtatcataccttgggttcttcatagccagctgaaaccaacagcagccactgcccaggaccagtggaccagtcaacaatacccagaccacccaacacggctgatcctacagtgaaatcaagccactgctgacaagaacaactgaacaactgccctgctccaaccacaccagaggctgggtcagtccacgcatggctgaagcttaaggaaacatcgagcccc

SEQ ID NO: 61795 - DNA, 1361 bp, Homo sapiens
cagttcttaaacatatgacagcatatccatataaaaatgaaaaatctttcagctttatgcctctatcaaaggccaacacatatcttcatggaaacagttcctgtcaggcagggaggagtgagtgcctgaggaaaagttccaagtagtttataacaaaggcacaatattagaaagactgccatcaatcattctttagatttctttatcacatttttcaaaaataaacaaatcgaaccatatttgtagcaactcaaagtgcagcatagatttaaatgatgtatttgttcagctcactgatagggggcaaatactacattaatatattttcttcctgtcaagagttatttacatatgtacagtatttcagttaaaaatataacaccataaactatattttataggaaatcataagggaaggaaatatgcaggtctattaaagacttaagagcttctaataaactactttacttggagagggttggggggacttcagatcatacagtctgccatggagaaaagaacttgctggcagacagcctgatggttcagaggctccagtgcccagttagccacctggtctgcaatctttccacagacttactgatcaggcttgatcaggatggcccagccatccagaaaaagcccccatcgggttcagtcccttcggggtacagatggaaaaggcgtcaatcactgagtgcatagtatgaaaggttccaaaatctcccccagctggtataatacaatcagttccccttcaagttatggtaagccatatgtgccaagcatgaaataatcagattgcaactcatcacggaagtagttaattctgtttttctagtacagcagtgtctatgatattccgccgctttggttctagggctgcaaaaaaggaaacatcttggtcccggtctgactgcaatgctaagatggtctcttcaatgacttcaagatgagggttaccagcatttctaaaatacgccttttccaacagcatctgccttagggccttggctagcagaaccctcacgttgggcacaggatctgatgcgaggctcaggaggctgggaagcaggtgctccatgaactggtccacggggacacactccttgctcaccactgcctgctccaagaaagtcacagccaaagaaatgatgttttccgcagtcttctagaaacatacacttctttaatcccaaagaagtcgtttcagaatctgtaggtttgaggcgtgtgtatgaatttttaaatctcaagcactgatttggttagaaacacagttaatattttattataattcactaccaagcagtgggttccaagtaggttaagatctggtgagcttaggagtcagaagtcta

SEQ ID NO: 61796 - DNA, 1962 bp, Homo sapiens
ccgaggctataagagggcgcacaagtggcgcggcgcaggagccgccgccagtggagggccgggcgctgcggccgcggccggggcgggcgcagggccgagcggacgggggggcgcgggccccccgggaggccgcggccactcccccccgggccggcgcggcgggggaggcggaggatggaaacacccttctacggcgatgaggcgctgagcggcctgggcggcggcgccagtggcagcggcggcacgttcgcgtccccgggccgcttgttccccggggcgcccccgacggccgcggccggcagcatgatgaagaaggacgcgctgacgctgagcctgagtgagcaggtggcggcagcgctcaagcctgcgcccgcgcccgcctcctacccccctgcgcgccgacggcgcccccagcgcggcaccccccgacggcctgctcgcctctcccgacctggggctgctgaagctggcctcccccgagctcgagcgcctcatcatccagtccaacgggctggtcaccaccacgccgacgagctcacagttcctctaccccaaggtggcggccagcgaggagcaggagttcgccgagggcttcgtcaaggccctggaggatttacacaagcagaaccagctcggcgcgggccgggccgctgccgccgccgccgccgccgccggggggccctcgggcacggccacgggctccgcgccccccggcgagctggccccggcggcggccgcgcccgaagcgcctgtctacgcgtaacctgagcagctaccgcgggcggctgccgggggctgcggggtggcgccgcgacgagtcgccttcgctgccgaacctgtgcccttcccgccgccgccacccccaggcgcgttggggccgcggcggcctggctggcgcttcaaggacgaaggccccagacggtgcccgacgtgcccgagcttcggcgagagccccgccgttgtcgcccattgaaacatgacacgccaaggcgcatccaaggcgaagcgcaagcggctggcgcaacccgcaaattcgcgctccaaagcccgcaagccgcaagctgggagcgcaatctcgcgcactggaaagagaaagtgaagacccctcatagagtccagaacacggcagcctggcgtccacggcgagcctgctgcgcgagcaggtggcgcagctcaagcagaaagtcctcagccacgtcaacagcggctgccagctgctgccccagcaccaggtgcccgcgtactgagtccgcgcgcggggcgcatgcgcggccaccctccccaaggggcgggctcgcgggggggtgtcgtgggcgccccggacttggagagggtgcggccctggggacccccccctccccgagtgtgcccaggaactcagagagggcgcggcccccggggattcccccccgagggtgcccaggactcggaaggggcgccccggactcgacaagctggaccccctgctcccgggggggcgagcgcatgacccccccgccctcgcgctgcctctttcccccgcgcggccgccccgtgttgcacaaaccccgcgcgtctcggctgcccctttgttacaccgcgccgcggaagtggggctccgagggggcgcagcctcaaaccctgcctttcctttacttttactttttttttttttttttctttgggaagagagaagaacagagtgttcgattctgccctatttatgtttctactcgggaacaaacgttggttgtgtgtgtgtgtgttttcttgtgttggttttttaaagaaatgggaagaagaaaaaaaaattctccgcccctttcctcgatctcgctccccccttcggttctttcgaccggtcccccctcccttttttgttctgttttgttttgttttgctacgagtccacattcctgtttgtaatccttggttcgcccggttttctgttttcagtaaagtctcgttacgccaaaaaaaaaa

SEQ ID NO: 61797 - DNA, 913 bp, Homo sapiens
acccacgcgtgcgctctgattagcagcagatttattattctttcctcatttcatgttatacttaataaaacaaaacatacctgtatacacacacattcactcacattgaagatgcaagatgaagaaagatacatgacattgaatgtacagtcaaagaaaaggagttctgcccaaacatctcaacttacatttaaagattattcagtgacgttgcattggtataaaatcttactgggaatatctggaaccgtgaatggtattctcactttgactttgatctccttgatcctgttggtttctcagggagtattgctaaaatgccaaaaaggaagttgttcaaatgccactcagtatgaggacactggagatctaaaagtgaataatggcacaagaagaaatataagtaataaggacctttgtgcttcgagatctgcagaccagacagtactatgccaatcagaatggctcaaataccaagggaagtgttattggttctctaatgagatgaaaagctggagtgacagttatgtgtattgtttggaaagaaaatctcatctactaatcatacatgaccaacttgaaatgtccctcgtccacattttaggcttttatacagaaaaacctaagacaattaaactacgtatggattgggcttaactttacctccttgaaaatgacatggacttgggtggatggttctccaatagattcaaagatattcttcataaagggaccagctaaagaaaacagctgtgctgccattaaggaaagcaaaattttctctgaaacctgcagcagtgttttcaaatggatttgtcagtattagagtttgacaaaattcacagtgaaataatcaatgatcactatttttggcctattagtttctaatattaatctccaggtgtaagatttt

SEQ ID NO: 61798 - DNA, 2452 bp, Homo sapiens
  misc_feature (1)...(2452): n = a,t,c or g
aaactgagcactgtcccccaantgctttcttggcaatgaagttccgttgcctggctcctagaaattggtgaaatcagcaagacggaagaaggagtcaacttgggccaagccctgttggagaatggcatcatccaccatgtttccgacaagcaccagttcaagaatgagcaggtgatgtatcgcttccgctacgacgatggcacctacaaggcccgaagtgagctggaggacatcatgtccaagggtgtgaggctttactgccgtcttcacagcctctacaccccggtgatcaaagaccgtgattaccacctgaagacctacaagtcagtgcttcccgggagcaagctggtggactggctgctggctcagggagactgccagactcgggaggaggcagtggcgctcggcgtgggtctgtgcaacaatggcttcatgcaccacgtgctggagaagagcgagttcagggatgagtcccagtacttccgctttcatgctgacgaggagatggaggggaccagcagcaagaacaaacagcttcgcaacgacttcaagctggtggagaacattctggccaagcgcctgctgatcctgccccaggaggaggactatggctttgacatcgaggagaagaacaaggctgtggtggtgaagtccgtccagaggggctcgctggctgaggtggctggcctgcaggtggggaggaagatctactccatcaatgaggacctggtgttcctgcggccgttttcagaggtggagtccatcctcaaccagtccttctgctcccgccgccctctgcgcctcctggtggccacgaaggccaaagagatcatcaaaatccccgaccagccggacacactgtgcttccagattcgtggagctgccccaccgtacgtctatgctgtggggagaggctctgaggccatggctgcagggctctgtgctggtcagtgcattctgaaggtcaatggcagcaacgtgatgaacgatggtgcccctgaggtcctggagcacttccaggcattccggagtcggcgcgaagaggccctgggcctgtaccagtggatctaccacacccatgaggatgcccaggaagcacgagccagtcaggaggcctccactgaggaccccagtggcgagcaggcccaggaggaagcccaggctgattcagccttcccactgctgtccctgggtccccggctgagcctgtgtgaggacagccccatggtcaccctgactgtggacaacgtgcacctggaacacggcgtggtgtatgagtatgtgagcacggcaggcgtcaggtgccatgtgctggagaagatcgtggagccccgcggctgtttcggcctcaccgccaagatcctcgaggcctttgctgccaatgacagcgtcttcgtggagaactgcaggcggctcatggccctgagcagcgccatcgtgaccatgccccactttgagttccgcaacatctgtgacaccaagctggatagcattggccagaggattgcctgctaccaggagtttgcagcccaactgaagagcagggtcagcccacccttcaaacaagcccccctggagccccacccgctgtgtggcctggacttctgccccaccaattgccacatcaacctcatggaagtgtcctaccccaagaccaccccctcagtgggcaggtccttcagcatccgctttggacgcaaaccctccctcatcggccttgacccggagcaaggccacctgaaccccatgtcgtacacccagcactgcatcaccaccatggctgctccctcctggaagtgcttgcctgctgcagagggtgatccccaaggccagggtctccatgatggcagcttcgggccagccagtgggacccttggtcaggaagaccggggcctcagcttcctactcaagcaggaggaccgtgagatccaggatgcctacctgcagctcttcaccaagctggatgtggccctgaaggagatgaagcaatatgtcacccagatcaacaggctgctgtccaccatcacagagcccacctcgggtgggtcctgcgacgcatccttggctgaggaggcctcctccctgcccctggtcagtgaagagagcgagatggacaggagtgaccatgggggcatcaagaaggtgtgcttcaaggtggccgaggaggaccaggaggactcaggccacgacaccatgagttatcgcgactcctacagcgagtgtaacagcaatcgagactcggtcctgtcctacaccagcgtgagaagtaacagctcctacttgggcagcgacgagatggggtctggagatgagctgccctgtgacatgcggatcccatctgacaagcaggacaagcttcatggctgcctggagcacctctttaaccaggtggactccatcaatgctctcctcaaggggccagtcatgagccgggctttcgaagagaccaaag

SEQ ID NO: 61799 - DNA, 544 bp, Homo sapiens
cccacgcgtccgaggctctaactttctgttatgtcctcagtagcagagatgtcacagtggagaggagcccttggaatataatgagtatgaggaagttgtcacagctcaacattgactcagcatgtgttagctcccactggagggaaactccataaatgtaatgaatgtaggaaacacctcatccagagagttaacttttattcataccaaagaactctttgtctgtagtcagtgtggaaatgccttcagtgaccatttatcctttaaacaacaccgtgaattaacactggagagaagccatatgaatatgatctgtgtgggaaagccttcatttaatgatctcaccttagtcataatgagacaatgcacatggagagaaaccctataaatgtacagcatttggaacagccttcaacctcagccctaacctttataggtggtctcactcaagtttccatctatctgaaagatgccatcttttagataccagagagctcccacagggctaaaccctacacccttcaggcaaagctcaagccttgta

SEQ ID NO: 61800 - DNA, 2978 bp, Homo sapiens
agtcgacgatttcgtgccggcggctatttctattcccaggaaatccccgggccatctgtgaccaacaaaggcccgagcccccccacccccgcgagcccaacaacagggcccaacggcccctggctccggggtggggggatcgggcctggatcggctgccggtgcctgccagtgggggttaggcttgctgaggggcaggcacaggagtcctggctgagctcatggcctgaggctgcctagcggccacggggaatggttgcaatggcggaggcagaggcaggggtggcagtggaggtccgtggactgccccctgccgtgcccgacgagctgctcactctctactttgaaaaccgccgacgctctggagggggacctgtgttgagctggcagagactgggctgtgggggcgtcctcaccttcagagagcctgcagacgccgagagggtcttggcccaggcagatcacgaactacatggtgcccagctgagcctgcggccagctccaccacgagcccctgcacgcctgctgctccaaggactgccccctggcaccacgccccagcgcttggagcagcatgtccaggccttgctgcgggcctcggggctcccagtacagccttgctgtgccttggccagcccccggccagaccgggctctggtccagttgcccaagcccctttctgaggcagatgtccgtgtcctggaggagcaggcccagaatctgggcctggaggggaccttggtgtccctggcccgggttccccaggcccgagcggtgcgtgtggtgggggatggtgcctctgtggacctgctgttgctggagttgtacctggagaatgagcgccgcagtggtggggggcccctggaggacctgcaacgcctacccgggcccctgggcactgttgcctccttccagcagtggcaagtggcagaacgagtgttgcagcaggagcaccggttgcagggctcagagctgagccttgtcccccactacgacatcctggagcccgaggagctggctgagaacaccagtggaggggaccacccgtccacccaggggcctagggctaccaagcatgctctcctgaggaccggagggttggtgacggctctgcagggtgcagggactgtgacaatgggctctggcgaggaaccagggcagtcaggggcctctctgaggacaggtcccatggtgcagggtagagggattatgacaacaggctctggccaggaaccagggcagtcagggacctctctgaggacaggtcccatggggtctctgggacaggcagagcaagtcagctcgatgcccatggggtctctggaacatgaggggctggtaagcctgaggcctgtggggttgcaggaacaggaggggcccatgagcctggggcctgtggggtctgcaggcccagtggagacctctaaggggttgctggggcaggagggcctggtggaaattgccatggactcaccagagcaagaggggctggtgggtcccatggagatcaccatggggtctctggagaaggcagggcctgtgagcccaggatgtgtgaagctggcagggcaggagggcctggtggagatggtgctattgatggagccaggggcgatgcgcttcctgcagctctaccatgaggaccttcttgcgggcctgggagacgtcgctctcttgccacttgaaggaccggatatgactggctttcggctctgtggagcccaggcttcctgccaggcggctgaggagtttctgcggagcctgctgggcagcattagctgccatgtgttgtgcctggagcacccgggcagcgccaggtttctcctgggcccagaagggcagcaccttctccaggggctggaggctcagttccagtgtgtctttgggacagagcgcctggccacagccacgttggacacaggccttgaagaggtggaccctaccgaggccctcccagtgctccctggcaacgcccacaccctgtggaccccagacagtacaggtggtgaccaggaggacgtgagcctggaggaggtccgagaactgctggccaccctggagggcctagacctagacggggaggactggctgcctcgggagctggaggaggaagggcctcaggagcagccagaggaggaggtgaccccagggcatgaggaggaggagcctgtggcccccagcactgtggcacccaggtggctggaggaggaggccgctctgcagctggccctccaccggtcactggagcctcaaggtcaggtggctgagcaggaggaggctgctgccctgcggcaagccctaaccctctccctgctggagcagcccccgttggaggcagaagagcccccagatggggggactgatggcaaggcccagctggtggtgcactcggcctttgagcaggatgtggaggagctggaccgggcgctcagggctgccttggaggtccacgtccaggaggagacggtggggccctggcgccgcacactgcctgcagagctgcgtgctcgcctggagcggtgccatggtgtgagtgttgccctgcgtggtgactgcaccatcctccgtggcttcggggcccaccctgcccgtgctgcccgccacttggtggcacttctggctggcccctgggatcagagtttggcctttcccttggcagcttcaggccctaccttggcggggcagacgctgaaggggccctggaacaacctggagcgtctggcagagaacaccggggagttccaggaggtggtgcgggccttctacgacaccctggacgctgcccgcagcagcatccgcgtcgttcgtgtggagcgcgtgtcgcacccgctgctgcagcagcagtatgagctgtaccgggagcgcctgctgcagcgatgcgagcggcgcccggtggagcaggtgctgtaccacggcacgacggcaccggcagtgcctgacatctgcgcccacggcttcaaccgcagcttctgcggccgc

SEQ ID NO: 61801 - DNA, 609 bp, Homo sapiens
tgaccgttacctgtaccggacatgcccggagtcgacgatttcgtcagttaaaacagataaattcacccacagaaaacaattagggctctacgtggcacaactgtagttcacaaaagcaacctcctgaaatctgtccttaatgtaaacagccatcccactgcaaaaaaagttgccataaacttaagctatctaaatggacttcttcatttatctctttggcttctcctttaaaatgaaggggttctgaggacacattggggtttttcccagtcctttcttttaatcacctcacagaaaactttctccaaattggcagtgaagttctgactattcttgtagacacaggagcaaccatattggtcctcagccccaccagtctcaaccagccacggtgttggaataataaaaatattcaaatagtgggagtttctaataaaccattgacaacctttctgtcccagcccattactttttgccttggacgtttacaggatattcatccctttttattggtgaaatctgcttcagctcatttattgggacaagacttaaaacaaaaaataaaatcatgatgacatctctttctccttaaaagggagacataatttt

SEQ ID NO: 61802 - DNA, 3068 bp, Homo sapiens
ttttttttttttgatggttcaacaagtgtttattgagcagccacatctgccaggtcttgggatagccagtccctgtgctcatgggcttagatcctggcagaggcctagtggagaggcttggggtgggggtcggggcatggaaggctgtgctattggccagggactcagaatacaggagagtgcaagggtgacagaagtttctttcttgggcaaagaggcctggaaatggtggcttgaatctcaaccattccttagccttcccctctcaagccagagaaagacccaggtctcccctgcccagaaggtccatgcatagacattcattccgttgattcattccttaaccaagaaataaagagttgcactccttgcaggggctggtaaaagcaatgggctggaggaggcagctcaggggccggggaaggggtgttggctgcaaggttacaagagaaggggtagcactctcagaggcctgcttgacgggcgcctgggacttggctgatggggggcctttctggggcacagggtggtgggaatgtaattggagaggcttccagaggcacttggacttgagaggcctccatggagcctctgacagagtccccaggggggacaacatgctccaagagtctgggctctgccttcccctgcccccaccacggaagacatgtcaagctgggaagccatggaggagaaggggagggcaaaaaagttgttgagccactgggataaatgggaggagccccggagggagcggctgcgggatcgcacagcccctcgtatccggtggggtgggctgatgcccctttgccactgggataaatgggaggagccccggagggagcggctgcgggatcgcacagcccctcgtatccggtggggtgggctgatgcccctttgcagctgggcaggatgttcctgggcattggcaggatggttgaggggccctgtgatggcaggagtgctggcttggaccacatggggagaccaagtccgaataggggcccgatgcaattgagggtgcaagcggagggcatggcgaaggcggatggctctctgtgctctgtacaacaggtagcggatcccacggtggacggcagggcgctcctggtgatcaggaggctcgctgtgaggctcagcatcgggggtggcagcctgctcagcgggctggtggggaggccaagctggggggtggtatgtgccacagggcaggctggaggctccttgtgctctcagcagagactggactggcgaggagtgggctggcgaggagtgggctggcgaggagtgggctggcgaggactgtggctcggcggtctccatgggctccatgcacgagttttcggcatctgagtcttccgagctgctgatcaccacaacgcgttcctctccctacctgcctccccggcgccactggccacgtggttgctgttgggcaggaagacctcacttcctatgacggggctcctggggctaggcggtccatccaggtggggtggtgagactgccttggaggtgctgggcctgggctgctccggggagctccgagccaaccttgcctccttcccctcctcagactccatcttgatgaccttcctggggcactgggtctggctgcacttcctcttctgggctgtcgttgtattggagacatcctctccataggaagggcctttgatggagaaggcgtacactggcacggggtgtgccccgggcactgactgtaccacagccataggctgggcttcagcccaccccagggcctgaacctgggccttcactctctctgcctcctcgggcaggtcaacgtcaatagggtccctgggagtgctggcagcctctgggctggctttcttggatacagctgcatctttcccctgggtgatgcaagagctgaggtcctgcaggcgcaccttgaactcgtcgaagccatcggtgcgcacggcagcttgcaggctctggggctcctcctggcgcaggcggcagagcgcctggcgcaggaaaccgtgcatgtccagcacctcctggtccgaggcgtagcacttcatcctctgcaccagcgcgctgcccgtgcggatgcgctgcagcacagcatccaggcggcccagccgactggccatctcctcgtagtcgcgctggtaccgcgcgtccacagcctccagcagctcgcgctcctgagcccgcacgtgagctaccacctggggcacgcgctcgcggatcagctcctcggtctcggcacgcgcgcggcccagctggccgacggccgcgtgcatctgtgtgtgaaccgcgccaaaggcactatcctgctcctgcagcgcctgcgtcatggcgtccagctcctcctgtcgctgctggatctctgcgctgatgtcgcacttgagctcactgtggctgctgtcaaggagcgcgcacgagcagcacagcggcttggaacatcctcggcagtagatgctggtcagcgtaggggtgcggtggttggggttggagcagaagatgttgttggtcttgcgggtgccgtccaggaactcacgcaccgactggttgcgcagctctgctaggggccgggcctcgtgcttgaggaaccactggtgtgcctcgaagcacttggcgcagaggagctgctcgcactcaaagcaccaggaagtcggccgactctttgcagcgggtgcacacagcctgcgcatccacaatctgccggtacaccgacaggcgccgctgcagactctcgaaaaagacgttatccagggcgggtgtgtctgcacctaggggccagggcgcctggcagatggggcactgcatgcccgacgcctccaggcatcctgagcacagcgtgtgcagacaaggcagcagcttcgggcacttggcttccgcctggcattgctggcagcgcagaaactggaactcctcctccgaagcgggggctcgctctgtagggctggggctggggctgggctggcggccttcagagggggtctcggggggaggcatggtgggctcctggggccgggcggggtcctgctggggcctcggagatcgggcgggtgcaggctccatggaccccagcttag

SEQ ID NO: 61803 - DNA, 3043 bp, Homo sapiens
  misc_feature (1)...(3043): n = a,t,c or g
caggtgcagctgctcgagtctgggggaggcggggtccagcctgggaggtccctgagactctcctgtgcagcgtctggatttaacttcaggacctatggcatgcactgggtccgccaggctccaggcaagggactggagtgggtgacatttatatggtctgatgggagtatcaaatactataaagactccgtgaagggccggttcaccgtctccagagacgattcccggaacacattatatctgcaaatgaacagcctgagagccgaggacacggccgtatattactgtgcgaaaacagcggacgntgactacgtgcgggactactattattactacatggatgtctggggcaaagggaccacggtcaccgtctcctcagcctccaccaagggcccatcggtcttccccctggcaccctcctccaagagcacctctgggggcacagcggccctgggctgcctggtcaaggactacttccccgaaccggtgacggtgtcgtggaactcaggcgccctgaccagcggcgtgcacaccttcccggctgtcctacagtcctcaggactctactccctcagcagcgtggtgaccgtgccctccagcagcttgggcacccagacctacatctgcaacgtgaatcacaagcccagcaacaccaaggtggacaagagagttgagcccaaatcttgtgacaaaactcacacatgcccaccgtgcccagcacctgaactcctggggggaccgtcagtcttcctcttccccccaaaacccaaggacaccctcatgatctcccggacccctgaggtcacatgcgtggtggtggacgtgagccacgaagaccctgaggtcaagttcaactggtacgtggacggcgtggaggtgcataatgccaagacaaagccgcgggaggagcagtacaacagcacgtaccgtgtggtcagcgtcctcaccgtcctgcaccaggactggctgaatggcaaggagtacaagtgcaaggtctccaacaaagccctcccagcccccatcgagaaaaccatctccaaagccaaagggcagccccgagaaccacaggtgtacaccctgcccccatcccgggatgagctgaccaagaaccaggtcagcctgacctgcctggtcaaaggcttctatcccagcgacatcgccgtggagtgggagagcaatgggcagccggagaacaactacaagaccacgcctcccgtgctggactccgacggctccttcttcctctacagcaagctcaccgtggacaagagcaggtggcagcaggggaacgtcttctcatgctccgtgatgcatgaggctctgcacaaccactacacgcagaagagcctctccctgtctccgggtaaatgagtgcgacggccggcaagcccccgctccccgggctctcgcggtcgcacgaggatgcttggcacgtaccccctgtacatacttcccgggcgcccagcatggaaataaagcacccagcgctgccctgggaagtatgtagacggggtacgtgccaagcatcctcgtgcgaccgcgagagcccggggagcgggggcttgccggccgtcgcactcatttacccggggacagggagaggctcttctgcgtgtagtggttgtgcagagcctcatgcatcacggagcatgagaagacgttcccctgctgccacctgctcttgtccacggtgagcttgctatagaggaagaaggagccgtcggagtccagcacgggaggcgtggtcttgtagttgttctccggctgcccattgctctcccactccacggcgatgtcgctgggatagaagcctttgaccaggcaggtcaggctgacctggttcttggtcatctcctcccgggatgggggcagggtgtacacctgtggttctcggggctgccctttggctttggagatggttttctcgatgggggctgggagggctttgttggagaccttgcacttgtactccttgccattcagccagtcctggtgcaggacggtgaggacgctgaccacacggtacgtgctgttgtactgctcctcccgcggctttgtcttggcattatgcacctccacgccgtccacgtaccagttgaacttgacctcagggtcttcgtggctcacgtccaccaccacgcatgtgacctcaggggtccgggagatcatgagggtgtccttgggttttggggggaagaggaagactgacggtccccccaggagttcaggtgctgggcacggtgggcatgtgtgagttttgtcacaagatttgggctcaactttcttgtccaccttggtgttgctgggcttgtgattcacgttgcagatgtaggtctgggtgcccaagctgctggagggcacggtcaccacgctgctgagggagtagagtcctgaggactgtaggacagccgggaaggtgtgcacgccgctggtcagggcgcctgagttccacgacaccgtcaccggttcggggaagtagtccttgaccaggcagcccagggccgctgtgcccccagaggtgctcttggaggagggtgccagggggaagaccgatgggcccttggtggaggctgaggagacggtgaccagggttccctggccccagacctccatgaagtagtaataggatcataataatatgtccccgttataggggacgtcgcacagtaatagacagccgtgtcctcgactctcaggctgttcatttgcaggaacagggaattctgggaatcgtctctggagatggtgaatcggcccttcacggagtctgcgtaggatgtagtatcaccactactagtgatgtacgaaatccactccagcccctggcctggagcctgacggacccagttcatggcataatcatcaaaggtgaatccagaggctgcacgggagagtctcagggacctgccaggctgtacgaagcctccccctgactcctgcagctgcacctgacactggacacctcttaaaagagcaacgaggaaaacccagctcagcccaaattccatggtgagttctctgtgtgcagtcctgatcagcacgc

SEQ ID NO: 61804 - DNA, 6097 bp, Homo sapiens
acgtcagtgcagggggactcccagggcacccccacctccagccagggcagcatcaatatggagcactggatcagccaggccatccacggctccaccacgtccaccacctcctcgtcctctacgcagagcgggggcagcggggctgcccacaggctggcggatgtcatggctcagacccacatagaaaatcattctgcacctcctgacgtaaccacgtacacctcagagcactcgatacaggtggagagaccgcagggttccacggggtcccggacagcgcccaagtacggcaacgccgagctcatggagaccggggatggagtaccagtaagtagccgggtgtcagcaaaaatccagcagcttgtcaataccctcaaacgaccgaaacgaccacctttacgagaattctttgtcgatgactttgaagaattattagaagttcaacaaccggatccgaaccaaccaaagccggagggggcccagatgctggccatgcgcggagagcagctgggcgtggtcacgaactggccgccgtcgctggaggccgcactgcagaggtggggcaccatctcgcccaaggcgccctgcctgaccaccatggacaccaacgggaagcccctctacatcctcacttacggcaagctgtggacaagaagtatgaaggtcgcttacagcattctacacaaattaggcacaaagcaggaacccatggtccggcctggagatagggtggcactggtgttccccaacaatgatccggctgccttcatggcggctttctacggctgcctgctggccgaggtggtccccgtgcccatcgaggtgccactcaccaggaaggacgcagggagccagcagataggtttcttgcttggaagctgtggagttactgtagccttgactagtgacgcctgccataaaggacttccaaaaagcccaacgggagagatcccacagtttaaaggttggccaaagctgctgtggtttgtcacagagtctaaacatctctccaaaccgccccgagactggttttccacacattaaagatgccaataacgacactgcgtatattgagtacaagacgtgtaagggatggcagtgtgctgggtgtgacggtgacgaggactgcgctgctgacacactgccaggccctgacgcaggcgtgtggctacacggaagctgaaaccattgtgaatgtgctggatttcaagaaggacgtcgggctctggcatggcatcctgacaagcgtcatgaacatgatgcatgtgatcagcatcccgtactcgctgatgaaggtgaaccctctctcctggatccagaaggtctgccagtacaaagcaaaagtggcgtgtgtgaaatcgagggatatgcattgggcattagtagcacacagagatcagagagacatcaacctctcctctctgcgaatgctgatagtggcggacggcgcgaacccctggtctatttcttcttgcgatgcatttctcaatgtcttccaaagtaaaggccttcgacaggaggtcatctgtccttgtgccagctcgccagaggccctcactgtggccatccggaggcccacggatgacagtaaccagcccccgggccggggtgtcctctccatgcatggactgacctatggggtcattcgtgtggactcggaagagaagctgtccgtgctcaccgtgcaggatgtcggcctcgtgatgcctggagccatcatgtgttcagtgaagccagacggggttcctcagctgtgcagaacggatgagatcggggagctgtgtgtgtgtgcagttgctacgggcacgtcctactatggcctctctggcatgaccaagaacacctttgaggtgtttgccatgaccagctccggggctccgatcagtgaatacccattcataaggacaggcttgctggggttcgtgggtcccggaggcctcgtcttcgtggtgggcaagatggatggcctcatggtggtcagcgggcgcaggcacaacgccgacgacatcgtggccactgcgctggccgtagaacccatgaagtttgtctaccggggaaggatagccgtgttctcggtgaccgtgctgcacgacgagaggatcgtgatcgtggctgagcagaggcctgactccacggaagaggacagtttccagtggatgagccgtgtgctgcaggcgattgacagtatacatcaagttggagtttattgcctggccttggtgccagcaaacaccctccccaaaaccccgcttggtgggatccatttatcagaaacaaaacagctttttctggagggctctctgcacccctgcaatgtcctaatgtgcccccacacctgcgtcacaaacttgcctaagcctcgacagaagcagccagaaatcggccctgcctctgtgatggtggggaacctggtctctgggaagagaatcgcccaggccagtggcagagacctgggtcagatcgaagataacgaccaggcacgcaagttcctgttcctctcagaggtcttgcagtggagagcacagaccaccccggaccacatcctctacacgctgctcaactgtcggggtgcgatagcgaactcgctgacctgcgtgcagctgcacaagagagctgagaagatcgccgtgatgctgatggagaggggccaccttcaggacggcgaccacgtggccttggtctaccccccaggaatagacctgatagcagcgttttatggttgcctgtacgcaggctgtgtgccaataaccgtccgtcccccgcacccacagaacatcgcgacgacgttgcctaccgtcaagatgattgtggaggtgagtcgctctgcctgtctgatgacgacacagctgatctgtaagttgctgcggtccagggaggcggcggcggctgtggacgtcaggacgtggcccctcatcctggacacagatgattagccaaagaagcggcctgcccagatctgcaaaccttgcaacccagacactcttgcatatctcgacttcagcgtgtccacaactgggatgctagctggcgtaaagatgtctcacgcagccaccagtgccttctgccgttccattaagctgcagtgtgaactttacccctctagagaagtggccatctgcctggacccttactgtggactgggatttgtcctctggtgcctctgcagtgtgtattctgggcaccagtccatcctgatcccgccctctgagctggaaaccaaccccgccttgtggcttcttgccgtgagtcagtacaaagtccgagacacgttttgctcctactccgtgatggagctgtgcaccaaggggctgggctcgcaaacagagtccctcaaggcgcgagggctggacttgtcccgagtgaggacctgcgtggttgtggcggaagagaggcctcggatcgcgctcacacagtcgttctcaaagctgtttaaggacctgggccttcacccgcgggccgtcagcacctcgttcggttgcagggtgaacctggcgatttgcttgcagggaacctcaggacctgacccaaccactgtctacgtggacatgagagccctgagacacgacagagtccgcttagtggaaagaggatcccctcatagtctgcccctgatggaatcgggaaagatacttccaggggttcggattataattgccaacccagaaacaaaaggaccgctgggggactcacaccttggagagatttgggttcacagtgcccacaatgccagcggttatttcactatttacggagacgaatccctccagtcagatcacttcaactcaagactaagttttggagacacccagaccatctgggcacgcacaggctacttggggttcctgcggagaactgagctcacagatgcaaatggagagcgccatgatgccctctacgtggtaggggcactggacgaagccatggagctgcggggcatgcggtaccacccaatcgacattgagacctcggtcatcagagcccataaaagcgttacggaatgtgctgtgtttacctggacaaatttgttggtggttgtggttgagctggatgggtcggaacaagaagccttggacctggttcccttggtgaccaacgtggtcctggaggagcactacctgatcgtcggagtggtggtcgtggtggacatcggcgtcatccccatcaactcccgtggggagaagcagcgcatgcacctgcgagacgggtttttggcagaccagctagaccccatctatgtggcctacaacatgtagtctcgtctcttggcttccatggacttttctagagatgtagacattgttctccgtgtccactgaagcgtgcagacacagggcaacactcaccagaatacagccatttgtggtgagagtggaggaggaagaggaggaggaagaggacttctcacagcagccacgattggcatgggggtgaaatgtgaatttaccactgaatttcgctcagaaggactttggattactgccttcagtttgttggaaaagcccatttcaaaaactttcttttcttttctttcttttttaattattggataataagtgctttcttcgtaaatgtggtattttgttaagccgaaatagcaattaaaaaaatatcctgccctccagatgggttcttttaaacaatttatgtagtgtgacaaagaattgttttctctgttttaatgtgtcatgaaatcttaatgacatggatctgttactaatttaagccattgctagatctcatccttttaggaaagtttgaggtacgagaaaaccttccaaatagcaccttccaattagataatagcagctttctttgtcagaaatgtgctgaagaaacaaaggctggtatacggccttcgaagttagtatagaaggagaagaaattataaataaggtgtatttcggcaattatcttgcaaatatctttgtactaaactaaaaagataaaataagttaacttcctcaatatgtaattatgtacaaaacgtttaatttattttgatctctttagaactataaaagagaaaaacattcaagaatattaaagtcttgtaatgtttgctaatataaaaaagtgttgtattatcttgcgtggatagtatcacaacaaatatatatatatgaaatataaattcactaatgaacaaaggagattttaaagtttaagatgcagaacttgtcacttgcatggtgtgccccccgtactcacatacactctgctgttgccagcagtcgcagaccgcaggagccctgtctaaaagtttcttctagaaccagagaccagcaagtgaaattattgccatctcaaggatggcaaaagaattcaaagctcaatgtgcactatttttttctttgctgtgggacaacagtgaatgtgtttatgccagcgtgtgctgatgatactgaggggctttaggttggcaaatagcactgttttcttagctgcaagaattcattgcacaatgtttttcatcatttttgttaatgtcatctttttttggtccttgctacgaaaaggaatgcgattctgtggtcattcgcactgggttgcattgattccccctctgatggccaatgtggagtggacaaagtgtccggaactcacatcggtgatcgtcccctcgtcttaagacccagcccgctctgtgtgagcctctggggctccctcgctcagtgagcacagttccccgggggttcatgccagagctccggctgaagcaagaagtcctccagctgcgtcgtttgccgcctgtggacgagtgcgccccagtttctgccctggcagctcctggccacaccttctcagagctcacctgtgcacttctaaattgaattggcccacggtgtccaaccaagaaggagcatctgcactccgagaaagatgtgttctgtaactgccccagtgtgaccccgcagtggctctcggtgctagatatgcatgactaagattgatgctgggcaaaatgtagatgatctttcattatgttgtgggcagcgtctttctctgcctttgctatatgcagtcagcagtaagccttttgctaaaagagttttgtttgacttctgagatccaaggctgattgttgttaaaaaaaaaa

SEQ ID NO: 61805 - DNA, 1708 bp, Homo sapiens
caccctttttatccaggtcattgggttagctgacagggagccaagattgaaatctaagatctttgccctgcaggattcagggctaatggacatcctgagatgggaggaaggagctttcattacagccttgtgggtcttgactcaccagtccctgcaggagccagtggagttcctgccatggtgtccctgaggaggtgtagcttctcacctaccctgccgccaagcccctcagtctgggtcttcttttcccatgcagcctccagcccaggctgcatactatggctgtggcccagtgacacccacccagcctgcccccaggtggacatcccagccacctagaccttcctgtgagtgacccagccccttccactctcagactggcctattggtgtgggccccgtgaggcagtcataacacagggatgaaacctggctctgccacttcccaaggtgggtgacttcacttctctgagcctcagtttcctcttctgagcatgggcctgaatgagacgtgtgtaaagtaccaagcacagtggtgagccaatggaagacacgcagctagccaccagcagtcatcaccaaagatgcctctgatttgtgactctgaaaattcttgcaaagctgagaaggtgaaattcctctggctatattgttgaccaaaggccctcctctgtaagagtgaattgcacgctcacttgaaactatcttgagggactaaggtgtacaatcctggtgcttatgcagtttggggctctaggtagacacgagctggctttgaaattgtagattcctacactccccctttctggagttctgggtctaagtgaattgactcctatttctgttgtgaatgttgtagtttcccttcccattctcttggtggccctggaagcttctaggcacagtgtgccaccctgattattcccaccactccatccaacttttctctctctgtggtgtctgcaccacaagctgcctaccctccaggtgcctcaatggtccggccaccagttgtgcctcggcgccccccggcccacatcagcagtgtcaggcaggcctccacccaggtgccacgcacggtgcctcatacccagagagtagccaacattggtactcagaccacaggacccagtggggtaggatgctgtacaccaggccggccgctcctgccgtgcaaatgttcctcagcagcacatagcacctatcgggtccaggagccggctgtgcacatcccaggacaggagcccctgaccgcgtccatgctggctgcggcgcccctgcatgagcaaaagcagatgattggggagcgtctctacccccttatccatgatgtccacacccagctggctggcaagatcacgggcatgctgctggagattgacaactcggagctgttgctcatgctggagtctccagaatccctccatgccaagatagacgaggcagtggccgtgctgcaggcacaccaggctatggagcagccgaaggcgtacatgcactgaaaccagaaaaggaaatcctcgcttccatggctgccaaaaggacagtgtttctggctctcagccctaaggccctgcaaactctaacttatttcccaattagtctgtatctatacttgggctctgtatgtgaatgaaggttggtcacccatccagcctattaccttttgctttgtgtattaaaagtgctgcaaaatctgaaaaaaaaaa

SEQ ID NO: 61806 - DNA, 740 bp, Homo sapiens
cctcaaagctggtagctgccccatacttgggggcagaacccgcgtggcccgagcggggggcggggctcggcccatctccggccccttcggctccatctagtcccctccgactggcaaagagaagggattcctcggcgccgggcgcagcttaagagcgcagcgcagcaggctccattcccggccgccgccgctcagcccattacgcaaacctggcgggtccaaccaaccccgctctgccgccgctgctggaacccaggaggcgtgcttgcaggcttcgggcactacgcggggctggaaataccacgcactgccccttcgcctagacccccgctcgggccacgcgggttctgccctcaaagctggtagctgccccagacttgggggtggggggaggggaaggggcgaggctggcgccccctcccgcttttggctcccgcgttcgttgcagcagctgtcgccaaatgaaaccccagaatggggacgtgcaaaccctccacccccacccccagccacacacgtcgcggtcggagaactgagaagggggcgctgggtccgaggttctggaaaagcaagaactcacctgcaaacaggcagtccttctcagctctggacttctggatcacgacgtcgatatccttctgaattcgctcttgccttgaacacatccccattaaataaatccttggaaaagaagcagccgctatttccaccccacccccctcgcacgcgcaaaaaaaaaa

SEQ ID NO: 61807 - DNA, 1424 bp, Homo sapiens
tcgattacgccaagcttggcacgagggggctaatgaagcctagaccccagctggattggaagcaaaggcctttccttcactgggaaaggtgctgctgctacccatctcattattctaagagtgattgagaatagaggggctgaagggaaacgaaagtaggagaatgttggccagagctagtagagaaagaacgtaatattgagaaagcagacatcagtgctaggtgaggtgctttctttaaagagctgtgtgtatagactggggaggagtctgtctggggacaggaatgctgattcctttttttccctgggcagaatcctaatgtacctggctagctggtggtgagtaggggctttggggccaacttggtgggctccccaaggaaacccctttgaaaccaatggatgcattcacgggctcgggtctcaagaggaagtttgatgatgtggatgtgggctcatcagtttccaactcagatgatgagatctccagcagtgatagtgctgacagctgcgacagcctcaatcctcctaccactgccagcttcacacccacatccatcctgaagcggcagaagcagctgcggaggaagaatgtacgctttgaccaggtgactgtatactactttgcccggcgccaaggttttaccagtgtgcccagccagggtggtagctctctgggcatggcccagcgccataactctgtacggagctatacactctgtgagtttgcccaggaacaggaggtgaaccatcgagagattctgcgtgagcacctgaaggaagagaaactccatgccaagaaaatgaagctgaccaagaatgggacagtggagtcggtggaggctgatggcctgacgctggatgatgtgtcagatgaagatattgatgtggaaaatgtggaggtggatgattacttcttcctgcagcctctgcccaccaaacggcgacgggccctgctgagggcttctggggtccaccgtattgatgctgaagagaagcaagaacttcgagccatccgcctgtcacgggaagaatgtggttgtgactgccgactgtattgtgacccagaagcgtgtgcctgcagccaggctgggattaaatgccaggtggatcgcatgtcctttccatgtggctgctcccgggatggctgtgggaacatggcaggacgcattgaatttaatccaatccgggtccggactcattacctccacaccattatgaagctggagctggagagcaagcggcaggtgagccgcccagcagccccagatgaggagccctccccgactgccagttgcagcctgacaggagcacagggctctgagacccaggacttccaggagttcattgctgagaatgagacagcagtgatgcacctgcagagtgcagaggaactggagcggctcatggcagaagaagatt

SEQ ID NO: 61808 - DNA, 1087 bp, Homo sapiens; identical to SEQ ID NO: 61737
  misc_feature (1)...(1087): n = a,t,c or g

SEQ ID NO: 61809 - DNA, 1113 bp, Homo sapiens
  misc_feature (1)...(1113): n = a,t,c or g
ttttttttttttagaagcagaggctcaggctgagcccaggtttattatccaaaatcaaaatgaaatgcagtgattaaaggacacaaggcctcagtgtgcatcattctcattgtggctttcaggcggctgtggaagacagggtggggatggtggcttcgggaggtgaggtgctctgggacttgggcaagtcttaagcaagccattcctgctttctgggcctggctcccatgggccattagaaatgaaaatgctttgtggactgctgaggacggtgcaaggggtgaggtttccccagctcacccggatccatgggcccagcacccaggggcatcagcttctgcttttatgggtgggggtctgcaggtgggaagtcgtccttgggccttcaaaatgacctcatgggccctccctggaaggaggtcctcccccactggctgcctccacgcgctgccgccatgtggccagcttggggtcggcctttcgaagacttggcagccagcacccacgggatgcatcagctccgtaatggctacgaggtcagctaaggagatgtgaggcccagtaaggaaggccttgttctggaggaacttgtcctcgagcaactgcagggtcacatccaactctgccagggtgggctgccagtgtctggggagatactggctcacccaggaaaacagggaaccatcaccttatgcccacaaggcccggaggcagcttctccgcagagtcgtgtgctgccatgccaggtactcatccacacgggcacgggcctgcaggtcctgagggtaccagtagtcagggaccttatatttgcgcgtcaggtagagcaggatggccacactctccgtcaaggtgaagtccccgtccttcaaggctggcaccttcttgagggggttcacctgggcaaaggcatcgcttaagtgctgacctttaatcagatccacgatgcgcagctcgaagggaatgtcgttcttcttggcaaagatgtaaacagcgcggcagggctgggacagcaggtccaggtacagctccaggcccatagtggggaccgaccgacaaattccncgncnctggcctaaggtctcgatggnnntccattnnnnccggggggcg

SEQ ID NO: 61810 - DNA, 876 bp, Homo sapiens
agtctgcgaggaggaagtcgcctctgtgccccggagttcagaggtctaagacggcgcctccctctgtcgccaaagttggagtgcagtggcgcggtctcggctcactgcaagctccgcctcccggattcaagtgattcccctgccttagcctcctaagtagctgggattgcaggtgcccaccaccacacccggctaatattttgtattttaatagagactgggtttcaccgtgttgaccgggatggactcgatctcctgacctcgtgatctgcctgcctaagcctcccgaagtgctgggattgcaggcgtgagccaccacacctagctgatggtgccaagaacgaagaaggaagctcctgcccctcctaaagccgaagccaaagcgaaggctttgcaaggccaagaaggcagtgttgaaagatgtccacagccacaaaaaaaacaagatccacatgtcacccaccttccggcggcccaagacactgtgactccggaggcagcccaaatatccttggaagagcacccccaggagaaataagcttgaccaccatgttatcatcaagtttccgctgaccactgagtaggctgtgaagaagatagaaaacaacagcctacttgtgttcactgtggatgttaaagccaacaagcaccagatcaaacaggctgtgaagaagtttgtgacattgatgtggccaaagtcaacactctgattcagtctgatggagagaggaaggcatatgttcgactggctcctgactacgatgctttggttgttgccaccaaaattgggatcacctaaactgagtcaagctggctagttccaaatatatgtatatcttttcaccattaaaagaatcttaatctctcaaaaaaaaa

SEQ ID NO: 61811 - DNA, 3273 bp, Homo sapiens
ttttttttttttggttcattggaaaaggattttatttcaccataaaaatgcaaactggaataaacaccatctttcctaacgcgaacgttacagctatttttaggtatttctgagcttcacttggagaagcaaacgattataaaacaagtttgcagcctgaaatctgtttgaaacattccaagtaaaaataatttagcaaaacagcttcttaaaaaaaccacacacactaacctttactagaaaccaaagcttttaaccaatcttttttatgcttaattccttgacgttgtaaaaagtgaatgtttttgaaggagcatcagaccattttgtaccactccccacataccgacaccttagaaagaacggcccgtttgagttttgatcttaaaggacttgtaccttcctcatccgtgactcaatgtcagcacgacgattcggcatcccacccaaactgcacttcctgatcagttaacattacaaacgggggggaaagaatcaccagggcaacgctttcttttcagtgccagtgtgactatggtggcccgtgcacctcctaggccgtgcacgcagggaggtcgccaagcagacacagaaatccccgtgtgggggaatgcagcagctctgccatcctcacgactgtcggtctgtgcaattttcctgactgagagaggaccggccgcattaaagctatcggatcaagttttaaaggactacgtgtttgaaactgaagtgccaagtacgctgcggtgagtggagaaagatggatctctaaagcatggtgtcttccttcctgccggcgggctccgtggacattcgtggctgcagaagggtcttggctttgcaggggtggacggagagcggccaaggagcggccaggaggctcgagcaggtcctggtctttcccggacaggccgtggggaggccgtgcccgtcattacctgttccaggtactgcggtgcctgctcggggaccgggagcgcgaccgctcgcttcggcggcggtggcggctgtgcttcctgctggcgctgcccctccgctcccggctccgctccctccggtgcctgtctttgctgtgggacctccgggaccgggtgtggtccgggctcgtgctgcgccggcgggggctgtcatccttgtaggcgtgcttcttgtggggccgccgctccttgcgtgacttcctgtcctcccttgctgactggcccgccctggcccgggcttcctctccccgcttgtcccggttcagcaagccccgttctccggtggcccggccccgcgcccttgctgggctcccggttgcacttgtcctgttctgaccggttgtcctttctggagacattctgctcgcaggcagggatgcccttgggctgttggttgttgtcaggaatgcaggagaggacgccgcccgggcacctcttctctggagagccatcctcggggaccacacgacaggagctctgaacctccttgcatggggcctcctcggccacgctcccgttcacgcttttgggagcgccgtcggcctctgggtgggccgggctctccttgggggcaccggccgggggctggcccccgagggggtgcagcgtggtggcgctcacacagccggacgacacggtctgcaggatgtccaggacgggctgcagcaggtcggcgtgtgccacgcccagctcgtcgtgtgtgtggctgtcgtccggcttcttgctcagcaggatgctcagcagccgctcgcgcagctcccgctctttccgctgcaggcccagcgcgcgctccttctcctcctcctcgctccgcagctcggcctcctgcagccgccgccgctcctcctgctgctggagcctcagcttctcctccttctgctcctgttcccgtagcttcacagccatgaggtaaggactgggctgccacatgtctcaagcctcttgtcatgctcccttccgggggacttatcacaacttggctctgctgagcagctcggcgatgagccggatggactgcaggttcctctgggccagcagcagcttgcgctcctccagcttgatcttctcctgcagctgcttctgctcctccgcctgcagcttctccagcttcttctgattccggcgcagctcacggtccctctgcttctgctccctcttgcgaagcttctcttctcttttcctctctcgctccagctcttccagctccttttgtttcctttcctccgctcgctgcctctcctccgcttccttctctctgcgcttttgttcttctctttgctgctccagttcctgaagcttctgcctctccagctgccgcttcttaattgaggcatcactcaggtgtttggtcgaatcaaaagaaaccttgatgttgcaggccacggccttgccgtcctcgcccttgtacatgagtttcatcccgcgcagggcgctcatggcctggatgaagcccatgtactcacggtactgcacataggcctcgaagttcaagtgccccccgaaactgaaggtgtggaagttgcggcccggtcatctcctcccaggtaggggtccagcatggggatgtccacattccggatctccccgaacttctcaaacaccttgaccaggacgtcctcgctgggcttctcggagcccgactccttcagggcgaaccacttgcagggcagcccctccaggtggatggtgtccggccgctcccccggcagggtctcgttcatgtccttggcgtcgcggaagaaggagtcccagtcgtggcgggtggggaagtcgatcttgaactcggccgcgcgcaccttcaggatgtcggagaagaccgctgagcttgatggtcttgccgtccaggcaggccagaaaagacttgaccaggctcttgttctccacctccccctcgaagcggatgaagtccatggtgctcttggaaatacgcagcgtggagaactggtggttctgcaccatgcccttcagcctctccatcacctcccagttggagatggacttccccggctgcttcagctgcgggagtgccacgctgatggtcatcttggtgatgggcttcaggtacaagccgtaagcagggcagagctccacggcctcagacgtgtcgtgcacgatggtagccgctgccatagcctccgggaccttgggcctgcgcggggctccgcctgcgtcccaggccgccgccgccgctggcccaagctcccgccgtccctcgacgatccccggacaggcgcggcctcaccgccgggagccgccaccgtcccccggaggcgcctccgacgccgccaccgccgtc

SEQ ID NO: 61812 - DNA, 2599 bp, Homo sapiens
ttttttttttttaaagaaggaagaggttttttattcggccgggagcatcagcagactcgcgtcttgagagccgagctccccgaaaaagaaattcctagccctttgaagggcttacaactctaaggggtctacgtgaaagagtcataatagatcaagtaagtgtgaggaatgtgactgtgggctacctacatcagctaacagtacaaaaagttttacagtgctttctcatacaatgtctggaatttacagataacaccagtagttttggtcaggggttaatattattatcattctaaccaccagggccaggtggtggcgccaaggtcgtctagctatttatctttcttctgtttctttccaactttttgctttctcccttttctcctgtcttataaactagggaaaaggggaggttggggagaaactgagaaggacaacaggagaagtggtggtctcattccctatttcccccctttgagaattttcactttttagtgggagttctcactctcatcctcactttttgagtctctttgcgagatagagcgatagtgattcatataattcacgtgtgctgaagttttctgatgaaccaaagtagcaacaataccttttatcatttgaaaaagcaagggtaatacacaggggagcagcaagcaagttcttattactagcaatacacctacaatgagggttttaaatcctcctatagctggaaaccattttccaaataaagactcaggatcaaacttgtgccaaacctgtataggcacatgtgccaactttgtcatgtccctgactatgtttttaaccacctgtccttgatcatttatttgtaggcagcaattggttaagttaaattttctacaaactcctccttcagctactagcaagtagtctaaggccagtctattctgatagatagcattcctcatttgggtttcttgccaagctaaaacagtcaaagctctgccagtttcattagaaattatttctaagatggcctgcaaccgtatgatccaattgagcatgtagatgggttcggtatccccatgagccatcttgtgcccatgtggcaggcccataatactgaatgatcctttcacggggccactcattatctttccagtttcctataactatgcctttcttttctcgggaggcgtagacagagaaacctagcagctcacccatttttatgggtaataagaaaaaggatggcttaatagtgccaataacacaactgtctgcccatttattaggtaaccgaaagtaggctctgtgcctacatatctagtatagtccagagggaactgtccagtcctaatgagattctgcatgagcctaagcagtttttaatttagaaaatttactaaatggattcttttcagtgtggtttaggtcctactaagtaattgtctttgttgtgctgttatacaacttctgtcctatacaattaggctttcctacagggatgataaagtctttcccttctctagctatacagtattgtctaataattgaggtttttaggacctagaagttgctagcttcggccttctaaattggaattatatcaggagctggatcagtaggcaccaactctcaggcttcccaaggccatctgtctccgatagtggttcctccgcgtacataacaagaagtaccattaagtaagaaaattacattttctgctaattggagaaacaaattttttgtctttttcagaagttctggtgctggcagattcagctcctcataaaaggtttgaaatactggtttgggagagcacttgtggacctcccctttaattaaaatgacaacttgaggttttaaccctgtcctattgatccccagggttacacgttctccctttttccaatggggatctaggggattggtaattattagttctagtgggttacagtgaccggcagcacaggaggggttggcttctcccttctgaagataaaccgagtcatttttgttctttttttaagtagcctaaataacacatggccaataggcacaatttttacaaacccctgactcatgacaaacatatttattttctactctttagctcctttctcagttaagagaaccacatcctatttctagctttttactattaatggctgcacaagcatcaaatcttaaagttatttgcttggggatttctttttcttctgttctagttattattttacttgtatcacctagcaaaaggccagttcttatttcaaaaacggtggttgcagcgggctcagatgggttataacacgcatcaggtcggtcatttctcgggctacataccttgtactgagtggcattatacaaacaagtttccttttaatgtttccatacatttcataataactatagaacagaaagattggttttaaattgccggtcctacttcgggggacctggataaatacactggggaacagtccccagtttgagtaagatcagttgaagcccttactgtataagtccaaaatttaagaaaaatgaatctcatgatgagcttcttcaggcttcggcgtgcgtggaccagtcagcttccgggtgtgactggagcagggcttgtcgtctt

SEQ ID NO: 61813 - DNA, 771 bp, Homo sapiens
ggcacgaggtgctgctgctatgagctgcaccatcgagaagatcctgacagacgccaagacgctgctggagaggctacgggagcacgatgcggccgccgagtcgctggtggatcagtcggcggcgctgcaccggcgggtagcagctatgcgggaggcggggacagcgcttccggaccagtatcaagaggatgcatccgatatgaaggacatgtccaaatacaaacctcacattctgctgtcccaagagaacacacagattagagacttgcaacaggaaaacagagagctatggatttccttggaggaacaccaggatgctttggaacttatcatgagcaaatatcggaaacagatgttacagttaatggttgctaaaaaagcggtggatgctgaaccagtcctgaaagctcaccagtctcactctgcagaaattgagagtcagattgacagaatctgtgaaatgggagaagtgatgaggaaagcagttcaggtggatgatgaccagttttgtaagattcaggaaaaattagcccaattagagcttgaaaataaggaacttcgagaattattgtccatcagcagtgagtctcttcaagccagaaaggaaaactcaatggacactgcttcccaagccatcaaataactgaactctgaatgatggctggagattgtctatcaaggaaggaagttactgtcttcccattcaagtactgtccattaagtgtcttgcctcagatttgatttaatcttaattaaaggtatcaggtggca

SEQ ID NO: 61814 - DNA, 495 bp, Homo sapiens
catatgaccatcgattcgaggtccggtgcgttacattgcatcgactggaatgacactgccctgtccccacccaacttacttgccttgcaccacatttcgcacttcgctcatggcactgataagccgtgggtcgtagtcattttccagcacccattgcagtacgtcagtgtcgaggtaattccactggttacgcggtgccacaaacgccccgcgataacgtttcatttcaatcagccgcttcgccatcagcgaacggaacacctcacggatgatgttgcgcgaggttgcaaactcctcacagagttccgcctcagccggaagcggcgagcctggcacgtatttgccgtgaccagatctgtttacccagggtaatggcaatgcgttcggttttattgagagtcatggagagtccttgtgctcggtatgttcttctctactttcccccgatcgatgcataacgcggcatctttgtagtgccagcgtgatcacgttcgc

SEQ ID NO: 61815 - DNA, 1059 bp, Homo sapiens
gtttccttatttgttaatgtttttctttttttaaatcgctccttgtggagcagtgctaactcttaggcagtgcagctgagctgtcaacaactactgttatacagagaacataagaatgggtaattagaggaggtaggatattgttggtgcagctatattatttaaaattggtggaagtccaggccgagcaccgcggctcacacgtgtgatcctcaagaatctaacacacgaggagcgtgaccagtttctaaggggaactgtgcacacagacccagagggcaccttactaaactcaggagcaacagagtgagcatgtgtctcctctgacctggctaggagacagatccaggcatagaccctctgggctgctgtgggttcagccactggaggaggagatggatccaggcatagacctgccaggctgctgatgggttcagccaccgggggagacggacccaggcatagacccgccaggctgctgtgggttcagccactggagaaggagatggatccagtcatagacctgccaggctgctgatgggttcagccactgggggagatggatccaggcatagacccgccaagctgctgtgggttcagccactggaggagacggatccgggcatagacccgccaggctgctgtgggttcagccactggaggagacggatccgggcatagacccgccaggctgctgggggttcagccactgggggagacggatccgggcatagacccgccaggctgctgtgggttcagccactgggggagacggatccgggcgtagacccgccaggctgctgtgggttcagccactgggggagacggatcggggcatagacccgccaggctgatgtgggttcagccactggaggagacggatccgggcatagacccgccaggctgctgtgggttcatccactggaggagacggatccgggcatagacccgccaggctgctgtgggttcagccactggaggagacggatccgggcatagacccaccaggctgctgggggttcagccactgggggagacggatccaggcatagtcccttt

SEQ ID NO: 61816 - DNA, 2055 bp, Homo sapiens
tttttttttatattgtaaacaaatttaatgaccaaatgatagactggtaaaaaatgtgcctatcaccaagggctgatacctttcctgtggcccaggccctctgctctttaaaaatggggcacaaatacaggcaggtaagagacagacagctctcatcctgcactcttggctttctgagaggtatgaccccaaggtcctggagtctagctgctgcttcctcctctgggaaatagaggagtgatattggtagtacctagggcatagcactgctgggacaattcagtgatttggggactgatctccatatcaagatgacctgatcctgtctgtgtgcgggacagtggctagcacggagcccttgttaggcccgcctaccatctgacccttctcaaaccttcccgtctgaggacatctgcatgcacacttgtccctccaatgctgtctcactctggatggccctgacacctgagaggccagacagccaagtggtttctaggacctttgtgattctaggcctgggttcctgtttcatttctgcctctgatggccgagtggccttgaggaagcaacatctttccaggcctcctttgacccacttcactagttcatggggccatctgaggatccaacccggtgtcaggcacttcgctcgggcctgacagaggacagaagcgctccgtagcagaggctttcgttctttaatagtcgctctgagcatcttgtctgcctccatccagctctcactttccctgtctggctctaattctggttgacccagagggcatagctgaggctcggaggtcaggaaccgtggactccaggaggcagttttgagggtccttcaggcttggccacggcaggataccaccattccatctcagaggcatgaggagtccctaggccccgacttggtgacccttgccctgtgtgccccctcaacagtggccaggccctcctgtgtgtgtctgctgggggagcaggagccgggtgtgggggcatgggaaggcgggacgcctgggttcccacaggcccggtggctgagtcaccaggcggccatctggctcccattagcccagggcggcagggggctccatggggcgggccctgcggccagctgggggcagggacgctggggcaggctgtgtgtgggatgactcaggacccatgataacagcctgtgcgcatttggggagtgtaaacaggagagggagaggaaggcggaggaagggaaaattgtggttgggcagaggggggctggtggggctgagaagggtagagtcccccctccctctacactcaagctggcaggccccgtgatccacagcctgggtcctggggagagaagagagctgcccccatcctccctgcctggggtctcctccctcccctggggctgtattactcagtggtcagggttctgctgcctatagcagccaggtttgagggaagggggaagaaggggcccagagcctggagtgggggatcaaaacccagagataaaggctgagagacagacagagagggacagtgagagcagaggcctagagaggtggaaatgtacaagtagaaagaagaggcccagagtgaggcagaaggagagatgggaacctaacagaagcaaggaggctctgagtgtgagacacagcgcagacataaacagagagggggagacagacagcacgggaggcagctgcgctggggcctaggggtcagcaccggaaccaaactggccacttccagccacgaaaggccccgccagctggcctccggcaaggggaggactttcaccttgggccctgcggtggagacagagcctaaggcagagagagagggggagaaagggagagacagccagccagagcactggaaagagggagcgggggtagggagagagacagaaagacagaaagagacagaaagaagcccagacagacaccaagaaagacagaggcaggagacagggtgggagagatgagaaagggaaccccagaaacagtgggggtgggggttgtctgagatgagactagacccagtgagatggggggttggggtggg

SEQ ID NO: 61817 - DNA, 6613 bp, Homo sapiens
ataaccatttattagtcgaaagtgtttttaagcacagtcagggtgtaaacagtgcagcattcctgctcccctccgtgggagcagcgtctccttttcaattcatgtgactacagaaggcacttggtgaactgtgcgtgtctgaggtgtggaaaccaggagacgctgctcccacagtcagggtgtaaacagtgcagcattcctgctcccctccgtgggagcagcgtctccttttcaattcatgtgactacagaaggcacttggtgaactgtgcgtgtctgaggtgtggaaaccaggagagggggaaagaattctcaaaggcctgacgtgagaagttggaaaggtttgcaggttagggaatgaattgggagtgggggccggcggcacccatttcggtgactttctccccatttcatgtaaacagaattgccagggaccggttaccgtggatatgtttttctaaaaactcagtgtctgcacaatccattgatagaactggaggatgtgtctgtgtttcctgttgggtttttctcatctcttacatcatacaaacttcaatttttaccttgaatacaggggtagtaggggtggtggtggtggtggtggttgagacagggtctctgttgcccaggctggagtgcaatgatgcaattatagctcattgcagcctcgaagtcctgggctggagcgttcttcctggctcagcctccctagtagctgggaccacaggtgtgtaccaccacgcccagcttatttttaaattcttgtatagatgaggttttactacgttgcccaggctggagggtggtggtttttatattccttgtgtgaggggtgtctgtgatatttggaatttgagaatggatttagacaatgctaagtacagtctgctgggttttgctttgttctgggttgttgttgggttttttttgtttgtttgttttggtttttggttttcttgccgtggtgcaaaactgtagaaagttgcttattcactggccttggttccattgaagtctgcgtctcgagtgtccgtttcctcctcagaaccatctgcattttcaataactctacgtcctccagaccttctagaaggaacgaaagaggtctcgtttcctcgcctgagcttgctcttgagtgcgttcacctcgcggcccatggcctcgttgctctccgtggcctcatccagctcccgctgcagcttcctgcggttggcgttgatgcgctgggactcctcctctgcctcctccagctgcctcttgagctgcttgaccctggcattgcctttctctgcctgctccttgtactgctcggccatcttgcgctcgtcctccacctgcagcaagatttccttcagcttcttgtctttctgcttcagcgacttggtggccgcctgtttctctctggcctcctgctcgacctgctcctctagctgtgcaatcttggcctccagcgccgcgatggtggatttgaacttggacttgacggccccctccatctcgtggagcttgctccggagctccttgttctgccgctcgagctgctgccgggcactctcattcttctgggccgtgctgcgctctgtggccagctcgttgctgagctgctcggcctgctgtgtggctttgcggacccggtcgctcatggcctccatgttgccctgctcctcctccagctcctcctccagctgggcgatccgggcctccaggcggcgcttctcgtcctggagtgcgttccttcccgacaggctactggcccagctcctctgccagttcctccttcttcgaggtccgctttgtttgcgaccctcttcagcggcggcgaggtccttcttgtagctgcatgaggtcgtgcttccaagctcttggctttcttctcattctctttgggctgtggcaaaagatctcatctctggaggcacggggcatcttccagctctctttgaaagtccttcatctgagcctgcagtttgcgtagctgcttgatggctttccctcccctccctttgatggcagagtcggcctaaagatccaaggttcttacagggtcccatcccagctttatttttgctgcagctgccagggcacgttgctttcgctcgtcttccagttccgtctcatactcgtgaagctgtctctgcagatgccctcctgctcgtcctcattctgctcggttcgggcttggagataccctttcgaaactggcccttgaaggcgcctgcatgttgacttccagccgcagtttgggcgtccctccgtgggcttgcaagctcggtccttccaagctcttccaactggcgtcttcatctcctccaatctggggtctcccagggcccggcttggacttctcccagatcatgggacagttcttgcccaacgtcaatccttggaagctgacccaggtcttcccatttctggctttgagcattttgttggtccgctcgagttcctctttggcttccaaggcctcttcaagggcccgagcccagggacagggccttggtttccttctccctggcttctgcctcaactctgtccctctcatccgcgtatttggaagagatgtttttctcctcggctaacaactgatcaaatttcctctgcttcttttccaggttggacaccagttgccgctggttgtccaaatcaacaaccaggtcgtccagctcctgctgaagcctgttcttggtcttttccagtttatcatacgcggccgccttctcctcgtactgctgggtgaggttctcgatctccttctggaacctcttcttcccctcttccagagcttccacggtgctggcaaagtcctgcagcttcttcttcgagtcggagagctggatgttgagagtggagatgtggcgctccaggttctgcttggcctccatctcctcgtccagctggtcttgcaggctgttccgctcctcctccagctaggcgcagcgtacgtagacacgttgagcttctgccgggattcttcttgaagcagctcctgggtgtcctggtagctgggaactgagggacgccacgtccttggccagcttaatggccttcccctcggcctcgttaagcatcccctgtgacgctctcaacttcattctgcaggcttgtggactttgtcattgagctccgcccgggcccgctccccatcgctgcacttggactgcagctcctgcacctgcgcctgcagcttcttcattctatgttccacctcctgcttgggcctggcccaggacccgcagctccccggccagggtctgtgttctctttctccagcgtctgcttattcttgtctaggttcgccttggccctcttttgactgctcaagctgctctgtgagctcctccaccgcctgtgcgtgtttctgcctcatctcctggacctgagcctcatgggaccgcgtctcttcattcagggcccctcttcagcaccgtcacctcctgctccctcttggccctgagctcctgctgagtggctgtgctgtccagtgtgtcttccagctctgtctatagggcctccagctcctcgccgaggtctcgcttctgcttgtcagccttgttcctggcggcccgctctgagtccaggtcctcctggaggtctgagatgtggccctccagctcccggatcttcttcagggcattgttcttctgagcgatttcatcgtcaagcctggccagggccgcctgcagctcctcctccttcttggccagctgcatcatgagctatgcgatctgcgcctggaggtcagcgatctgctcgtggaagtcgctggcatcaccctccagcttccgtttcagcttctccagctcctgtcggctcttctcttccttctttagccgcacttccagttctgaaatcatagattcatgcttgtttttcagcttggtaagattcttggccttttcttcctcttctgcaagatttgtcgttaagtcactaatcctctcctcaaggagttttcgttcttttgatagtttattgttctgatcatccatgaccaggatctcatcctccagtttcttgatcttggcctcagccgtgaccttctcaagttgcagcttctgcctggcagcttcctcctcctccagctgttcttcaaggtccagcatctgctgggccatcttcttcctttcaagccggaactggtgggccctggttttcttcttcttccaggcgggcctccatttaatgcagtatttcctccagctcctgctttttggccgccagccgcacccgcatctcctcagcctctgcatacagcctctgtctctgcctgcagctgttcctgtagcaggttcttctcctcggtcagctgcgagtgcttctgttccagctccttaagctcattctctgccttctgctgccgctccttggtcttctgcagttcatcctccttggcctgcatctcctcctcctgccgtgtcacctgcagcagtggcttcactttggtgaaaagcctccaccactgccagttccgcagcttgaggtaggcggcgcagttcctctgaatcaccttcatggcggtcagctgctgctgcctcttggcaaaagcctttctggccaagtagccacgacacatcgcctggaaggccatgatgacatcggtgatcttcaaatctcgctcctcctctaggtgggccaggacgccagttcggaagaagattttgctctgccctatcctgtataagttggggtcaagttccagggctttgatcatgagaatgcaggcctgcttcccgtccatgaagcctttggggatggcattcgccgccaggatctcgtaccgttggcggaactcctggaagacgatccggttggggaagccctgccggcagatgcgaatgccttccagcaccccattgcaccgcagctgctccagcaccaggaacgcatccagcttgccggacctcttctcgtggttggggatgatgcagcgcacgaagttgggcgtggtgttgcgtagcgtggtcatcagcttgcccagctgctccttgtacagctgccccactgtgcggaacatgcccttcttggtcttggaggcgctgggcagcgagctctccgtcatcttggccatctggtccaggcccacgatgcggtccacgtccttccacaggtcggccacaaacttgtcggaggaggcattgagcagggaagtcacgttgtcattcagcgggtccatattcttggtcagccaggcactcgcattatagtctaccttcccagcataatggatgatggagaactcagtcttgtccttgagctgcttgggcttctggaacttggggtggctgccctgctccgtgcacagcttctccacgaaagacttgtccgtggctttggggaaccagcattcctcgtccagcagggccagcacacctggagggttgttcggtcgctcgatgagctcgatgcagggctgtaggtccagcccaaagtcgatgaagttccactcgatgccctcgcgctggtactcctcctgctccaaggatgaacatggtgtggttgaagagctgctgcagcttctcgttggtgtagttgatgcacagctgctcgaaggagttcacctcaaagatctcaaatccagctatatccaggatccccaggaaggaagccccttgccgatgggtcttgtccagggctttgttcacgcgggtgagtatccagcggaaaaggcgctcatatgttgccttggccaaagcctctacagcaaagtcagcctgttcttttgtctgagctttctgtaccacatctcgcccaaccttgatacgaggagtgaggatggatctggtgaaatctgtcacattaattcccatgaggtggcaaactttctgagcagctgtgttatctggcatggacgcctggtctgtgtttctttccttcttgaagacgatatttccaagctgcaggaccgatgataccaccttcaatatggatagctgctcctcctcgctgaaacccatgattgccatggcctccacagtttcctggaacatctcatcatcctgggctgctgggatgggcacaaagccattggagaggaaggtgtagttgttgaagccctccaaaagcaagtcacttctcatcttctccttggctccagcaatcatgtagtaaaagatgtggaatgtcctctcgtctctggcttggcgaattgcccgtgatttttctagcagataggtctcaatgttggctcccacgatgtaacccgtgacgtcgaagttgatgcggatgaatttgccgaatcgtgaggagttgtcgttcttcactgttttggcgttgccgaaagcctccagaatcgggtttgcttgtagaagctgcttttccagctctcccgtgatacttgtgtctttcttgcccttgtgggaggaggccaccacggccaggtactgaatgaccttcttggtgttttcggttttcccggctccagactcgcctgtgcatagaatggactggtcctcccgatcttgaagcatgctccggtaggccgtgtctgcgatggcgtagatgtgaggcggcatctcgtgcctcttcttgcccttgtacatgtcgacgatcttctccgagtagatgggcaggtgtttataggggttgaccaccacgcagaagaggccagagtacgt

SEQ ID NO: 61818 - DNA, 2462 bp, Homo sapiens
ttcccatcccacctcccgagccttcctcttcccgcagcacgcccggcccggcccggccgtggccctcctcagtgccggccgccatggcagaggcgtccggcgcggggaaaatctagcccggggatttcatgcggcctagctcggttccgcctcctcctcgcgcggccccagcggctgcccgcaccccagccccactccgggcctccgtgtctctcctgtgatcgcactgacacggccggggggttagaatggaacaaactgaaggcccgatgagagaaagggaaagttaaggatgctggagcagaacaatggatttctctttctctttcatgcaagggatcatgggaaacacaattcagcaaccacctcaactcattgactccgccaacatccgtcaggaggatgcctttgataacaacagtgacattgctgaagatggtggccagacaccatatgaagctactttgcagcaaggctttcagtacccagctacaacagaagatcttcctccactcacaaatgggtatccatcatcaatcagtgtgtatgaaactcaaaccaaataccagtcatataatcagtatcctaatgggtcagccaatggctttggtgcagttagaaactttagccccactgactattatcattcagaaattccaaacacaagaccacatgaaattctggaaaaaccttcccctccacagccaccacctcactccttcggtaccacaaactgtgattccaaagaagactggctcacctgaaattaaactaaaaataaccaaaactatccagaatggcagggaattgtttgagtcttccctttgtggagaccttttaaatgaagtacaggcaagtgagcacatgaaatcaaagcatcgaaagcagaaaagaaaagaggaaaaaaagcaacaagcatgactcatcaagatctgaagagcgcaagtcacacaaaatccccaaattagaaccagaggaacaaaatagaccaaatgagagggttgacactgtatcagaaaaaccaagggaagaaccagtactaaaagagggaagccccagttcagccaatactatcttctgttccaacaacggaagtgtccactggtgttaagtttcaggttggcgatcttgtgtggtccaaggtgggaacctatccttggtggccttgtatggtttcaagtgatccccagcttgaggttcatactaaaattaacacaagaggtgcccgagaatatcatgtccagttttttagcaaccagccagagagggcgtgggttcatgaaaaacgggtacgagagtataaaggtcataaacagtatgaagaattactggctgaggcaaccaaacaagccagcaatcactctgagaaacaaaagattcggaaaccccgacctcagagagaacgtgctcagtgggatattggcattgcccatgcagagaaagcattgaaaatgactcgagaagaaagaatagaacagtatacttttatttacattgataaacagcctgaagaggctttatcccaagcaaaaaagagtgttgcctccaaaaccgaagttaaaaaaacccgacgaccaagatctgtgctgaatactcagccagaacagaccaatgcaggggaggtggcctcctcactctcaagtactgaaattcggagacatagccagaggcggcacacaagtgcggaagaggaagagccaccgcctgttaaaatagcctggaaaactgcggcagcaaggaaatccttaccagcttccattacgatgcacaaagggagcctggatttgcagaagtgtaacatgtctccagttgtgaaaattgaacaagtgtttgctcttcagaatgctacaggggatgggaaatttatcgatcaatttgtttattcaacaaagggaattggtaacaaaacagaaataagtgtcagggggcaagacaggcttataatttctacaccaaaccagagaaatgaaaagccaacgcagagtgtatcatctcctgaagcaacatctggttctacaggctcagtagaaaagaagcaacagagaagatcaattagaactcgttctgaatcagagaaatccactgaggttgtgccaaagaagaagatcaaaaaggagcaggttggcttcctacatgtagagagttaaaacattgtatttgtaaatgttgtggcttacattcctgtcttaaaagaaagagaaactttcccccacactgagtttcctttctggactatcttaacgcttctgtcctggtgggttccagtgctcagttttaatacagccatccctgtgattctgcttcaagcattttcacagaaaacaggtttcaggagatgggaagccagtggtgcaagacttaaaaaatccttcacatttatttagaagtttctgttatcagcagaatgatttcatgtttttatgatttttatttggaaccatcattgagttcctttttttttt

SEQ ID NO: 61819 - DNA, 369 bp, Homo sapiens
cagcgtctggcagaaatgtcaaatgcaatagaaagaaaacacgccaagaaaatgagaaaccagcctaccaatgggactctgtcctctggctttgtggctgacagaggtgtaaagcaccacagtggaggtgaaaaacctttccaagctcaaaaacaagagcctcatcctggaacttcacgacagcggcaaaccagagtcaacccccattctctgcctgaccctgaagtgaatgagcagtcttactccaaagggatgtttagaaaaaagggaggatggaaagcaggtcccgagggcacgtctcatgagatccccaagtatataactgcttctacttttgctcaagcacgagctgctgaaatcagtgctatg

SEQ ID NO: 61820 - DNA, 984 bp, Homo sapiens
ttcacccgtgtgaactcgcctgtgctcaatcaggccggagatttgtctaaagaatttcccacattcgctgcactcgtatggcctttctccagtgtgaactgtctggtgtttaaagaggtcatagctttggctgaagaatttcccacattcgttacactcataaggcctttctccagtgtggattctctgatgccgagcaagtgtgtctttgcgggtgaaggctttcccacattcaccacacctgtgatacctctgtcccatgagaaagccactcacaagcttagtgctcttgtggggcttcatgctgctgagagaggcctgatgctgaagaaggccagatgtggctgaaaagtctctcctacctttcccacatgtgagggtcttctctggcacatggactctgcagcttttcacagagtctctgccctccttccttgggaaaagtttccctccattgggctggttctggtgctggtcaaagtctgtactgaaccagaattgctttccacatgccccacacaagtatggtttctgcctggcttttcccccatggtatttagccaggtgtaaggtatctttcaatattgggccacatatgtcacatgggtgagactccagctctgccatgagagtcctgacctctgacactcctgctacaaaaatgctctgctcaaaagatacctcttcatcctccactccatgccaacaacctgaagaacacacaaatgctgattaaatgcatatttacgggtgggaaggggcaacctcattgtatatgtgcatttgacacatgcaggaataagttcatgaaactgttttcagaatgagaggcatggtcagagtgaggaaggaatggctttgaggtagtgagcctctggaggtcataccatgggggagtgccaatgaagggccaggatataagaatggaaccaaacaaatggcttccagtagggccttgactgttagtgactcgtgagtgctatg

SEQ ID NO: 61821 - DNA, 1850 bp, Homo sapiens
cggcacgagaactggaaagaaagattgaaacggggtggtgaaattattcagagtactccctatgggcgccccgcaaatattagtgggagtacctcatcacaaagaatttatatcacttaccgaagagcctctgaaaacatgactcagaatacgttggctgtcactgacatatgtattattatacccagtaaaggagaaagcccaccacacacgttctgcaaagtcgacaagaatctcaataacagtatgtggggatcagcagtatacttgtgttataaaaaatcggtggcaaagacgaacactgtatcttacaaagctggcctaatttgtagatatcctcaagaagattatgagtcattctcactaccggaatctgttcctctattttgtttaccaatgggtgcaaccattgaatgttggccatcaaatagcaaataccctctgcctgtattttctacttttgttttaactggagcctcagctgaaaaggtttatggtgctgctattcagttttatgaaccatactctgaggagaatctcacagaaaagcagagacttcttttgggtttaacatcagcagatgggaagtctgatagttccaaaacaattcatactaacaaatgcatctgtcttctttctcactggcctttttttgatgcattcaggaagtttctgacttttctgtatcgttattccatctctgggcctcatgtccttccaattgagaagcatatttctcattttatgcataaagttccttttccatctcctcagagaccacggattttagttcagttatcaccacatgataatctgattctcagtcagcctgtgtcttcacctcttccactaagtggtggcaagttttcaacactactgcagaatttaggccctgaaaatgctgtgacactactggtgtttgcagtaacagaacataaaattcttatccattccctacggccatccgtgcttactagtgtgacagaagcattagtgtctatgattttccctttccactggccatgcccgtatgttcctctctgcccactggctttagcagatgtcttgagtgcaccatgtccattcatagtagggattgattcaagatactttgatctctatgatcctccaccagatgtcagttgtgttgatgtagataccaacactatttctcaaattggtgacaagaaaaatgtagcctggaagatacttccaaagaagccatgtaaaaatctgatgaacacactgaataatttgcatcagcaattggcaaaattgcagcagagaccgagagatgatggactcatggatttagcaataaatgactatgattttaattctggaaagaggttgcacatgatagatttggaaatccaagaggcatttttgtttttcatggcctctattttaaaaggttacagatcatacttaaggccaataacacaagccccatctgagacagccacagatgcagcctctctctttgccctacaagctttcttaagaagccgggaccggtcacatcaaaaattctataacatgatgaccaaaacacaaatgtttattcgcttcattgaagaatgttcttttgttagtgacaaagatgcaagcctggcattttttgatgattgtgtagataaagtggatatggacaagagcggtgaagtacgacttatagaactggatgaatctttcaaaagtgaacacactgtttttgtaacaccacctgagatcccccacctacccaatggtgaagaaccccctttacagtacagctataatggatttccagttcttaggaacaatttatttgaaagacctgaaggatttctacaagcaaagaagaacaa

SEQ ID NO: 61822 - DNA, 732 bp, Homo sapiens
cttcccaaatccttgggcctatcccggtctcctgtagtttcagaacaaactgcaaaaggccctatagcagctggaaccagtgatcactttactaaaccatctcctagggcagatgtgtttcaaagacaaaggatacctgactcatatgcacgacccttgttgacacctgcacctcttgatagtggtcctggaccttttaagactccaatgcaacctcctccatcctctcaggatccttatggatcagtgtcacaggcatcaaggcgattgtctgttgacccttatgaaaggcctgctttgacaccaagacctatagataatttttctcataatcagtcaaatgatccatatagtcagcctccccttaccccacatccagcagtgaatgaatcttttgcccatccttcaagggctttttcccagcctggaaccatatcaaggccaacatctcaggacccatactcccaacccccaggaactccacgacctgttgtagattcttattcccaatcttcaggaacagctaggtccaatacagacccttactctcaacctcctggaactccccggcctactactgttgacccatatagtcagcagccccaaaccccaagaccatctacacaaactgacttgtttgttacacctgtaacaaatcagaggcattctgatccatatgctcatcctcctggaacaccaagacctggaatttctgtcccttactctcagcca

SEQ ID NO: 61823 - DNA, 376 bp, Homo sapiens
ccgcgagagcttcgcggcgggagagcggctggtgtcgccggcttacgtgcggcagggctgtgaggcccgccgctcgcatgagcacctcatacggctgcttctggagaagggcaagtgtccagagaatggctgggatgaaagtacacttgaactctttttacatgaacttgcaatcatggacagcaacaatttcttaggcaattgtggtgtgggagaaagggaagggagagtggcatccgcactggttgctcgtcgtcattacaggttcattcatggcattggacgatccggtgatatttctgctgtgcaaccaaaagctgcaggctctagccttttgaacaaaattaccaattctttggtcctggacattataaag

SEQ ID NO: 61824 - DNA, 697 bp, Homo sapiens
ttttttttttttaggtatcaaacactggtttaatttgttatcatgttctttgtgcactttacactcatccacacttttacagcctttttgtaactggaaattggcatgtccatattttccatattttttcaaaatcgcttcttgaaaagaatctttaatgtcctgctctgcccaaaggtcttggggaaaatgagaacatataactgggggtttggctaccatctcatgtctctttatattccagggctcttttccttgctccagacaggtgatcaggtctggcttagtgagagcaatacccaagaagaccaggtttctgtagttctctaacatcactttcctatacaaaccctgctgagcactgtccaggcattgccactcctccagagagaattctatggccacatccctaaacgtcaatggccccttttcaaaataagactgcaccagaagactcctctcagccccagggcatccacttgctcccttgagaggacacattccatacctcgggtcatccatttctaggcttctagggggtcctggcgtcttagctgtggatctcccaatatctgcaggtcagagggccacacaggctaggcccctaggagcagaagacacagagaagtgagagcaaaacctggagctccggctacagcgagagacaaagaccccgccaaacccggaagccgcccag

SEQ ID NO: 61825 - DNA, 572 bp, Homo sapiens
ggcacgagaacccgagtgacacgttgaatttgccataatcaaggaaaccttttccgggtggggatctctgaaattactcagtgagcaaccctaattaacctgattttttgctgataatcactctcaatggaatcaaatcacaaatccggggatggattgagcggcactcagaaggaagcagccctccgcgcactggtccagcgcacaggatatagcttggtccaggaaaatggacaaagaaaatatggtggccctccacctggttgggatgctgcaccccctgaaaggggctgtgaaatttttattggaaaacttccccgagacctttttgaggatgagcttataccattatgtgaaaaaatcggtaaaatttatgaaatgagaatgatgatggattttaatggcaacaatagaggatatgcatttgtaacattttcaaataaagtggaagccaagaatgcaatcaagcaacttaataattatgaaattagaaatgggcgcctcttaggggtttgtgccagtgtggacaactgccgattatttgttgggggcatcccaaaaaccaaaaagag

SEQ ID NO: 61826 - DNA, 555 bp, Homo sapiens
gccaccaccactcacagcgctcggcgttcaggaagaggagcagcagcggaggcggctgcttcagcggcgggcgggcgccagaaaggccccgatcgaaaagcctgggagggccgccgaactacccccggagggaggagccagtccgaacccaaggcgccaccgccgcagaagcggagcgaggcagcattcgcctccatggcccactcgccggtggctgtccaagtgcctgggatgcagaataacatagctgatccagaagaactgttcacaaaattagagcgcattgggaaaggctcatttggggaagttttcaaaggaattgataaccgtacccagcaagtcgttgctattaaaatcatagaccttgaggaagccgaagatgaaatagaagacattcagcaagaaataactgtcttgagtcaatgtgacagctcatatgtaacaaaatactatgggtcatatttaaaggggtctaaattatggataataatggaatacctgggcggtggttcagcactggatcttcttcgagctggtccatttgatgagttccag

SEQ ID NO: 61827 - DNA, 474 bp, Homo sapiens
  misc_feature (1)...(474): n = a,t,c or g
agcttaaacccctgtcccaatgacgtcaagttcgcccgctggcttggaaggttcagacctatcttccatcagcaccatgatgccggcggtcatgagtgtagggaaggtcacagagaatggcgggagcccccaggggatcaagtccccctcgaagcctccaggaccaaatcggattggcagaaggaaccaggtaagtgttcacacctagtggtgacctctggtgggttcaatccatgagaacattgggagatgtttccgagtttcctatgataaaaccttggaagaattgggaataaaacggacatacccagaggccttgatcatttttcaagggcaaaatttttatgggcttatgttagtttcctttcatgggagaaggttttctttgctgtggtgttcgatgttggtgggaagtgcccttatttttggncccacccattgggatttttaantcaagctttcttcacttggatt

SEQ ID NO: 61828 - DNA, 498 bp, Homo sapiens
taaaccccctgagtctgagggatttggagacaggctgttccttaagcagagaatgagcttactctctcagatgacttcgtctcccaccgactgcctgtttaagcacattgcatcaggtaaccagaaagaagtggagagacttctgagccaagaggaccatgataaagataccgtccaaaagatgtgtcaccctctctgcttctgcgatgactgtgagaaactcgtctctgggaggttgaatgatccctcagttgtcactccattctccagagacgacagggggcacacccctctccatgtggctgctgtctgtgggcaggcatccctcatcgacctcctggtttccaagggcgccatggtaaatgccacagactaccatggagccactccgctccacctggcctgtcagaagggctaccagagcgtgacgctgctgctgctgcactacaaggccagcgcggaagtgcaggacaacaatgggaatacgccacatgtatt

SEQ ID NO: 61829 - DNA, 613 bp, Homo sapiens
ctggttgggacccgggaaggcctccctcttaaggtctttcccacacctctgcaccttgttacctgactttcggcttcaggatccgcagcgtgcacccgcgttccatctgtcttctgagactttgcccttctccaggaagagcactcaggagaccaggaaaatggccacagggctcctgagagccaaaaaagaggcctgagcaggcacgtggcagcatttggtagaggaaggagtgagccctgctgtaggaactatatatattggcgttcgtggcattcagggatgtggctgtgtacttcacccaggaggagtggaggttgttgagccctgctcagaggaccctgcacagggaggtgatgctggagacttataaccatctggtctcactggaaattccatcttctaaaccaaaactcattgctcagctggagcgaggggaagcgccctggagagaggagagaaaatgtccactggacctctgtccagaatcgaagccagaaattcaacttagtccctcctgccctctgattttctccagtcagcaagctctcagccaacatgtgtggctgagtcatctctctcagctgttttcaagtttatgggcaggaaatcc

SEQ ID NO: 61830 - DNA, 547 bp, Homo sapiens
cggcacgagactgcacccggccctcattttgaagattaaactgaaaaatctatataataagctttatatagagccaagtgcatacagctccattaatggtagtggcttttattattccaggaaaaggaaactatttgcaaagaatggatatgtaagagtatgccaggctctgaactacaagttgttcagtctggcttgtgagtaggttatatatagagagagaatggaagtgatccggagagctaggcagagaccacattatgaataatgaggggtctaccatcaagacttttctcaaagaggtgacagatagggtgccatttgacttcagagaaggaatgacctgagacctcatctgggctctcaagagctcttcttagaattcaagtctcccgtggaccacatgatttctcagtagaaagtgtacataccacacaatactccttgtatctttcgctcccaggatatgatggatgatatctgtcaggagcaatttctagagctgtcctacttgaatggagtacctgaaccctctcgcggacgtggg

SEQ ID NO: 61831 - DNA, 206 bp, Homo sapiens
ttttttttttttgggggaaaaaaccttttttggggaggtacctggttttggttaaaaggaccaaaacaagggggaaaaagggggtaaaaaaccttggccccggggggtggttttttggggggggggggactttcccacactttaataaaacaaccaacgttgtgggacaaaaaaattatttggtttaaaaaatgcctggcgaacgg

SEQ ID NO: 61832 - DNA, 357 bp, Homo sapiens
cggcacgagaaaatggaaatagctggtggatgccaccttcatcaagtgatcaaacttagcatcatcaacgctgggacaacattcctcccatctttggtctgacccaccaccccacttaaaagttccacagtctttgggttaggctggctttctccagaaatgttcaagtatggagtgataaagtcattgggagacatgaaaaattcaccatttttctcaatgcttgcatacttcaaaaatattgttataagctcagttggatctgctctctcagttaaagccaccttggcagccgccatgcttggccctgggtccagggggctgcgggacccactcactggcttgctcatgctcggc

SEQ ID NO: 61833 - DNA, 675 bp, Homo sapiens
caccaggggtggccctgagcgccggcgacacctttcctggactataaattgagcacctgggatgggtagggggccaacgcagtcaccgccgtccgcagtcacagtccagccactgaccgcagcagcgcccttgcgtagcagccgcttgcagcgagaacactgaattgccaacgagcaggagagtctcaaggcgcaagaggaggccagggctcgacccacagagcaccctcagccatcgcgagtttccgggcgccaaagccaggagaagccgcccatcccgcagggccggtctgccagcgagacgagagttggcgagggcggaggagtgccgggaatcccgccacaccggctatagccaggcccccagcgcgggccttggagagcgcgtgaaggcgggcatccccttgacccggccgaccatccccgtgcccctgcgtccctgcgctccaacgtccgcgcggccaccatgatgcaaatctgcgacacctacaaccagaagcactcgctctttaacgccatgaatcgcttcattggcgccgtgaacaacatggaccagacggtgatggtgcccagcttgctgcgcgacgtgcccctggctgaccccgggttagacaacgatgttggcgtggaggtaggcggcagtggcggctgcctggaggagcgcacgcccccatt

SEQ ID NO: 61834 - DNA, 508 bp, Homo sapiens
gtctgctgcccggggcccgcaggtggcaggccggtggggctggtacagcccgcgccgcctctgctgcagccgctgccgtctactccttgcgcgctggcactccgcagcctttaaggttcgcgcgggggccaggcaagagttagccatgaagagcctcaagtcccgcctgaggaggcaggacgtgcccggccccgcgtcgtctggcgccgccgccgccagcgcgcatgcagcagattggaataaatatgatgaccgattgatgaaagcagcagaaaggggggatgtagaaaaagtgacgtcaatccttgctaaaaagggggtcaatccaggcaaactagatgtggaaggcagatctgtcttccatgttgtgacctcaaaggggaatcttgagtgtttgaatgccatccttatacatggagttgatattacaaccagtgacactgcagggagaaatgctcttcacctggctgctaagtatggacatgcattgtgcctacaaaaacttcta

SEQ ID NO: 61835 - DNA, 491 bp, Homo sapiens; identical to SEQ ID NO: 8422

SEQ ID NO: 61836 - DNA, 551 bp, Homo sapiens
ccgggatcgcgctgatgtggccccaaccccgcctccctccccgccccgcgatgtcggaagaaacccgacagagcaaattggccgcagcgaagaaaaagttgagagaatatcagcagaggaatagccctggtgttcctacaggagcgaaaaagaagaagaaaataaaaaatggcagtaaccctgagacaaccacttctggtggttgccactcacctgaggatacacccaaggacaatgctgctactctacaaccatctgatgacaccgtgttacctggcggtgtcccttcccctggtgccagtctcactagcatggcggcatctcagaatcatgatgctgacaatgtccctaatctcatggatgaaaccaagactttctcatcaaccgagagcctgcgacaactctcccaacagctcaatggtcttgtttgtgagtctgcgacatgtgtcaatggggagggccctgcatcgtctgctaacctgaaggatctggagagccggtaccaacagctagcggtaaccctggactccagctatgtaacaaacaaacaa

SEQ ID NO: 61837 - DNA, 988 bp, Homo sapiens
  misc_feature (1)...(988): n = a,t,c or g
gtgtaggccagggggttggcggtgccgtgtcatggaggctcagtctctgagcagccattgaaggggaaggaactgcgggtgtgtgtgtgtatgtgtgtgtgtatgtgtgtgcgcgcgtgcgtgcgtgtgtgtgcgcgcgctagtgtgtggacaaggaggtgggggcagctgagttagagtcccaactcttggactccatttgctattctcttctttctcccccacacctatctggtggtggtagtgggcgtttatatttgcgttccttttcattcatttctaaatctcttaaaaattttgggttgggggtattggggaaggcaggaaagggaaaaggagagtagtagctgaagagcaagaggaggacatggagatgaagaagaagattaacctggagttaaggaacagatccccggaggaggtgacagagttagtccttgataattgcctgtgtgtcaatggggaaattgaaggcctgaatgatactttcaaagaactagaatttctgagtatggctaatgtggaactaagttcgctggcccggcttcccagcttaaataaacttcgaaaattggagcttagtgataatataatttctggaggcttggaagtcctggcagagaaatgtccaaatcttacctacctcaatctgagtggaaacaaaataaaagatctcagtacagtagaagctctgcaaaatcttaaaaatttgaaaagtcttgacctgtttaactgtgagatcacaaacctggaagattatagagaaagtatttttgaactactgcagcaaatcacatacttagatggatttgatcaggaggataatgaagcgccggactctgaagaggaggatgatgaggatggagatgaagatgatgaagaggaagaggaaaatgaagctggtccaccggaaggatatgatgaagaggaggaggaagaggaggatgaggatgaggatgaacatcatgattaggcangatcagaggtg

SEQ ID NO: 61838 - DNA, 329 bp, Homo sapiens
ccggaatgctgtttttggtatcaattcctcattgagttttatatacttttcaagggcagcatttgtttttttaacaattttagcgtccttaagatatttattttctttttccaggttgtcatttttcattgtgcatatttcctgtcggagtatagcaatatctgtcttcaaaatgcaattttcatccatcagatctttcatttcttcctgattatgaaaatcctaaataaaacaaaagaaagttttagctagtactcaataaaatatcatgattacctctgaagttaaagaataacctgcacatccatatactaaaaaggttactgtaa

SEQ ID NO: 61839 - DNA, 1445 bp, Homo sapiens
cggagcggggctctgaggagacactttttttttcctccctccttccctcctctcctcctcccttcccttcccctctcctcccctctctcctccttcccccctcggtccgccggagcctgctggggcgagcggttggtattgcaggcgcttgctctccggggccgcccggcgggtagctggcggggggaggaggcaggaaccgcgatggcgcctcagaagcacggcggtgggggagggggcggctcggggcccagcgcggggtccgggggaggcggcttcgggggttcggcggcggtggcggcggcgacggcttcgagcggcaaatccggcggcgggggctgtggaggcggtggcagttactcggcctcctcctcctcctccgcggcggcagcggcgggggctgcggcgttaccggtgaagaagtcgaaaatggagcacgtccaggctgaccacgagcttttcctccgggcctttgagaagccaacacagatctatagatttcttcgaactcggaatctcatagcaccaatatttttgcacagaactcttacttacatgtctcatcgaaactccagaacaaacatcaaaaggaaaacatttaaagttgatgatatgttatcaaaagtagagaaaatgaaaggagagcaagaatctcatagcttgtcagctcatttgcagcttacgtttactggtttcttccacaaaaatgataagccatcaccaaactcagaaaatgaacaaaattctgttaccctggaagtcctgcttgtgaaagtttgccacaaaaaaagaaaggatgtaagttgtccaataaggcaagttcccacaggtaaaaagcaggtgcctttgaatcctgacctcaatcaaacaaaacccggaaatttcccgtcccttgcagtttccagtaatgaatttgaacctagtaacagccatatggtgaagtcttactcgttgctatttagagtgactcgtccaggaagaagagagtttaatggaatgattaatggagaaaccaatgaaaatattgatgtcaatgaagagcttccagccagaagaaaacgaaatcgtgaggatggggaaaagacatttgttgcacaaatgacagtatttgataaaaacaggcgcttacagcttttagatggggaatatgaagtagccatgcaggaaatggaagaatgtccaataagcaagaaaagagcaacatgggagactattcttgatgggaagaggctgcctccattcgaaacattttctcagggacctacgttgcagttcactcttcgttggacaggagagaccaatgataaatctacggctcctattgccaaacctcttgccactagaaattcagagagtctccatcaggaaaacaagcctggttcagttaaacctactcaaactattgctgttaaagaatcattgactacagatctacaaaaaaaaaa

SEQ ID NO: 61840 - DNA, 351 bp, Homo sapiens
cgcggccgcgtcgacccgcgagggctgccactctccgcccctacctgagtgccgcgcgggccacattgcaggctgccctctgcctggagaacttctcctcccatgttgtggaacgacacaacaagccggaagtggaagacaggagtagcaaagagctcctgttacaacctgggaccatcatcaggaatgagaaggaaaaggttctgattgagggctccatcatctctggccgggtcagcattgctgtgaaacaggggtatgatatcagctttctgatcaccaactttcacacagagcagatgtacaaacaccagttggtggactttgtgatccacttcgtggaggaaattg

SEQ ID NO: 61841 - DNA, 680 bp, Homo sapiens
agctgtcccaacaactcctcccgggaccacttcagccactctcgacggtcgctgctgatggaacaaaagatggggctgcagccctttccacagtcctccagggctgggacgttcaggtagtgcacaaggacgatgtcagggttctgagagtataaggggacacacagagccatggggtcctgaggtccaggggcttggcttcctaatcctcactttcttcctgggcaccctcctaacctcgcccccaatttctgactctctccatccccaagcccctttctcttcttcccaggctcctttcctcactcagaactcagccatcctttcacttccttctttcagacccgtgtccctcaaagagtgtatctgtacccgtatgctgtttctaggtttattctctgttgatgcttaatagcatgatgaaaaactgagcagtttgtgctctgtgttttgtggggtgggggtttgttttgatttagtttttgatggaagtatttaagccaacttatatatgactgaggattaattctggcaggcaactctttgtattttgtattatacttcaaaatcttttcttcttcttcttctttacagtttaaatccaggaaaatgctttattgcaacttttacctgcctaaatgcttaacttattaccaagtttatcctttgtaactggttac

SEQ ID NO: 61842 - DNA, 713 bp, Homo sapiens
cgcgcccctgccgcggcccctagctcgcgcctcagctccctcccctttccgggcaggcccgtcccgtcagcaaggcagtgagcaccgcggccagcagagggcggtccggacccaagtctgcagcggcgccattggcgtgtggaaaatgccaccagatggcgggttaggattgcagctccgttgaaggcgcggcccccgctcccgaacccccggcgaccaccccgtaacaacccccccacatcgggaataacacaccggagacttttggggggaaactaggtcgatggtcggcggcgcccggatgggcagctgaggattgcctttgaggttattttaaaagttttgagttgtacagcacttgattattttgctgcattgtgaaaggacctctccagcaatgattacttcagaattaccagtgttacaggattcaactaatgaaactactgcccattccgatgctggcagcgagcttgaagaaacagaggtcaaaggaaaaagaaaaaggggtcgtcctggccggcctccatctacaaataagaaacctcgaaaatctccaggtgagaagagcagaattgaagctggaattagaggagcaggccgtggaagagctaatggacaccctcaacagaatggggaaggggagcctgtcacattatttgaggtggtgaaactggggaaaagtgcaatgcagagatgttgacctttctaat

SEQ ID NO: 61843 - DNA, 387 bp, Homo sapiens
atcacacgcaggcagcggaccacagcctctacaaccagctcagtggtgaaggcgcgcaaggtctgcacatctggaggaactgccctgaagaaggggaccagcttgatcgcaggaatagtcaggcaacagggatcaggctgagccctgcagccttttggaaacactagtaccagggtcggggcagggaggatgcctacagttcagacagatcctggatgttggtgactgtgacttccatttggaaaaccaggaactagggaaatcctcaagtcctaagatcttggagtaggagaatggtgggtggaagagaactcagtttagaaaaatatcaaaatttgggagtctgggaaggtgaaagggtccaggtggcacaatctctgggtttct

SEQ ID NO: 61844 - DNA, 736 bp, Homo sapiens
cttcccatataccaccttccaagtcatattctccaggtttaccaggtgtgaatatatcaattccaggcccatgttcttctggtgttggtttgtcttgaggaagatctggcatattttcatccaaaaggtctgctaaggattgagaatttgccagcagcttctggtaagacatagcaaattcctcatactgtttatgtctatcttcactgagctcccctttagaatgtagaatgcgcctgttttgtctctcagtattctggagctccctgtggtcccttttcaggtgtttggtcaaagacgtaaagtactcttttaaaagattctggaagggctgttgtttctctggactaattatctcactaggaggaaaactcaaattaaacttctctgcagcactctttactttccttggtacaagtccagcaatatcatctccacaatgtcgacagaaactaatcactacagagacatgagtgtgggactcccgatcagcattaataatattttttagctgttcatagattaaggaaagaccttccttgtcagtgaaaatcccaactattgtcaattctgcaataaaacgcaaatcagctcttaacttggcgatgttaggtgttttctcctctttccttgcttcaaaatgttttttccagacctgaagaagtgatggggcaaagtcagcataacgctggtgaaagagagagcagaggtgcacagcacagttcacatcagagag

SEQ ID NO: 61845 - DNA, 753 bp, Homo sapiens
cgcggccgcgtcgaccggtgctagcgacacgggagtggcaaacgcatcctcttgccgttcccggtgtttgggccttgcctgtgacggtgggaaaagaaaatggccttgctgtgctacaaccggggctgcggtcagcgcttcgatcctgagaccaattccgacgatgcttgcacataccacccaggtgttccggtctttcacgatgcattaaagggttggtcttgctgtaagagaagaacaactgatttttctgatttcttaagcattgtaggctgtacaaaaggtagacataatagtgagaagccacctgagccagtcaaacctgaagtcaagactactgagaagaaggagctatgtgaattaaaacccaaatttcaggaacacatcattcaagcccctaagccagtagaagcaataaaaagaccaagcccagatgaaccaatgacaaatttggaattaaaaatatctgcctccctaaaacaagcacttgataaacttaaactgtcatcagggaatgaagaaaataagaaagaagaagacaatgatgaaattaagattgggacctcatgtaagaatggagggtgttcaaagacataccagggtctagagagtctagaagaagtctgtgtatatcattctggagtacctattttccatgaggggatgaaatactggagctgttgtagaagaaaaacttctgattttaatacattcttagcccaagagggctgtacaaaagggaaacactgtatt

SEQ ID NO: 61846 - DNA, 550 bp, Homo sapiens
atctattcttgtccaatatctacctttatcaccaacagtatgtaaagtaatatgctaggttttataataatataaaatccaacaacaatcactgccactcagtgaaatcaacagacgtgccagagatactaaattcagcaacaaactatatgcaaaaacactgtcttcactaaaattttattcaggtatacgtcagataaaatagtatatagtttttccaactaccaactgatatcaaaaaaagctgataccattgaggcattacatggatgtttagctaaatctatagtgcttcttgatgctcttagttgtttttcacgttctcggcggttctcaaccttcttcctcgcaccagtcttttttttaggcattttcccctcgtgcgcgctccgggcaatcctcgctcactttcgccgggagaccggcctcactcaggggaccgagggacagggaatgggcgtgaggcccacccgcgacagcagtaaatccaactcgtggaccaggactccgggaaagaaggtactaacagccagggaggctgacagccgat

SEQ ID NO: 61847 - DNA, 330 bp, Homo sapiens
  misc_feature (1)...(330): n = a,t,c or g
tgaatatggaattaatttctaagaagctaaattgcccaaaaaagtagttttatttttaagtagtaaatttaagttacatatcactttctttaaattgcatttaatatgccaatttaaataaaatagcatttttcattcttaagtttattgggattgggtattaataaaaagtcatttacagcattgaaatcttttgggatgaatggatataggcatttttttttcttctcaggtatattcaagagcaaatgaccaagagccatgtgggtggtggttggctaaagttcggatgatgaaaggagaagtaagtactcttcacacttgctttgn

SEQ ID NO: 61848 - DNA, 732 bp, Homo sapiens
  misc_feature (1)...(732): n = a,t,c or g
gtgatggtgagagtgaagtctgtctcagacccagaagcacggaacctgtctggggtgccagaggccttgatggacgtagcatagaggaggagtctgggaggcaggccaggcttttgttgataccaagatatggagctgacgtgcacactcgcagtggccctacaagagatggtggctctttcccctggtgacaaagacagggtgcctggagactgcgtcaagacaaattctccggtgatatctgggagccagagtagcaggaggaagagaagctgcgctggggtttccatggttccctctgggtcctaacggaccctccagacccagatggtgtctcactgtggcatcctcaggcgaagctcctgcctttctgcagcctctacagggccagctcctgccttgcagtggcctctttaggccaagctcatgccccatggcgacttttccaggcacagcttttgccttttgcagcctgtccaggcccagaatgtccttaactcggcatctccaggacgagctcatcctcccagtgcgtctacaggcccatctcctgcctcacaacaacctcctttggcccaactcctgctgagctgctggcagcctctgtaggccacagacttcttaaagtaaagctttccaggcccaccttcggcctcccagcagcctcagcaatcaaacgaattccaccacgtggactaaggatctcgatnnnctggnnccccttaaaaaact

SEQ ID NO: 61849 - DNA, 396 bp, Homo sapiens
cacggggaagacgaactccgcacactgcatttgattaatgatttattttgattacgccgtcacagtgacgccttagagcagtccctgttcacccgggtcccagcctcgaccccgcacggacagcgagggaacttctgcaatgtcccatcaacctctcatctgcctcactgaaaaggaggacagccccagtgaaagcacaggaaatggaccccctcatttggcccatccaaacctggacacatttaccccggaggagctgctgtctctgacgactcatctcctgaccgacacccatcctctgagacagtccatgaagtttttgacatcgtcgctgatggggagactcgagaagcttctgggctggtgtgagagacatggctcgagaaggcccgttcc

SEQ ID NO: 61850 - DNA, 1169 bp, Homo sapiens
tagttgacgaaaacaaaaatgaatccaaaatagaaagagaacataaaagacggacatctacccctgttatcatggagggggtacaggaagagactgacacaagagatgtaaaaaggcaagtagaacgctcagaaatttgcaccgaagagccccagaaacagaaaagcacacttaaaaacgaaaagcatctaaagaaagatgattctgaaacaccacatttgaaaagcctacttaagaaagaggtgaaatcctccaaggagaagcctgaaagagagaaaactccatcggaagacaaattgtctgtgaaacataaatataaaggtgattgtatgcataaaacaggtgatgagactgagcttcactcttctgagaaaggtttaaaagtagaggaaaatattcaaaagcaaagtcaacaaacaaagctttcttcagatgataaaaccgaacgaaaaagtaaacataggaatgaaaggaaattatcagtattaggcaaagatggaaagccagtttctgaatatattataaaaacagatgagaatgttcgtaaagaaaacaacaaaaaagagagacgcttgtcagctgaaaaaactaaggcagagcacaaatcaagaaggtcaagtgattctaaaattcagaaagattctctgggttccaagcaacatggtatcacattacagagaagaagtgaaagttattcggaagataagtgtgatatggactccactaacatggatagtaatttgaaaccagaagaggttgttcacaaggagaaacgacgaacaaagagcttgttagaagagaaacttgtgttgaagtctaaatcaaaaactcaaggcaaacaggtaaaagttgtagaaacagaattacaagaaggtgccacaaaacaggcaaccactccaaaaccagacaaggagaagaacacagaagaaaatgactcagaaaaacagcgtaagtctaaagttgaagacaaaccttttgaagaaactggtgttgaacctgtattagagactgcttcttcttcagcacatagtacacagaaggattctagtcatagagccaagttaccattagcaaaggagaaatataagagtgataaagactccacttccaccaggcttgagagaaagttgtcagatggccacaaaagcagaagcttaaagcatagtagt

SEQ ID NO: 61851 - DNA, 398 bp, Homo sapiens
gcgagccgaagcggctgcatctggcgccgcgtctgccccgcgtgctcggagcggattctgcccggggtccccggagcggtcggcgccccgctgagcccgcgatcacttactccctgtgaccaaccggcgctgcaggttagagcctggcaatgccgatggagtgtgtgactctgggcgacaagaagaactataaccagccatcggaggtgactgacagatatgacttcgggacaggtcatcacgacgtgagtgccgggcctgtcagtgaggagttttgtgaaatcttccgggccaaggacaagacgacaggcaagctgcacacctgcaagaaggtccagaagcgggacggccgcaaggtgcggaaagctgccaagaacgagataggcattctcaagatg

SEQ ID NO: 61852 - DNA, 468 bp, Homo sapiens
agctgcacagcctgaatagaagggctggtccagcggcggcggaggctggcgctgtcctgagagggagggctctgtgcggaagagatgaatcggacaaagggtgatgaggaggagtattggaacagctccaagttcaaggcttttacctttgacgatgaagacgatgagctttcacagttaaaggagtccaagcgggcggtgaacagcctccgagacttcgtggatgatgatgacgatgatgacctggagcgagtcagctggagtggggaacctgtgggaagtatctcatggtccatcagagagactgctggtaatagcggctcaacccacgaggggcgtgaacagctaaagagccgaaacagcttctcctcctatgcacaactacccaagcctacttctacctactccctgagcagcttttttagaggtagaactagacctggaagtttccagtccctttctgatgct

SEQ ID NO: 61853 - DNA, 1093 bp, Homo sapiens
cgagcgcgagcgagcgtgatatgaggagaaagagagagagcagagagcgagcggagagcgaggtgtagagaaaccgagggggagagaacccgagtgtgtgtatgcgtgtgcgtgtgtgagcgcgagcgagcgagcgagagagaggagcgagagagtgtgagcgagaaagaataaaaggaaagaagattttctctatgtatataaagatggccacgttagcaaacggacaggctgacaacgcaagcctcagtaccaacgggctcggcagcagcccgggcagtgccgggcacatgaacggattaagccacagcccggggaacccgtcgaccattcccatgaaggaccacgatgccatcaagctgttcattgggcagatcccccgcaacctggatgagaaggacctcaagcccctcttcgaggagtttggcaaaatctacgagcttacggttctgaaggacaggttcacaggcatgcacaaaggctgcgccttcctcacctactgcgagcgtgagtcagcgctgaaggcccagagcgcgctgcacgagcagaagactctgcccgggatgaaccggccgatccaggtgaagcctgcggacagcgagagccgaggagaagatagaaaactcttcgtgggcatgctcaacaagcaacagtccgaggacgacgtgcgccgccttttcgaggcctttgggaacatcgaggagtgcaccatcctgcgcgggcccgacggcaacagcaaggggtgcgcctttgtgaagtactcctcccacgccgaggcgcaggccgccatcaacgcgctacacggcagccagaccatgccgggagcctcgtccagtctggtggtcaagttcgccgacaccgacaaggagcgcacgatgcggcgaatgcagcagatggctggccagatgggcatgttcaaccccatggccatccctttcggggcctacggcgcctacgctcaggcactgatgcagcagcaagcggccctgatggcatcagtcgcgcagggcggctacctgaaccccatggctgccttcgctgccgcccaaatgcagcagatggcggccctcaacatgaatggcctggcggccgc

SEQ ID NO: 61854 - DNA, 775 bp, Homo sapiens
atgctccggaccccgctggcgccccagcgagatgatcacggctcacagcgcgctttcggattgggaagcgcacgagtccagcaccaccgacgaggatctcgcaggccggagagcggcgaacgggagcagcgagaggggcggcgccgtcagcacccccgactatggggagaagaagctgccacaggcgctcatcatcggggtcaagaaaggagggacccgcgcgctgctggaggcgatccgcgtgcacccggacgtgcgggcggtgggcgtagagccgcacttcttcgacaggaactacgaaaaggggttggagtggtacagaaatgtgatgcccaagactttggatgggcaaataaccatggagaagactccaagttactttgtgacaaatgaggctcccaagcgcattcactccatggccaaggacatcaaactgattgtggtggtgagaaaccccgtgaccagggccatctctgactacacgcagacactgtcaaagaaacccgagatccccacctttgaggtgctggccttcaaaaaccggaccctcgggctgatcgatgcttcctggagtgccattcgaatagggatctatgcgctgcatctggaaaactggctccagtatttccccctctcccagatcctctttgtcagtggtgagcgactcattgtggaccccgccggggaaatggccaaagtacaggattttctaggcctcaaacgtgttgtgactgagaagcatttctatttcaacaaaaccaaggggttcccttgc

SEQ ID NO: 61855 - DNA, 1416 bp, Homo sapiens
gaacagggagcagacgttctgcaagtagggagcacttcatgagtggcaagtgtggtgtctctggtggtgttccaacggacactccctctggaatgtcatgagaattaaaaactggggcataagggaagaagatggctgagaatggagcctcggtttctatgtctgtaaaacaactgccaggaactcctgccaccgccaccggctcccatggcccacatacccagtgggggtgccccagcagcgggggcagcccccatgggcccccagtattgcgtgtgcaaggtggagctgtcagtgagtggccagaacctactggaccgggatgttacctccaagtccgaccccttctgtgtcctctttacagagaacaatggcagatggatcgagtacgacaggacagaaaccgcgatcaacaacctcaaccccgccttctccaagaagttcgtgcttgactaccacttcgaggaggtacagaagctcaagttcgcgctctttgaccaggacaagtccagtatgcggctggacgagcatgacttcctgggccagttctcctgcagcctgggcacgatcgtctccagcaagaagatcactaggcctctgctgctgctgaatgacaagcctgcggggaagggcttgattacgatcgctgcccaggagctgtccgacaaccgcgtcatcacactaagcctggcgggcaggaggctggacaagaaggacctctttgggaagtcagacccctttctggagttttataagccaggagacgatggcaagtggatgctggtccacaggactgaggtgatcaagtacacactggaccctgtgtggaagccattcacagtgcccttggtgtccctgtgtgatggggacatggagaagcccatccaggtcatgtgctacgactatgacaatgacgggggccatgacttcatcggcgagttccagacctcagtgtcacagatgtgtgaggctcgagacagcgtcccgctggagttcgagtgcatcaaccccaagaagcagaggaagaagaagaactataaaaactcgggcatcatcatcctgcgatcctgcaagataaaccgagactactccttccttgactacatcctgggaggctgccagctcatgttcaccgttggaatagactttacagcctccaacgggaatcccctcgacccttcctctttgcactatatcaaccctatgggcaccaacgaatatctgtcggccatctgggctgttgggcagatcattcaggactacgacagtgataagatgtttccagctctgggattcggggcccagttacccccagactggaaggtctcccatgagtttgccatcaacttcaaccccaccaaccccttctgctcaggtgtggatggtattgcccaggcgtactcagcttgcctgccc

SEQ ID NO: 61856 - DNA, 474 bp, Homo sapiens
cactggtcccaccatcaagaatatggatggcacatttaatgtcactagctgcttgaagctgaactcctctcaggaagaccctgggactgtctaccagtgtgtggtacggcatgcgtccttgcatacccccttgaggagcaactttaccctgactgctgctcggcacagtctttctgaaactgagaagacagataatttttccattcattggtggcctatttcattcattggtgttggactggttttattaattgttttgattccttggaaaaagatatgtaacaaatcatcttcagcctatactcctctcaagtgcattctgaaacactggaactcctttgacactcagactctgaagaaagagcacctcatattcttttgcactcgggcatggccgtcttaccagctgcaggatggggaggcttggcctcctgagggaagtgttaatattaatacatattcaacaactgtatt

SEQ ID NO: 61857 - DNA, 492 bp, Homo sapiens
aagaggtagtgagcggtgtttcaggatgtgagggcccgcaggagccgagtcaggctctctccactgcctgcccgccaccgtgcaagctctggccggcgctgcccacagtccccatggtgggcagcccccgcggcggggacccctgatcggcagcggcatgccagggaagcccaagcacctgggcgtccccaacgggcgcatggttctggctgtgtcagatggagagctgagcagcacgacggggccccagggccagggcgagggccgcggcagctctctcagcatccacagcctccccagtggtcccagcagccccttcccaaccgaggagcagcctgtggccagctgggccctgtccttcgagcggctgttgcaggacccgctgggcctggcttacttcactgagttcctgaagaaggagttcagcgcggaaaacgtgactttctggaaggcctgcgagcgcttccagcagatcccggccagcgataccca

SEQ ID NO: 61858 - DNA, 596 bp, Homo sapiens
caagcttatatccttaatcacctaaagatcagagtgtgaagaaacaaacctgtgacagatctgtggttgaggtttagactacgggaggagtatattacctgactttctttgtaacttgtaccatgactggggcagagattgagcctagtgcccaggccaagcctgaaaagaaggctggggaagaggttatcgctgggcctgagagagagaatgatgtccctctggtggtcagacccaaggttaggacccaggcaactactggggcaaggcccaaaactgagaccaagtctgtgcctgcggcaaggcccaaaactgaggcccaagcaatgtctggggcaaggcccaaaactgaggtccaagtaatgggtggtgcaagacccaaaacggaggctcaaggaatcacaggggccaggcccaaaaccgatgccagggcagtaggtggcgctcgttctaaaactgatgccaaggcaatccctggagcaaggcccaaggatgaggcccaggcatgggcccagagtgaatttgggactgaagcagtgtcacaggcagaaggagtgtcccagactaatgccgttgcttggccactggccactgcg

SEQ ID NO: 61859 - DNA, 1164 bp, Homo sapiens
gcccataggggaagatggcggctgctcctttggaggagcgggattgagaggatcggggtggggagaccaaacaagagagacatttctggctctgaaggcgaacgcttcgctggccatttaggagctctgctcaaagccagacgtatcctagaaggaaaacatcaccatggctacagaaattggttctcctcctcgttttttccatatgccaaggttccagcaccaggcacctcgacagctgttttataagcgacctgattttgcacaacagcaagcaatgcaacagcttacttttgatggaaaacgaatgagaaaagctgtgaaccgaaaaaccatagactacaatccatctgtaattaagtatttggagaacagaatatggcaaagagaccagagagatatgcgggcaattcagcctgatgcaggttattacaatgatctggtcccacctataggaatgttgaataatcctatgaatgcagtaacaacaaaatttgttcggacatcaacaaataaagtaaagtgtcctgtatttgttgttaggtggactccagaaggaagacgcttggtcactggagcttctagtggggagtttaccctgtggaatggactcactttcaattttgaaacaatattacaggctcacgacagcccagtgagggccatgacgtggtcacataatgacatgtggatgttgacagcagaccacggaggatatgtgaaatattggcagtcgaacatgaacaacgtcaagatgttccaggcacataaggaggcgattagagaggccaggtttatacacaatataccattttctgtagtccctattgtcatggttaaattattctctaagtgtattctgggtgcagagatgcatgggctctgtcagtttctgggaaactttctgcaccctataaacacaatatttttctttgttttcacacattcaccattttgctgggcacctttctgaagtagtgttgtcccggtatcagcctttgcaatatgttagagatgtactgtctgccgcattttgcactggttttctcttttcatttatgattaataatgtgtatacgttattcctttttattatctactgtgtaagacaagaatatttcattccaaataaagaattcagtctttaattatgaaaaaaaaaaa

SEQ ID NO: 61860 - DNA, 326 bp, Homo sapiens
attctagaatgcatgaggaaccttggggctcacaaagtccaccacttcactttgcagatgtacacacagaggcacagaaagtttatgcacttgtccaaggtcacgtgtggagttttattcatcctattctttgcttctgctattgcctgtcagattgtgtctatcttttgtgttctttttattgtgttattcatgttctatttctatttttgtctttttggttatgttttgtatgttgttatatttgttatttattatatttgttttgtatgcattgtgtttgtttgttaacgtgtttatttgcttttgtttgttatgtgtttttg

SEQ ID NO: 61861 - DNA, 493 bp, Homo sapiens
cccacgcgtccggttggcattaaacatcaagagataccattcattcaacatatctatcagaagggcacgtccaccatcagcacaatgagatctcatactcaagaggatccttttctatgcaatgacttaggagaagatttcactcaacatatagcattgactcaaaatgtgattacctacatgagaacgaaacactttgtaagcaaaaagtttgggaaaatcttcagtgactggttatcctttaatcaacacaaggaaattcacaccaaatgtaaatcatatggaagtcatctatttgattatgcctttatccaaaactctgcccttagaccacacagtgtgactcacactagagagataacattggaatgtcgtgtgtgtgggaaaacctttagcaaaaattctaatcttaggcgacatgagatgattcacactggagagaaaccacacggatgtcatctatgtgggaaagcctttactcattgctctgatc

SEQ ID NO: 61862 - DNA, 655 bp, Homo sapiens
ggtcagttgcagctttgacccctatacgatcccgtccggaattccagtaacgacccacgcgtacgctgagatgaagcgcgatctataggcttgaccctaagtcaatgggcccgcctacttctgcctcgcggggtcccaggcatatagctggttattcaggtttcgttggaagaaatacgttctcgtccccctgaaaggcccagtccagtcaggtgatggactcctccctgaaactgcacgaggtcacctctcctatccccgtattccgtttggatccttatgccaacgtgttaggaaggccccctctggtgggttttgtactgtctctagcatttgacacttaatatttaaacaccaccaatgaggtggacgtcctactcacgggactgagtttccaaacgggccagagagcagcacgtgagcattttgcaggtgcacaaagcagggtcatcagaagcctctcgattcaaaagatgataataccgaaaaacactgcccagtgacagtgaatccttggcatatgaagaaagctttcaaagtcatgaacgaattaagaagtcaaaatttgctgtgcgatgtcacaattgtggcagaagacatggaaatttctgctcatagagtggtgctggccgcctgtagtccttattttcatgcc

SEQ ID NO: 61863 - DNA, 349 bp, Homo sapiens
ttagaagtgagttaaattttcacattcccaagggtacttttgtctcgggttgttgaatatattttaaagtgtttataataatcacttcaaaatatttaggtaattaactgtaaattatgttttggtattctccagggacagtggccttagagctattgagaatttgatgcaaaagaaggggaaatttgattacatactgttagagaccactggattagcagaccctggtaagaagtgagattattaataaccagaatatagttctgtgatatattgtaaatagatgtattagaggaatatctaaaatgaggattaaagcttttgttagtattaaaccaaaaactttttt

SEQ ID NO: 61864 - DNA, 464 bp, Homo sapiens
gtctcttttgagtcgtctcttgagatgaagaatctgccttccacgggtggtccatattttataagcgcaccgtcacttacatctttaacacggccaatccactccagccccttccctggagcctggcggacccaactcatccaggcattgctgaaaatgaatccagatcctgcacaggagagtctaagggacccccccgggtttaccaagtctcccccagattccaccagatgaacctcacactggacaccttttaaaatagcagcatgagggagatggggtaggtggagttgagggggaaatggcgtagtgagtgctgatcacgtgcagggaacagctcgatccatgcctgcgataattgcagagctatgaatcgcagatactgacttgccccgtaggctctgtgagctgtgcatggtgcactgtctgcacgtggtgcactggtacatcgaggcgtcttggct

SEQ ID NO: 61865 - DNA, 452 bp, Homo sapiens
ctccatccactgcattgagtagtgaccccgacgtggggttcaatgtggaggggggaggggctgctgcggcagctgcaggagccgaggtgccaggccttgttcttctcatgccggcatccctgcttgcagctgtgaagggggcaggtcaccttgaaggagtctggtcctgtgctggtgagacccacagagaccctcactctgacctgcaccgtttctgggttctcactcaacaatgttatcagcaatgctagagtgggtgtgagctggatccgtcagcccccagggaaggccctggagtggcttgcaaacattttttcggatgacgaaaaatcctacagcacatctctggagggcagactcaccatctccaaggacacctccaaaagtcaggtggtcctcaccatgaccagcatggaccctgtggacacagccacatattattgtgcacgcat

SEQ ID NO: 61866 - DNA, 328 bp, Homo sapiens
cagactcagagagaacccaccatggtgctgtctcctgccgacaagaccaacgtcaaggccgcctggggtaaggtcggcgcgcacgctggcgagtatggtgcggaggccctggagaggatgttcctgacctttcccagcatcaagacctacttcccgaactttgacctgatctacggatctggggattttaatggctacttattgatggcggacaatttctgaggcaactgtgaagatacattgttcattatatttgaagtttggaatacttgccttcatttattaatccgctcctgattttatgggttattagatttctgatgttccg

SEQ ID NO: 61867 - DNA, 395 bp, Homo sapiens
attttcaatgtatttagctttgtcttgtactccacagtgggaatggtaagtcttaacacaggcttttatttcacatccaatagtagcaccaggctgactgcaaagtgtacatttcattctttttcctcgtttaatctcctgaagtacagttttaatatcaaagtctccaaattctgctcttgatgttgttgtgagctggactgtgccagaagaaaacaacatgcacttataatgggcaactgccttcttggcattaaatatatgcagttttcctcgtgcttcattttcttcctcccctacatggcaaaatccacatttacgcctggtgtcactagggctgcttctgtgtggagacctatctctataggaactactttccatttcatctgttgcag

SEQ ID NO: 61868 - DNA, 446 bp, Homo sapiens
tttcgtcatggatctcatgtgcaagaaaatgaagcacctgtggttcttcctcctgctggtggcggctcccagatgggtcctgtcccaggtgcagctgcaggagtcgggcccaggactggtgaagccttcggagaccctgtccctcacctgcgctgtctatggtggctccatcagcagtagtactacttactactggagctggatccgccagcccccagggaaggggctggagtggattggggaaatcaatcatagtggaagcaccaactacaacccgtccctcaagagtcgagtcaccatatcagtagacacgtccaagaaccagttctccctgaagctgagctctgtgaccgccgcggacacggctgtgtattactgtgcgagagttatcatcccggtaatacgagaccagtcgcaactaggatattgtagtggtggtagctgct

SEQ ID NO: 61869 - DNA, 726 bp, Homo sapiens
ttttttttttttcgttccatgttttttatttgtgcactgggaaagaagtcttccctcccatcacatgagccacgtggtgagtcctctggaggcttgaagattatccccctccctgggagtcttgggccatggagggtgggggcggtgaacggaaggggattttgtctctgccctcagcctggtgccctctccttccaggaatgtcccagcggaattgtcaatgaggagaacttcaagcagatttactcccagttctttcctcaaggaggtgaggggacaagggccaaggggaagcagttgtccttctctaggctgagggagggagggattccggaggagttgggaatgccaaggtgatggggggtatggggagctccttagagggaggaagtcctctcctgtgtggaagccaacttctccacactcaccctgcagactccagcacctatgccacttttctcttcaatgcctttgacaccaaccatgatggctcggtcagttttgaggtgagctgggcgaggtgggccagggaagcctgtttcctggagttcagggccaggatctccaggccaaacccagagaaggagttgggtgaagagtacccgaggacacagctccctcctgcctccttcccaggactttgtggctggtttgtccgtgattcttcggggaactgtagatgacaggcttaattgggccttcaacctgtatgaccctgcactccgg

SEQ ID NO: 61870 - DNA, 763 bp, Homo sapiens
gagccactttcccgtccctccactgtggagctgcgttcctgtgagggaggaggccctctgtggtggcgagggtgagctgagcggacgccgccgagtcgaataagaataaaagattctggaggagttggagaagagtgtattcagcccccaaaccacgagatcaacaaagaaatgcacaattttgaggaagagttaacttgtcccatatgttatagtatttttgaagatcctcgtgtactgccatgctctcatacattttgtagaaattgtttggaaaacattcttcaggcatctggtaacttttatatatggagacctttacgaattccactcaagtgccctaattgcagaagtattactgaaattgctccaactggcattgaatctttacctgttaattttgcactaagggctattattgaaaagtaccagcaagaagaccatccagatattgtcacctgccctgaacattacaggcaaccattaaatgtttactgtctattagataaaaaattagtttgtggtcattgccttaccataggtcaacatcatggtcatcctatagatgaccttcaaagtgcctatttgaaagaaaaggacactcctcaaaaactgcttgaacagttgactgacacacactggacagatcttacccatcttattgaaaagctgaaagaacaaaaatctcattctgagaaaatgatccaaggcgataaggaagctgttctccagtattttaaggagcttaatgatacattaaaaa

SEQ ID NO: 61871 - DNA, 302 bp, Homo sapiens; identical to SEQ ID NO: 40453

SEQ ID NO: 61872 - DNA, 298 bp, Homo sapiens; identical to SEQ ID NO: 40553

SEQ ID NO: 61873 - DNA, 331 bp, Homo sapiens
tttttttaaaaaaggggttataatagcaagtgttacaaacatgagtgtgaaaaccatacttccaacccacactttcaatattagcttgaaacaataattcattaaaatggtcctttaaattacccccctcatattatttgcccacaagaaatcagattatgataaatacagagcatatgagtaactgtctcatgtagaaggacactgttgtcttcatacctttcccgatggtttatccggtttagattcaactggcacagctggggttaatgatttcttttcttttttctggtgagaattgagaaattaacaactcctcacataccttaat

SEQ ID NO: 61874 - DNA, 396 bp, Homo sapiens
tacggctgcgagaagacgacagaagggtacggctgccagaagacgacagaagggtacggctgcgagaagacgacagaagggtacggctgccagaagacgacagaagggtacggctgcgagaagacgacagaagggtacggctgcgagaagacgacagaagggtctctcctcccgccgcccaagatgccgaaaggaaagaaggccaagggaaagaaggtggctccggccccagctgtcgtgaagaagcaggaggctaagaaagtggtgaatcccctgtttgagaaaaggcctaagaattttggcattggacaggacatccagcccaaaagagacctcacccgctttgtgaaatggccccgctatatcaggttgcagcggcagagagccatcctctat

SEQ ID NO: 61875 - DNA, 341 bp, Homo sapiens
ggcacgaggaagaggatgatcctaaacaaagctctgctgctgggggccctcgctctgaccaccgtgatgagcccctgtggaggtgaagacattgtggctgaccacgatgcctcttgtggtgtaaatttggaccaattttacgtattctatgtcgatatttcattatgaattttagcggatacggttttcagtgttcgtatcttccgtagtgtgccttatatgagtgttagtgctctgaatgtgagagcgagcagtggcttgagcaacacgtatttcttgtatggtccagttccgttacttgttgcgggttgtacgttccgtgtagttagtttgctggtcct

SEQ ID NO: 61876 - DNA, 1090 bp, Homo sapiens
cacgtccggaattaccgtgtcgacgatttcgtggctgacttatggcggggaaaggagggagccaggctggatctctttccgcagctctcctcacgttcccctctagtcccggcgcggcgctgctgcccaggggactggcctatcctcggccaatccgctgggtccttattgcctgttgggcccctagtgcgaatcagtcccgccagagacccttgacgggcatactgtttcctccgggctcctgcctcatgaggggagagaatggcgccattttgcggtacggaagctacacagcaacacgtataggagactctccccgagatcttctagggagtgacccatctatttttgtttgggaagaggaaactccgaaatgggatcgcggaagacttaaagggccaggctgatttttttttcctactggtctctgaggctgtggttgctacagggtcaccacgagcttggcttacttgtctcatccttcccttgcctggtatcattttctcagttctcccaaaagccatgtcccggcccttgctcatcaccttcaccccagccactgaccccagcgacctctggaaggatgggcagcagcagccacagcccgagaagccagagtccaccctggatggggctgcagcccgagctttctatgaggccctgattggggatgagagcagcgctcctgactcccagagatctcagactgaacctgccagagaaagaaagagaaagaaaagaagaataatgaaggcaccagcagcagaagcagtggcagaaggagcatcaggaagacatggacaagggagatcccttgaggctgaggataagatgactcaccggatactgagggcagcccaggagggggacctgccagaacttaggagactgctggaaccgcatgaggcaggaggagctggggggaatatcaacgcccgggatgccttctggtggaccccactgatgtgtgctgctcgagcgggccagggggcagctgtgagctatctcctgggccgtggggctgcctgggtgggggtctgtgagctgagtggcagggatgcggctcagctcgctgaagaagctggctttg

SEQ ID NO: 61877 - DNA, 2870 bp, Homo sapiens
gcgaccgctcgcccggaccctgaggctgctgggcccaccctcccggaaccgtccgaccctcggtggcctcggcctcttctgccatctccggtcctaccctggggcggagggtggaaggcagcttccgtcgaagaggagggggctgcggtggccaccgcggcggagcccgagttattttaccaagaaaatggtttgcacgactttgaacatatactatccatgctgatgggacaggatccaatatgaatataaatgatggaggaagacgacgctttgaagataatgaacatacattacggatatatcctggggctatttcagaagggacaatctactgtccgattcctgccagaaaaaactccacagctgctgaggtgattgagtctcttataaacaaacttcatcttgacaaaacaaaatgttatgttctagcagaggtaaaggaatttggtggagaagaatggattctcaatccaacagattgtccagttcagcgaatgatgctgtggccccgaatggctctggaaaatcgcttaagtggagaggactaccgcttccttctgagagagaaaaaccttgatggatcaatccattatggtagcctgcagtcatggctacgggtaacagaagaacgtcgcaggatgatggaacggggttttcttccacagcctcaacagaaagactttgatgatttatgtagtttacctgatttgaatgagaaaactctcttagaaaacctacgaaatcgctttaagcatgaaaaaatttatacctatgttggcagtattctaatagttattaacccattcaagtttcttcctatttataaccccaaatatgtcaaaatgtatgataaccaccaactgggaaaacttgagccccacatttatgctgtggctgatgtagcttatcatgccatgcttcagcgcaaaaagaatcagtgcatcgtgatttcaggagagagtggttctgggaagactcaaagcacaaactttcttattcaccaccttactgctctcagtcagaaaggatttgccagtggagtagaacagattattcttggagctggaccagtacttgaggcctttggaaatgcaaagacagctcataataacaattcaagtcgttttgggaagtttattcaagtaaattaccaggaaacaggcactgtacttggtgcctatgttgaaaaatatctactggagaagtccagactcgtttatcaggagcataatgaacggaactatcatgtattctattacctcctggcaggagcaagtgaagatgagagatcagcattccatcttaagcaaccagaggaatatcattatctcaatcagataacaaagaaacccctcagacagagctgggatgattattgctatgactctgagccggattgcttcacggtggaaggagaagatttgagacatgactttgagcgcctacaacttgccatggaaatggtaggatttcttcccaagacacgaagacagattttctctcttctctcagccatactacatttgggtaatatctgttacaaaaagaagacataccgggatgactccattgatatctgtaatcctgaagttctgcctattgtctcagaattattagaggttaaagaagagatgctatttgaagcattagttacaaggaagacggtgacagtgggagaaaagcttattttgccatacaagttggcagaggctgtgacagtgaggaactccatggctaagtctctgtatagtgccctgtttgactggatagtttttcgaattaatcatgcacttctgaatagtaaagatttagagcataataccaagacattgtctattggtgttcttgatatttttgggtttgaagattatgaaaataacagctttgaacagttctgtattaattttgctaatgaacgtttacagcactactttaatcagcatatctttaaattggaacaagaggaatatagaactgaaggtatcagctggcacaacatagattacattgataatacctgctgcataaatcttattagcaaaaaaccaacaggactgcttcatcttttggatgaagaaagcaactttccacaggctacaaatcaaacattgctagacaagtttaagcatcaacatgaagataattcttacatcgaatttccagccgtgatggagcctgctttcattataaaacattatgctggaaaagtaaaatatggggtaaaggatttccgggaaaaaaatacagatcatatgcgcccagacattgtagctcttctgagaagcagcaagaatgcatttatctctgggatgattggaattgatcctgtagctgttttccgatgggcaattctccgagcttttttcagagccatggttgctttcagggaagctgggaaaagaaacattcacagaaaaactggacatgatgatacagcgccatgtgcaattttgaaaagtatggatagttttagctttctccaacacccagtccaccagaggagcttagagattctgcagagatgcaaggaagagaagtacagtataacccggaaaaatcccagaacacctctttctgatctccagggcatgaatgctctaaatgaaaaaaaccaacatgatacatttgatattgcctggaatggcagaactgggattcgccagagcagactatcaagtggcacctccttgcttgataaagatggaatatttgctaattcaactagcagcaaactcctggagagagcccatggaattctcacgagaaacaaaaatttcaaatccaagcctgcccttccaaaggtgagtactatgaaaactttttttgtattggtattctgctacacaattattttttattactcatag

SEQ ID NO: 61878 - DNA, 350 bp, Homo sapiens
ggcacgaggggcattttgccctggaggagctggcccaagctggctatgaggtggttgggcttgactggacagtggccccaaagaaagcccgggagtgtgtggggaagactgggaccttgcatatcaccctcaacccgtgccttttgtacacgtcagccaaaccttgcacttataccacctatacctgaatacggaggcttcattcgctacggactgacacctgaggaattcttccactttctttatactaatactgtaggatcattaccctatgtactcgaaactgggctaatcacctacactataccctctgaagcaaatattattatcacgtacaccttctatgccct

SEQ ID NO: 61879 - DNA, 620 bp, Homo sapiens
gtgaaattaaatcaggattcaggaccattttataggaataatttttcaagtctccctgggttaatgtcacagtaagccacatactatatatcagatattttggaaataactgcaaaagcaagagttgccgaataagcttctgtaactccgatactgcaatataaggatcaaatgagaaacacaagtacagctggccatccgtgtcagcaggttctgtaaccacaaataccgggggagggaagaccatacctgaaaatgctttacaaactaagttgtacgatagtctcaatgggttcaaaacaaatgaactgaaggacatcactgcccaacatgagatgtactgcaccttcaataacatcttcctctgatccactcagatctttcttatcttcagtctcaaagtcataggctctcgtaaactgatcttccacagacggcttcccagatttcctggaatacttttttccggaggacaccatatttagatgcttcctgactttaaaaaacaaatttctttaaccttctgaatgcaaagacatcattttaatacactggtaaaagtttaaatatcaaaggagatatcgaacaaggattgttgaatacaattttaacagtttcct

SEQ ID NO: 61880 - DNA, 184 bp, Homo sapiens
ggcacgagccaccatggtgctgtctcctgccgacatgaccaacgtcaaggccgcctggggtaaggtcggcgcgcacgctggcgagtatggtgcggaggccctggaaaggatgttcctgtccttccccaccaccaagacctacttcccgcacttcgacctgagccacggatctgcccaggttaag

SEQ ID NO: 61881 - DNA, 560 bp, Homo sapiens
gccggcggcggcggcggtacgaggcgcgcgctcggggtcccggtcgcgaggaggaggaggatgtggcgcgcggaggggaaatggctgccgaaaacaagccggaagagcgtttcccaaagtgtattctgcggaactagcacctactgtgttctcaacaccgtgccacctatagaagatgatcatgggaacagcaatagtagtcatgtaaaaatctttttaccgaaaaagctgcttgaatgtctgccgaaatgttcaagtttaccaaaagagaggcaccgctggaacactaatgagagatcatgatgcagccgtccttttggatttctttttaataatgtgtgacccttcacctttgatcccctgacctgcattaccttggtaaccatttcattttttaatttaatttcattttttaattttggtgtacaagctgtaacatttcatctttcaaagtgtaacacgctgatttcctcaaatagagatacccctttgagtgataaatttgcaaaatgctgtcttcattttctgtattaaaattcatttcagttttaaaaaaaaaa

SEQ ID NO: 61882 - DNA, 737 bp, Homo sapiens
  misc_feature (1)...(737): n = a,t,c or g
cgttgctgtcgaagaaacaccaactgaagcaaatcacgtacaaagactgagacaaatgctggcttgccctccacatggtttactggacagggtcataacaaatgttaccatcattgttcttctgtgggctgtagtttggtcaattactggcagtgaatgtcttcctggaggaaacctatttggaattataatcctattctattgtgccatcattggtggtaaacttttggggcttattaagttacctacattgcctccactgccttctcttcttggcatgctgcttgcagggtttctcatcagaaatatcccagtcatcaacgataatgtgcagatcaagcacaagtggtcttcctctttgagaagcatagccctgtctatcattctggttcgtgctggccttggtctggattcaaaggccctgaagaagttaaagggcgtttgtgtaagactgtccatgggtccctgtattgtggaggcgtgcacatctgctcttcttgcccattacctgctgggtttaccatggcaatggggatttatactgnggtaatgattgtttctttgtcatatgaaaatatgtagggacatttagggctttccctgattgcatacaagagaatgcataatagaattttcttatagatatcagacaatgcaacatagatgttacagcataatttaaatattctaacttccaacataagttatgtgttaataggcgctaactcttacagcta

SEQ ID NO: 61883 - DNA, 345 bp, Homo sapiens
ggcacgagcaaatcagcgatgtgtcacccccagtctcccagccttttcttctagtgagtcgactttgagctggaaagcagccgtttctccttggtctaagtgtgctgcatggagtgagcagtacaagcctgcagcggcacaaatgcacctcccagtttgctgggtttattttagagaatgggggcggggaggcaccaccccctcggcccccgcagaacagacgcccccccattccctcgcacccctcggccgcgcgacccccggcgcgcccccgcctctctcccgcgccccgccctacgccgcgttcgcccttccaccctcctgcgctgccccaccctccctacc

SEQ ID NO: 61884 - DNA, 634 bp, Homo sapiens
aactggaagaagtatatgggggtgtggaggtgggagtcagagctgacagccaggatgatgagcaggttccccagcactgtgaccaggtaaatggacaaggacagccaagcgaggacaggctgcagttctggatcctctgagagtcccaggagaaggaattctgagacacctgtgagattctgtggttctgtgtgacttggacaccttgagaagaaaagaggattggaaaaaataaaaaataaaaaccagcccttaatgctgtgtgtatattttggatacaagcaattcacaaggaacattttcacacttgaggaccatccaccatcagcaatatttctcagttgtgacaaacccaaaaatcccagaattattacgtgatgatttactgttttctattcaactccttctgtacgtactactttagagaaaatccactgaagaatgttagaagaccaaaacataatatataacaaatccgtgatctcagtaaaatacggcctactcttttcagaaacaataacatgcaataaaaacgttcttctctctttaagaaaaagatctcagtctaattgaaagaaattaagaagcagtgaaataccctttattttattctgacaccgtgctacaaattcct

SEQ ID NO: 61885 - DNA, 1037 bp, Homo sapiens
ggcacgaggctgagccaggtggagccctactttcctctcctgctttctgcctgtgactagcgccgtcccctaccgcccgtcgaccccacttccatgtctggcggacacagctccccggaacctccacgcccatggccactagacagagggagtcttccttcacctcctgcttttccacctggaattgcgacgcgggcgacgagggcgtgggctgcacctgcgaagatgcttccttgtgcaagaagcgcctgtcgggcgcgggattcggggctggcatctgggacgcggactgaggtgggaggcgggcctgcatctgaaaaatacgctcggaggctggcaggttgctgcccccgcctcgcacgaccctcgcttcccacctgtgaaatgcacagaacagggcttcatttatttaacgaatcgtttctgagctcctgctgtgagccaggcttggagcaagcctgggtactgtggatgggagcaggcccctgaaccaggcggacggggtcttggcgttctcggagctaaacgctgctagaaagacaaacatgatgcacctaactactgtctccgtagattatgaggatgagaggtggaggttctctctcttttaggtatgatccccgttgtgcacctgaaactcaggcgatgactttcagtgaaggaaatgacctgtctagggccacataatacctgtttgaaaagccagtaccacactaagtctccactattaagggtgtgatggtgagggtggggtcgtagggagcacaggtatgtgtcagaaagagaaaacatgaggcttgagtgtcctccatttattcactcattcattctacaaaaatggagagcttactttgtgccagggccttatttgggctggttggtggggattcagtaatgggaatacaccaagaacaagacagacgtgctgccagacatactggaactcacggtttagttgggaaagactgacaggaaataattatccatgagatacataattaaaatttggtgttgtgccctgagaaataaaaaaaaaa

SEQ ID NO: 61886 - DNA, 1673 bp, Homo sapiens
tttcgtgctcggctttcggagactgaagggccctggattcccttgccccgtcgcgccgtcgtccccccgctatccggttttgtgatggccgcgccgtggctgcctccctagagtccctcagcgccctttaaataccgcgttggggggggacgctggggctgggggggtttgttgggctggtgagttttcgaggtgactgtgctgtgctcggtgaggggacgcccagagagccctgacccggggtcactccgtcgccgttctcctcttgtctacgtgctggacccggtgcgtatccatcacgggggaggcgttgccggctcggaggtgaccggccaggtccaacggaggggacaccgctgcagcccgaaggctcccctgccctatctcggaactccatcctgggaaggcggggtcaggggccatcaagctcggctcctagttcatgtcttcccactccgcgtccccttgtttgacctcgaactgccgtcccgcgtgggatcggggagcggggcaccgagtggccgccccgcgtgtcggggtggacacggacttcgggcctcggaggccgcttcgccgctgtttaaatcctgctggacccggtgctacctttttacccacacttaagtgacgcaaaatgcccttcaatggcgagaagcagtgtgtgggagaggaccagccaagcgattctgattcttcccggttttccgaaagcatggcttcgctcagtgactatgaatgctccaggcagagctttacaagtgactcctccagcaaatccagctctcctgcttcaacaagccctccaagggttgtaacatttgatgaagtgatggctacagcaaggaacttatcaaacttgactcttgctcatgagattgctgtaaatgagaactttcaattgaaacaagaggctctcccagaaaagagtttggctggtcgagtgaagcacattgttcaccaggccttctgggacgtcttggattcagaactaaatgctgaccctcctgagtttgaacatgccatcaaactgtttgaagaaatcagagagattcttctctcttttctcactcccggtggcaaccggcttcgcaaccaaatctgtgaagttttggacacagacctcattaggcagcaggctgagcacagtgctgttgacatccaaggcctggccaactatgtcatcagtacgatgggaaagctgtgtgctcccgtgcgagataatgatatcagagagttaaaggctactggcaacatcgtggaggtgctgagacaaatattccatgtcctggacctcatgcaaatggacatggccaattttacaattatgagtctcagaccgcaccttcaacgccagttggtggaatatgagagaaccaagttccaggaaattttggaagaaactccaagtgctcttgatcagactacagaatggataaaagaatctgtaaatgaagaattattttctctttctgagagtgctagtttggggcctgcttggagatcaattcctctaatttctgtgtttgtgtcattcaaaagaattgataattaaaaaaaaaatgcaaccaacagaatctctataaaatcatatatgtttacaattaaatcattcttacaagtaatgagatggtatggatttgttctcaagttattggatggaaatgcaatggatt

SEQ ID NO: 61887 - DNA, 329 bp, Homo sapiens
ggcacgaggcggcgctgtgtcggacccgtgctgtggctgccgagaggcattttctgcgagtgtttctcttcttcaggccctttcggggtgtaggcactgagagtggatccgaaagcggaagttccaaagccaaggagcctagaacgccctcaagcagctacgggaccgcccaataccgacgctggccaatagcccaggagtataaacactgcaccgcgcacaatgacacaggcactctctgctccgagctgagagaaccatggaggagaccgcagtagacagagccactgaactcatgacaacgtgaagcgaactagaaagtaatactc

SEQ ID NO: 61888 - DNA, 333 bp, Homo sapiens
ggcacgaggtaattctttcactcgtaacagattgctgtgggtgggtttttaggggactcattattacttatgatggtaattctaacatttttacactttcactttttatcctatattacccctttactcattcattctgtcgaatacttttagctgacctattcattaccgccctatagtgtgcactattggcagagccagatgcctgatggagaccctcattccccttgctttttctggctacctggctaacatcctgatattctttcctgtaggaaaagttatagatgacatcgaccacctttccctagagatctggcttttcgcaggaag

SEQ ID NO: 61889 - DNA, 857 bp, Homo sapiens
ggagcgggcgggccagcgccgcggagtttcgggtccgaggagcctcgcgcggcgctggagagagacaagatgtccgccagagctgcggccgccaagagcacagcaatggaggaaacagctatatgggaacaacatacagtgacgcttcacagggtaagtttgtgttgcagtaagtaatctgtgtataactcaggatactggcagctttgaaaacaatagaggaaagccagatgtcaggaagccagagggaggaggaaactttttctatattcttttgtttaaaattagagttacaataattttttattaaggtcaaaagtgagcatgattactttttcatatatccttttgagtatttgctgtttttattcctgacttaaaaagtgatttgcttttaaaattttgagtgatcagataaaagactctgtacattagtataaattattataaactgcttcaacctttctgagtatatatgcatccattgtgggagtgaagtttgaaattaaaccaggttgtatgcataataaaatcctaaaagatacttaattgatttcaaacatgttgacccaagctgttgcttaaacaattgcagatgcgagaagagagatgagtagtagtaagagatgagttcttacttggtgggactaagaactttgtccgaagtgagactgctatcaatttgaattctggttctgcctttctcttgctttagaaatggggaagtgattcagtcaccttcgaaaaccttggttttcacaagtttaaaatggaacaagttgacaccagttcatgctttaccaatttgtaaagttaagtgtctctcaaaattctctttcctctctttcaagagagct

SEQ ID NO: 61890 - DNA, 88 bp, Homo sapiens
ggcacgagccacagactcagagagaacccaccatggtgctgtctcctgccgacaagaccaacgtcaaggccgcctggggtaaggtcgg

SEQ ID NO: 61891 - DNA, 1092 bp, Homo sapiens
ggcacgaggaatttgaaactgcttagagaatagaggtaaaaaggaatttccttctttgggtaagagtggatccaaaccatatattctctggctattagcgtctccagaggtgtgtggtcattttttgttatggtgattcccaaagatttgcagtgttggcaagtacccaaaatttatctcagctggtcataaaccttagtgccttttgatggttttgttttatagagttacttattaaagttctatgtaaatcattactgttatccttttaagtttctgtatttaactattaccattttttattttatagtcattacatattggatattatgtagaatgtagttatgtatagagtgttttatctacttatttgttgctgcccttttctgagagttatttaatacagtttgagatggaatttagcatttttgggccttccctcactgtttgtaaataattgattttgtaaaaagaaagtaatatcagacagatacttgagggcaatgcaggctagacagactgtagtatttagagtggagaaaatttcaaccttttatgtagtttgaatagaaatttaaaaaaccacttaagacattcttttgtaagatgtattactcgtgtcatcatagaaaacttaagccttttgtgtgtgttttttgtttgcattaaaataaacacagtagcaaattgcttcaggagttgagacaggagggagcttgctgtcttggccttctttgtgcttctctgagctatgaggctgagaagatcttcaagtggatttttagcaaatttagctcatctgcaaaagatgaagttaaactcctctacttatgtgccacctacaaagcactagagactgtaggagaaaagaaagccttttcatctgtaatgcaggtaagaatgaagggggaaaaatgcatgatgtacttgggaagaaaattgtcccttaacacatgtccttggaggggagcttgaagaagggaaacatagaataggggttatctactgataggaaatatgttttaaaaattcctctttctcagtttgagtaaaggatacactgttcaaggatcagtgctacatacatatatg

SEQ ID NO: 61892 - DNA, 387 bp, Homo sapiens
ccaaagccaagatggcaggtacgtccttttagaatttaaggttagtgaagccatctatttccccgaccccccttcagtgaaaatggtctttcgcatctggctcttctttttggaggcgtgcttgccagcagtcaaaatggctccattccggaatagatttaataggaagtgaagctgtgacggcgaggcgttgcccggcctatctttgctaggcgttctcagaattagttctttctgcccacactagacatggcgcttgccagcgtgttggagagaccgctaccggtgaaccagcgcgggtttttcggacttgggggtcgtgcagatctgctggatctaggtccagggagtctcagtgatggtctgagcctgggccgcgcgttgtgg

SEQ ID NO: 61893 - DNA, 671 bp, Homo sapiens
ggcacgaggaagcaacttggaagaggaaagaaaagaagtcaggaatggcccttactcagagtctcacacgttgcccaggctggagtgcagtggcatgatccctgctcattgcaacctccgcctccctgattcaaaggatttttccacctcagcttctcatgtagctgagattacagggacccttgaaattcatggatgtggccatagagttctctcaggaagagtggaaatgcctggaccctgcgcagaggactttatacagggacgtgatgttggagaattataggaacctggtctccctgggaatctgtcttcctgacctgagtgttacctccatgttagagcaaaagagagatccctggactctgcagagtgaagagaaaatagcaaacgatccagacggcagggagtgcatcaaaggtgtgaacacagagaggagctctaaattgggaagtaatgcaggaaacaagccttgtaaaaatcaacttggattcacttttcagttacatctgagtgatctacagctatttcaagctgaaaggaaaatttctgggtgtaagcattttgaaaaacccgtcagtgacaattcctcagtttccccgcttgaaaaaatttcttccagtgtcaaatcccaccttttaaataaatatagaaataattttgaaaaaaaa

SEQ ID NO: 61894 - DNA, 335 bp, Homo sapiens
ggcacgaggcggcgagacggtccccgccatgtctgcggccatgagggagaggttcgagcggttcctgcacgagaagaactgcatgactgaccttctggccaagctcgaggccaaaaccggcgtgaacaggagcttcctagttatcgagcgcaacctactgctggccttgtacctggtgctcgaccatctcatctctttccaatgtcagctgctgcgatacggctacctgctctacatctctatcctcttaccacatgagctcacctttgatcaaaacctccaatggcccttcctgtactttccgaaatctaggagactccttacattcacttacg

SEQ ID NO: 61895 - DNA, 348 bp, Homo sapiens
ggcacgaggatacacgcacgcacttaaaagagagcatgtggcatgttcattgtggaacacaatatgaatacagggcatgcattttgcagcagggagactgtccacaaaaaccttttgtaccggtcacgggagccctgtggacatctgcacagccaagccgcgggacattcccatgaatcccatgggcatttaccgctccccggagaagaaggcgactgaggatgagggctcagaacagaagatcccggaggccaccaaccggcgtgacgtggaaccgaccaaggccaattcccgctttgctaccactttctatcagcacctggcagattccaagaatgacaatgataa

SEQ ID NO: 61896 - DNA, 829 bp, Homo sapiens
ggcacgagaaaaccagcagttgccttttcatctcttttctgatgatctaaccatgaagtccccagtatttgagcatttaaggcagaatgtaaattcataatttaagaagattttttgttacgtggctagcccaggttgaagaaatatggagatcaacacaaaactgctcatcagtgttacctgtatcagctttttcacctttcagcttcttttctactttgtaagttactggttttcagcaaaagtttctccaggtttcaatagtctcagcttcaaaaagaagattgaatggaactcaagggtagtatccacatgccattctttggtggttggtatttttggcctgtacattttcttattcgatgaggctactaaagctgatccactttggggtggtccatcacttgcaaacgtgaatattgctattgcctcaggctacctcatttctgatttgtccattataattttgtattggaaagtgattggtgacaaattttttataatgcatcattgtgcgtccctgtatgcatactaccttgtactgaaaaatggagtgctggcatacattgggaattttcgcctgcttgcagagctttccagcccgtttgtgaatcagcgaccaaaggctgtagtcactggaaacatggacttgttttcatctctaactctccacctctccacactcagcctgcagagcccggccaacaatcaagacagatgggaccgtgttcagaattcacacaaaagctgaaggatttatggatgcggatatacctctggaattggggttccatttgccagtcaattatccttcatgtctacctggtat

SEQ ID NO: 61897 - DNA, 336 bp, Homo sapiens
ggcacgaggggctgctgactgttggaccgcacgctcctgcgcctgacaggccggtgaccgttctagccctggaacatgtcgggcaacaagcgcgggcgcaacagccatggctgctaaggataccggaaaaacacccgtggagccggaggtggctattcaccgaattcgaatcaccctaacacgccgcagcgtacaatccttggaaaaggcgcgtgctgacttgataagaggcgcgcaagaaccgaatctcaaagtgaaaggaccagttacaatgcctaccaatactttgagaatcactacaagactaactccttggggtgaaggttctaagacgtg

SEQ ID NO: 61898 - DNA, 1366 bp, Homo sapiens
aattcgcaagatgttggtccattttgagcgctggagtcatcgttatgatgagtgtatttactgggatagcaatagattgcgaccccttgagagaccggcactaagaaaagaagggctaaaagatgaggaagatttctttgattttaaagctggagaagaagttctggctcgttggacagactgtcgctattaccctgccaagattgaagcaattaacaaagaaggaacatttacagttcagttttatgatggagtaattcgttgtttaaaaagaatgcacattaaagccatgcccgaggatgctaaggggcaggattggatagctttagtcaaagcagctgctgcagctgcagccaagaacaaaacagggagtaaacctcgaaccagcgctaacagcaataaagataaggataaagatgagagaaagtggtttaaagtaccttcaaagaaggaggaaacttcaacttgtatagccacaccagacgtagagaagaaggaagatctgcctacatctagtgaaacatttggacttcatgtagagaacgttccaaagatggtctttccacagccagagagcacattatcaaacaagaggaaaaataatcaaggcaactcgtttcaggcaaagagagctcgacttaacaagattactggtttgttggcatccaaagctgttggggttgatggtgctgaaaaaaaggaagactacaatgaaacagctccaatgctggagcaggtatgaaatggtagcatttgatttttttcaaggttcccactggaatgatcacggagctctagtatctacgtaattgaaattccccttttgatcagatatgggaataggaagctaattaattgatgatatatttttaactctgccttctccaaggtatacagataactacagacttcattagtgtttgatttcatagactggcattaaagcctttgtctccaaaatttgaaggcctggagacaggcatcccagggtataagcttccagctggatcacctttaactagcttacaaaaagacccttacacaaatactttccatttgtgagttaaaacagggttttttgacatcgaataaagcttcttttgtaagaagtttcttttatattgtaacaattggtgttgttagactgactatgtgttttatgaattgatcaatgagccatacatttttgctaggatgtatattttaataactacaaaaaaagagagtttaaaaaactattaagggtctgtctttaaaccacctaatagaggaatttaaaagtgaaggttgcagatgctagattttgccttggctaccttcagattcccacaatacttgtacatattgaactgtgcatgctttacag

SEQ ID NO: 61899 - DNA, 478 bp, Homo sapiens
cggacgcgtgggcggacgcgtgggcgagtccggccgggcagtagaggaaattgcggtagtgaccctcgggcctcgccatgaagagccgctttagcaccattgacctccgcgccgtactcgcggagctgaatgctagcttgctaggaatgagagtaaacaatgtttatgatgtggataataagacataccttattcgtcttcaaaaaccggactttaaagctacacttttacttgaatctggcatacgaattcatacaacagaatttgagtggcctaagaatatgatgccgtctagttttgccatgaagtgccgaaaacatttgaagagtcggagattagtcagtgcaaaacagcttggtgtggatagaattgtagattttcaatttggaagtgatgaagctgcttaccatttaatcattgagctctatgatagggggaacattgttcttacagattatgagtacgtaattttaaatat

SEQ ID NO: 61900 - DNA, 879 bp, Homo sapiens
tttcgtctgaagcacagacaccacttccccaatctacaggagccattttaacagctaaaacttgtcggattgctttttattttcaagctcaaaagacgatagagaaagaatacttgaaggccaagaagcttgagagaagaaaaatttcagaaaaattgtctcaatttgactagaatatcaatgaaccaggaaaactgaagcaccttccctaaagaaaacttgggtatacaattactccacagacagagctgagggttttttacccaaatcagtcactggattttgctgcctgatacgtgaatcttcttggaatttttctcatgtggatctaaggggaatgctttattatggctgctgttgtccaacagaacgacctagtatttgaatttgctagtaacgtcatggaggatgaacgacagcttggtgatccagctatttttcctgccgtaattgtggaacatgttcctggtgctgatattctcaatagttatgccggtctagcctgtgtggaagagcccaatgacatgattactgagagttcactggatgttgctgaagaagaaatcatagacgatgatgatgatgacatcacccttacagttgaagcttcttgtcatgacggggatgaaacaattgaaactattgaggctgctgaggcactcctcaatatggattcccctggccctatgctggatgaaaaacgaataaataataatatatttagttcacctgaagatgacatggttgttgccccagtcacccatgtgtccgtcacattagatgggattcctgaagtgatggaaacacagcaggtgcaagaaaaatatgcagactcaccgggagcctcatcaccagaacagcctaagaggaaaaaaaaaa

SEQ ID NO: 61901 - DNA, 315 bp, Homo sapiens
cgagaatgaagactattctcagcaatcagactgtcgacattccagaaaatgtcgacattactctgaagggacgcacagttatcatgagagggggaccctgtcatggaggctgctaataacccgggctgtaggagtaagcgccttctatgtgcgagcttgtggtcaggagactatggataatttaatgctaattcatataatacctggtagagaatatcatggtcctattgagaaggaaatagagagtgtgtttattagtctctttattggtatttcgcttttcgagggagcgttattctgcaccctgggggatcg

SEQ ID NO: 61902 - DNA, 320 bp, Homo sapiens
atcgggggtgccgcagccatggcctggaccgctctccttctgagcctccttgctcactttacaggttctgtggcctcatatgaactgactcagccactctcagtgtcagtggccctgggacagacggccacaattacctgtgggggaaacaacattggaaataagaatgtacactggtacctgcagaagtcaggccaggcccctgtgttggtcatctatagggataagttccggccctctgggatccctgagcgactctcaggctccaattcggggaacacggccaccctgaccatcagcggagcccaaggtcgacgcgg

SEQ ID NO: 61903 - DNA, 828 bp, Homo sapiens
tgctctggtccccaggagaggaagtgtctctgatgagggacctgcctgtgggaagatcatggagctgtctttgatcttcggagaagtctgtcccaccactgcagtgaccacagttgtgttgggctcacaccagtgaaccgaagctctggattctgagagtctgaggattccgtgaagatctcagacttgggctcaaagcaaggatgcgtgaaattgtccatattcagattggccagtgtggcaaccagatcggagccaagttctgggagatgattggtgaggaacacgggatcgacttggctgggagcgaccgcggggcctcggccttgcagctggagagaatcagcgtgtactacaacgaagcctacggtaggaaatatgtgccccgagcagtcttggtggacctagaacctgggacgatggacagcattcgatctagcaaattaggagctctctttcaacccgacagttttgtccatggtaactctggggctggcaacaactgggccaaaggccactacacggagggagccgagctgatcgagaatgtcctagaggtggtgaggcacgagagtgagagctgtgactgcctgcagggcttccagatcgtccactccctgggcgggggcacaggctccgggatgggcactctgctcatgaacaagattagagaggagtacccggaccggatcatgaattccttcagcgtcatgccttctcccaaggtgtcggacacggtggtggagccctacaacgcggttctgtctatccaccagctgattgagaatgcagatgcctgtttctgcattgacaatgaggccctctatg

SEQ ID NO: 61904 - DNA, 1595 bp, Homo sapiens
ggctggcagtacctaccatttatggtcaaacaatttttatagggtatttatttgcatttgtcactcttgtggcatttgtagctaatattttctctctttgttggcaggtgcgttaaacctctacagtttgtcaagctttgcagtgcaagcctctgtattacactgcagcttaacaagtagggcagggcttttctctcacttacatttatttctcattttccaaacaatatagttggtttgctagtcacatttgctacgtcttattgcatttttggtcagacgctgtcattgatgctctaatgggtctgtgccctatggtctgtaacccaaagcctgcccacacaacccggtcagaatgcagggactgctgcgctttgaagatcaagactctgcacgtggggatcagaacattgccatgttctatccaacctccacccaaatggtttatcggcgggggcttcaggcaatacctcttagtgttgacctttggatacattatataaacttcttaaaagaaacattggaccctggtgatcctgagacaaacaatacaataagaggaacttttgagcatgctgttctagctgcaggaacagatttccgttctgacagactgtgggaaatgtatataaactgggaaaatgagcagggaaacctgagagaagttacagctatatatgatcgtattcttggtattccaacacagctgtatagtcatcattttcagagatttaaagaacatgtacagaataatttgcctagagatcttttaactggtgaacagtttattcagttgcgaagggaattagcttctgtaaatggtcatagtggtgatgatggtcctcctggtgatgatctaccatcgggaattgaagacataaccgatcctgcaaagctaattacagaaatagaaaacatgagacatagaatcattgagattcatcaagaaatgtttaattataatgagcatgaagttagtaaaaggtggacatttgaagaaggtattaaaagaccttactttcatgtgaaacctttggaaaaggcacaactaaaaaactggaaagaatacttagaatttgaaattgaaaatgggactcatgaacgagttgtggttctctttgaaagatgtgtcatatcatgtgccctctatgaggagttttggattaagtatgccaagtacatggaaaaccatagcattgaaggagtgaggcatgtcttcagcagagcttgtactatacatctcccaaagaaacccatggtgcatatgctttgggcagcttttgaggaacagcagggtaatattaatgaagccaggaatatcttgaaaacatttgaagaatgtgttctaggattggcaatggttcgtttacgaagagtaagtttagaacgacggcatggaaatctggaagaagctgaacatttgcttcaggatgccattaagaatgccaaatcaaataatgaatcttcattttatgctgtcaaactagcccggcatcttttcaaaatacagaaaaaccttccaaaatcaagaaaggtgcttttggaagcaatcgaaagagacaaagagaacacaaagttatacctcaatttacttg

SEQ ID NO: 61905 - DNA, 616 bp, Homo sapiens
tggggctcagctggttcatttatgttgtttttcctgtacctaagttcccgctgtaggtggtacctttgcagacggtgcgatgggggaagcagagaagtttcactacatctatagttgtgacctggatatcaacgtccagcttaagataggaagcttggaagggaagagagaacaaaagagttataaagctgtcctggaagacccaatgttgaagttctcaggactatatcaagagacatgctctgatctttatgttacttgtcaagtttttgcagaagggaagcctttggccttgccagtgagaacatcctacaaagcatttagtacaagatggaactggaatgaatggctgaaactaccagtaaaataccctgacctgcccaggaatgcccaagtggccctcaccatatgggatgtgtatggtcccggaaaagcagtgcctgtaggaggaacaacggtttcgctctttggaaaatacggcatgtttcgccaagggatgcatgacttgaaagtctggcctaattgtagaagccagatggatcagaaacccacaaaaactcctggcagaacaagtagcactctctcagaagatcagatgagccgtcttgccaagctc

SEQ ID NO: 61906 - DNA, 573 bp, Homo sapiens
aaacaatgtcctccaccgagagaaacgtaaaggacacttgatcacacaatccctggaataatatccaggaaacacttgctggagccactcgcagcacccttccctggcagcacacttggggacagcgaggagatgagcgcatctctgaattacaaatctttttccaaagagcagcagaccatggataacttagagaagcaactcatctgtcccatctgcttagagatgttcacgaaacctgtggtgattctcccttgtcagcacaacctgtgtaggaaatgtgccagtgatattttccaggcctctaacccgtatttgcccacaagaggaggtaccaccatggcatcagggggccgattccgctgcccatcctgtagacatgaagtggttttggatagacatggggtatatggacttcagaggaacctgctggtggaaaatatcattgacatctacaagcaggagtccaccaggccagaaaagaaatccgaccagcccatgtgcgaggaacatgaagaggagcgcatcaacatctactgtctgaactgcgaagtacccacctgctctctgtgc

SEQ ID NO: 61907 - DNA, 814 bp, Homo sapiens
atctgtgggagcagtttattccagtatcacccagggtgcagccacaccaggactgtgttgaagggtgttttttttcttttaaatgtaatacctcctcatcttttcttcttacacagtgtctgagaacatttacattatagataagtagtacatggtggataacttctacttttaggaggactactctcttctgacagtcctagactggtcttctacactaagacaccatgaaggagtatgtgctcctattattcctggctttgtgctctgccaaacccttctttagcccttcacacatcgcactgaagaatatgatgctgaaggatatggaagacacagatgatgatgatgatgatgatgatgatgatgatgatgatgatgatgaggacaactctctttttccaacaagagagccaagaagccatttttttccatttgatctgtttccaatgtgtccatttggatgtcagtgctattcacgagttgtacattgctcagatttaggtttgacctcagtcccaaccaacattccatttgatactcgaatgcttgatcttcaaaacaataaaattaaggaaatcaaagaaaatgattttaaaggactcacttcactttatggtctgatcctgaacaacaacaagctaacgaagattcacccaaaagcctttctaaccacaaagaagttgcgaaggctgtatctgtcccacaatcaactaagtgaaataccacttaatcttcccaaatcattagcagaactcagaattcatgaaaataaagttaagaaaatacaaaaggacacattcaaaaaaaaaaa

SEQ ID NO: 61908 - DNA, 574 bp, Homo sapiens
acgagggctccagtcaggccaatacgctccgctcacggaaggaaaacagaaataacttgctggcttgtctggagtcacatgtacttaggtgacaatttacagaaagtcatctctgcagcttgatgggcgacaacccttttcaaccaaaaagtaattcaaaaatggcagaactgtttatggaatgtgaagaagaggagctggaaccatggcagaagaaagtaaaagaagttgaggatgacgatgatgatgagccaatctttgttggcgagatatcaagttcaaaaccagcaatttcaaatattttgaacagagttaaccccagctcatattcaaggggactaaagaatggtgcactcagtcgaggtattactgctgcattcaagcctacaagtcaacactacacgaatccaacatcaaatccagtgcctgcctcaccaataaattttcatcctgagtctagatcttcagatagttctgttattggtcagcctttttctaaacctgtaagtgtttctaaaactatacggccagctcagggatccattggatgttgtttatcaatatcaacagtacc

SEQ ID NO: 61909 - DNA, 558 bp, Homo sapiens
gctactggtgggagaaaaccaccgaaggggcccacaaacccggaagcggatcgcgtggagtgaaggtcacgccgcggcgcgaataacttctaaagaggcatgctgtgatgaaaaagcccagaagagaaggaagaggaaagcaaaggagtcagggatggctcttcctcagggacacttaacattcagggacgtggccatagaattctctcaggcggagtggaaatgcctggaccctgcacagagggctttatacaaggatgtgatgttggagaactacaggaacctggtctccctgggaatctctcttcctgacctgaatattaactccatgttggagcaaaggagggagccctggtctggtgagagtgaagtgaaaatagcaaaaaattcagatgggagggagtgcatcaaaggtgtgaacacagggagcagctatgcattgggaagcaatgcagaagacaaaccaattaaaaaacaacttggagtatcctttcacttacatctgtctgaactggagctatttccagatgaccgggtaataaatggatgtaatcaaaa

SEQ ID NO: 61910 - DNA, 1590 bp, Homo sapiens
tttttttttttttaggacaggggtcttgcaatgaggcccaggctgggtctcaaactcctggactcaaacaatcctcccacctcagcctctcaaagtgctgggattataggcgtgacacttggcacccgaactattggggcataattacagtaagttaaaagacaaaaaaaggagaaaaaacggtcaatttgaatccttgaaggataggaaaggcgaattattaactttcccaaatttggtttcttcaaacttttggaaatggcaattttacaggggctaacatatttggggtggaaacaggattgttttaaataaacagttaccctccttaaaaaaggaggctttttcaaaaataggcatgtacctggggattaaagtcctagcccatgtgtccaggaaaatgagtgtgtttttcagaagaaccaaacagcctcacttgatactataaaccccattttgaagacttaggcacataaactcagttaaaacattggggaatatccagttcttcaaaccacaatataacctgttctgtgatgttttaataggtgcctaacctgctttcagctccaactaccccataaagatttcttgtctcgaccagcagggttgaagacatttttgaataagttgacttaaaccacagtctatcagtcagctttgaccacagcaaaaacaggctctgcaattgctagaaaagaaattcatacttgagaattttctacctaaaaaattcagacctgagaaattcatacttgagaactgaattaagaaagccctgaacaaatcttaattcaatgtatatcatattcaaatttcaaccttgttaatttatcaaacttttaaaatcaagaacaacttcttttgggaggaggaaaacggagagggataaaaaagatgcctcagaaaagtagttaacttcttaattaggtaaatgttattcaaaaaacgatcaaatatctttcttctcaattcctttattaattctcacatttaccttaaacaagtttcacacatttttcaaataaaacttagatcataaaaccactcttaagccacctcttaccaaggctaatctactttatttccttttttcagagagttattcaacaaatataaacatttaccacttacgatcgtgggatctttcctttcactagtgaacccattgcttctgaatcaaaacaatttctcgtcttcaaactacttaggttccactgtcccggtaggataatccataaaattagctgtcaatatcttataaggattatatcacactgagttctcagaaaagaaaggtagcatctaagccattttaaaaacgatcactagactctgaccctgctgctagaaaagatcaacttagaatttgatctacctaagcaaaataaaaaggggtaccaaaaaggctgaacagacatgttcatttgtcaaaggtgttcacaattgctgtataaatctaaagtattttataatgtcttgacatttaaaatgcctgtcgagacaatttttaactgtttttaaatgctttgtcagttaataggaaatataaccaagtcagatcatggaaaaagcaacttccctcgtgcc

SEQ ID NO: 61911 - DNA, 1807 bp, Homo sapiens
  misc_feature (1)...(1807): n = a,t,c or g
cggaaatgcaaatgcaccatcatgttgtgacccatattgcgaaaattagaaaaaaggaagttgagtttcgctattgcacgaagttcagcccagaggagaaactcgctcgccttcagaagacagtacctcctaaatggctctactttgaacctgctgggcaaggaagagattttcaaggaaaccatctaccgtgtgcaagctcctgccggccaaccccagaccccagcacggagccaggcgcctgtgcccgccgaccctcagcatcctcctcagaaaggctggtggcatcaggaagcccctggccagcctccacctgagcccagtgagctcagctttaaggatggagtcaggcagggggtcctcaacccctccaggacccattgctgccctagggatgccagacactgggcctggcagttcctccctagggaagcttcaggcgctccctgttgggcccagagcccactgtggggaccctgtcagcctggctgcagcaggggacggctctccagacataggccccacgggagagctgagtggtagcttaaagatccccaaccgggacagcgggatcgacagtccctcctccagtgtggctggagagaactttccctgcgaggagggcttggaggctggcccaagccccactgtactgggggcgcacgcagagatggccctggacagccaggtcccgaaggtcaccccccaggaggaggcggacagcgacgtgggtgaggaacctgactctgagaacaccccccagaaggctgacaaggatgccggcctggcccagcactctggcccccagaagcttctccacattgcccaggagctcctgcacaccgaggagacctatgtgaagcggctgcacctgctggaccaggttttctgcaccaggctgacggatgcggggatccctccagaagtcatcatgggcatattctctaacatctcctccatccaccgcttccacgggcagttcctgctgccggagctgaagacgcggatcacggaggagtgggacacaaacccacggctcggggacatcctgcagaagctggccccattcctgaagatgtacggcgagtatgtcaagaactttgaccgagccgtagggctggtgagcacgtggacccagcgctccccactgtttaaagacgtcgtccacagcatccagaagcaggaggtatgcgggaacctgacgctgcagcaccacatgctggagcccgtgcagagggtcccccggtacgagctgctgctcaaggactatctgaagaggctcccgcaggacgccccanaccggaaggatgcggagaggtccttggagctcatctccacagccgccaaccactccaatgctgccattcggaaagtggagaaaatgcacaagctcttggaggtgtacgagcagctgggtggggaagaagacattgtcaacccggccaatgaactgatcaaggagggccaaatccagaaactgtcagccaagaacggcaccccccaggaccgccacctcttcctgttcaacagcatgatcctttactgtgtgcccaagctgcggctcatgggccagaagttcagcgtccgggagaagatggacatctcaggcctccaggtgcaggatatcgtcaagccaaacacagcacatacattcatcataacgggaagaaaaaggtccctggagctgcagacgcggacagaggaagagaagaaagaatggattcagatcatccaggccaccatcgagaagcacaaacagaacagcgaaaccttcaaggcttttgggggcccccttaaccagggatgg

SEQ ID NO: 61912 - DNA, 542 bp, Homo sapiens
cagcatccacatagtctacacagagctccccttgctgcccagacaagctgaaggaccacaggaactcagatacacaggaaacagttgtttcatgtgtcggactcctttccattgctctttccaatgtggtaatgcagctaaactaagagaaaagccatggagacttcagcatcctcctcccagcctcaggacaacagtcaagtccacagagaaacagaagatgtagactatggagagacagatttccacaagcaagatgggaaggctggactcttttcccaagaacaatatgagagaaacaagtcttcttcctcctcctcctcttcctcctcatcctcctcatcttcttcatcctcctcctcctcagagagcaatgatgaggaccagcaacccagagcaaccggaaaacatcgacggagcctgggggctggatacccccacgggaacggctcacccggtcctgggcatggggagcctgacgttttgaaggatgagcttcaactctatggagatgctcctggagaggtggtaccctctgggga

SEQ ID NO: 61913 - DNA, 978 bp, Homo sapiens
ctgcgggactgcggcggcgccggcctccggggagaaacgcgaatgacaacagagctgctcaaggcgggaactctgagctaagcagtggaggtttctctggatctggagagaagagtgaccttggagccaataatgagccatcctgactacagaatgaacctccggcccctggggacccccagaggtgtgtctgctgtggctggtccacatgacattggtgcttcgccaggtgacaaaaagtcaaagaacaggtccacacgagggaagaaaaagagcatatttgaaacttacatgtccaaggaggatgtttcagaaggcttgaagagaggaacactcatccagggtgtattgagaattaatccaaagaagtttcatgaagccttcattccttccccggatggtgatcgagacatttttattgatggggttgttgctcgtaatagagccttaaatggggatctggtggtcgtgaaactgcttcccgaggagcattggaaggtagttaaaccagagagcaatgacaaagaaacagaagctgcgtatgaatcagatatccccgaggagctctgtggacaccatctcccgcaacagtccctgaaaagctataatgacagtcctgatgtcattgtagaggctcagtttgatggcagcgactcagaagatggacatggcatcacacaaaatgtgctggttgatggtgttaagaaactctcagtttgtgtttctgagaaaggaagagaggatggtgatgcaccggttacaaaagatgagaccacctgcatttcacaagacacaagagctttatcggagaaatccctgcaaagatcagcaaaggtcattgcctacagattttctccacgtgtccaaatggctttcacctgagctacttgttgaagatctcgtgtgattcagtcaggactgtatttggtcatttaatcagaaaagttagagcagagaatcataaaaagtgaattaaaa

SEQ ID NO: 61914 - DNA, 979 bp, Homo sapiens
cacgcgttcgtttataattctatatgaagaaaatgaagactctgaggtggaaatcattcatgtaacatgccctatgaaggaaacaaggagggcagattcattccgctatcctaaaacaggcacagcagaacctaccgtcacttttaagatgtcagaaataatgattgatgctgaaggaaggatcatagatgtcatagataaggaactaattcaaccttttgagattctatttgaaggagttgaatatattgccagagctggatggactcctgagggaaaatatgcttggtccatcctactagatcgctcccagactcgcctacagatagtgttgatctcacctgaattatttatcccagtagaagatgatgttatggaaaggcagagactcattgagtcagtgcctgattctgtgacgccactaattatctatgaagaaacaacagacatctggataaatatccatgacatctttcatgtttttccccaaagtcacgaagaggaaattgagtttatttttgcctctgaatgcaaaacaggtttccgtcatttatacaaaattacatctattttaaaggaaagcaaatataaacgatccagtggtgggctgcctgctccaagtgatttcaagtgtcctatcaaagaggagatagcaattaccagtggtgaatgggaagttcttggccggcatggatctaatatccaagttgatgaagtcagaaggctggtatattttgaaggcaccaaagactcccctttagagcatcacctgtacgtagtcagttacgtaaatcctggagaggtgacaaggctgactgaccgtggctactcacattcttgctgcatcagtcagcactgtgacttctttataagtaagtatagtaaccagaagaatccacactgtgtgtccctttacaagctatcaagtcctgaagatgacccaacttgcaaaacacaggaatttcgggccaccattttg

SEQ ID NO: 61915 - DNA, 1765 bp, Homo sapiens
caatccatctccaactttcatgtgctgctcttacagactgagactcgaattgcagactggcgggaaggggctcttaatggaaactaccttaaacgaaaacttcaggatgcagcagaacaactaaaacagtatgaaataaacgccactcctaaaggctggtcctgccactgggacaggtacgcactcttctccccttttcacctttcacctttgacatctcagacatgatttgtgatcaccaccatctgacgacatgacagcctgtctggagactgagagcagctgcagttagcggtgctgggcaggcaaagcaccgcaagcacaaagtttggccagccacacattggagaaacaaaagcaatgtttaaagtgttccatgtaacggattttttcccaagatatggacaaagctggtttttactctccagagtgttgcacggagtagggcgggcttgggggttaagcgcatgcgagagctctgtgcgctttacaggacctctggaagcaactactcctgattaacctcggtgaagttaaggaaaacttcgtggctgaagatgtgaatgaagaacaagattactatcctctgccagcaggtcagatgaaaacatttctttatatatttggcttttcttgatttttttttcgttatttgaaatctttgctcttttatttttcagctcccagatcctctccctctctttagctttcactgtgtttgatatcaagaatatgaaatgtgaattccacggtccaagaggggaagagtcacctttcacaaacttcgttgttctcttctttggaagggaaattagtgttctaggcgattgagtcccttcattaatgaaacttgaaaccctgttatgcattggcaaatcacaaaaaaagagaaaagtgttttctaagtctcatctgttggaggtagagggttcagggctgtattcacagagttgctggcagtgcaaatagctttgaattatccttggttctccattctcaattgtcaaagctctttgttgcctttgtgaatagcagtccattaagaggttcgtccctgtgaaagcagactgctgtcctgggacaggaccaaatggaagtgtctttgtaggagaacgggttttaaaacatgtgttttctttcttgtaatttagggatcatagacggtatttctatgtaaacgaacagtcgggcgagtctcagtgggagtttccagatggtgaagaggaagaagaagaaagccaagcacaagaaaatagagatgagactcttgccaaacagaccttgaaagacaaaactggcactgattcaaattcaacagaatcctctgaaacttccacaggttctctttgtaaagaatccttttctggtcaagtttcttcttcatcactcatgccacttactccattctggaccctccttcagtcaaatgttcctgtgcttcaacctccattacccttggaaatgccaccacccccacctccacctccagaatcacctccaccccctcctccaccaccaccagctcccaaaatgccaccacctgaaaagacaaaaaaaggaaggaaagacaaggcaaagaagagtaagaccaaaatgccatctttggtaaaaaagtggcagagtatccagcgtgagttagatgaagaggacaattctagttccagtgaagaggatcgggtatcaactgcacagaagcgaattgaagagtggaaacagcagcagctggttagtggcatggcagagagaaatgctaattttgaagccc

SEQ ID NO: 61916 - DNA, 538 bp, Homo sapiens
cccagcaccaactacgacgccaagcgttacactggaaactactttttaaagcaacaaaagagtctaaaacaaaatacaacatttcttaaatacactggttccagaaagagctattttaacagaagcaactcaaagatatcccttcgacagaagtggaagtgctgaaaaatgctcatctctcacacagacttttgatggacaggagtttctaagtatcatgcctaccaacaagctgtaaaatgatcaccctgaacaatcaagatcaacctgtcccttttaacagctcacatccagatgaatacaaaattgcagcccttgtcttctatagctgtatcttcataattggattatttgttaacatcactgcattatgggttttcagttgtaccaccaagaagagaaccacggtaaccatctatatgatgaatgtggcattagtggacttgatatttataatgactttaccctttcgaatgttttattatgcaaaagatgaatggccatttggagagtacttctgccagattcttggagctct

SEQ ID NO: 61917 - DNA, 580 bp, Homo sapiens
gaacgtgtctctctccaagtctgtgacgctgactttccagcttttgaagatgacccccagtaccaaaaaggtcttgggtgtctactggaagagcacagggcagggcagccagtggtccagggatggctgcttcctgatacacgtgaacaagagtcacaccatgtgtaattgcagtcacctgtccagcttcgctgtcctgatggccctgaccagccaggaggaggatcccgtgctgactgtcatcacctacatggggctgagcgtctctctgctgtgcctcctcctggcggccctcacttttctcctgtgtaaagccatccagaacaccagcacctcactgcatctgcagctctcgctctgcctcttcctggcccacctcctcttcctcgtggcaattgatcaaaccggacacaaggtgctgtgctccatcatcgccggtaccttgcactatctctacctggccaccttcacctggatgctgctggaggccctgtacctcttcctcactgcacggaacctgacggtggtcaactactcaagcatcaacagattcatgaagaagctcatgttccctgtgggc

SEQ ID NO: 61918 - DNA, 715 bp, Homo sapiens
ccggtcaaaatggaagtgaatccccctaaacaggagcacctgctggcgctaaaagtgatgcggctgactaagcctactttattcaccaatatcccagtaacatgtgaagagaaagacttacctggagatctctttaaccagctgatgagagatgatccttcaaccgttaatggtgcagaagttttaatgttgggagaaatgctgactttaccacagaattttgggaatatatttttgggagagaccttttccagttatatcagcgttcataatgatagcaatcaagttgtaaaagacatattagtaaaagctgatcttcagacaagttctcagcgtttaaatctttcagcctccaatgctgcagtggctgaacttaaaccggattgttgtattgatgatgtcatacatcatgaagtcaaagaaattggaacacacatcttggtatgtgctgtgagttatacaactcaggctggagaaaaaatgtatttcagaaaattcttcaaatttcaggttctcaaaccattggatgtgaaaaccaaattttacaatgcagagagtgacctcagttctgtgactgatgaagtatttctggaagcccagattcagaatatgacaacctcacctatgtttatggagaaggtttcactggagccatctattatgtacaatgtaacagaattaaattcagtcagccaagctggagaatgtgtgtcta

SEQ ID NO: 61919 - DNA, 472 bp, Homo sapiens
acgcccacgcgtacgcccacgcgtccgtggaatcttataacttgaagaactgccctggagaaaggaagaaacttataataaatgggaaattataaatctagaccaacccaaacttgtactgatgaatggaagaaaaaagtcagtgaatcatatgttatcacaatagaaagattagaagatgacctgcagatcaaggaaaaagaactgacagaactaaggaatatatttggctctgatgaagccttcagtaaagtcaatttaaattaccgcactgaaaatgggctgtctctacttcatttatgttgcatttgtggaggcaagaaatcacatattcgaactcttatgttgaaagggctccgcccatctcgactgacaagaaatggatttacagccttgcatttagcagtttacaaggataatgcagaattgatcacttctctgctttccaagggagctgattatccgcaggttg

SEQ ID NO: 61920 - DNA, 780 bp, Homo sapiens
ggtagattgagtcatttccacatcttgcgagtccttccgaacgagtctcctttccttggggctcgcaaccacccaatgatcgattcaggagaaaagaagcctgggcggagagcagagcccgacctttctaaaagagctgcaggaagggacttcttggctactgatggcaaagctctacgaggcagtgaccttcaaggatgtggctgtgatcttcactgaggaggagctggggctgctggaccctgcccagaggaagctgtaccgagatgtgatgcttgagaacttcaggaacctgctctcagtggggcatcaaccattccatggagatactttccacttcctaagggaagaaaagttttgggtgatggggacaacaagccaaagagaagggaatttggatttgagacggagtctcactctgttgcccaggctggagtgcaatggcctgatcttggctcactacaacctctgcctcctgggttcaagcaattctcctgcctcagcctctcgagtagctgggattacaggcatatgtcaccaggcccggctatttttttgtatttttagtaaagacggggtttcgccatgttggccaggctggtctcaaactcctgacctcaagtgatccacccgcctaggcctcccaaaggtctgggattacagatgtgagccaccacgcccagccaagaaacatacttttgaaagagcatacttctaaaagggcacaaccaacaggtacactcaggaagacttgaaggtctacagtattaagattattgg

SEQ ID NO: 61921 - DNA, 1271 bp, Homo sapiens
gcggcgcgccgccgcagacagctggtgtcccgccggagaacggccgagatatccccgccggcggaggagcagccccagcgccaggcctcccgacgtccccgggcagcagcccaaggccgcgaagtccccgtctccagttcagggcaagaagagtccgcgactcctatgcatagaaaaagtaacaactgataaagatcccaaggaagaaaaagaggaagaagacgattctgccctccctcaggaagtttccattgctgcatctagacctagccggggctggcgtagtagtaggacatctgtttctcgccatcgtgatacagagaacacccgaagctctcggtccaagaccggttcattgcagctcatttgcaagtcagaaccaaatacagaccaacttgattatgatgttggagaagagcatcagtctccaggtggcattagtagtgaagaggaagaggaggaggaagaagagatgttaatcagtgaagaggagataccattcaaagatgatccaagagatgagacctacaaaccccacttagaaagggaaaccccaaagccacggagaaaatcagggaaggtaaaagaagagaaggagaagaaggaaattaaagtggaagtagaggtggaggtgaaagaagaggagaatgaaattagagaggatgaggaacctccaaggaagagaggaagaagacgaaaagatgacaaaagtccacgtttacccaaaaggagaaaaaagcctccaatccagtatgtccgttgtgagatggaaggatgtggaactgtccttgcccatcctcgctatttgcagcaccacattaaataccagcatttgctgaagaagaaatatgtatgtccccatccctcctgtggacgactcttcaggcttcagaagcaacttctgcgacatgccaaacatcatacagatcaaagggattatatctgtgaatattgtgctcgggccttcaagagttcccacaatctggcagtgcaccggatgattcacactggcgagaagccattacaatgtgagatctgtggatttacttgtcgacaaaaggcatctcttaattggcacatgaagaaacatgatgcagactccttctaccagttttcttgcaatatctgtggcaaaaaatttgagaagaaggacagcgtagtggcacacaaggcaaaaagccaccctgaggtgctgattgcagaagctctggctgccaatgcaggcgccctcatcaccagcacagatatcttgggcactaacccagagtccc

SEQ ID NO: 61922 - DNA, 1589 bp, Homo sapiens
cgttgctgtcgcctgtgacacgtagcaacggggctggttcagggtctgaaacagagtttgggggttgtttgggattagtgaagctactgcctttgccgccagcgcagcctcagagtttgattatttgcaatgtcaggctttgaaaacttaaacacggatttctaccagacaagttacagcatcgatgatcagtcacagcagtcctatgattatggaggaagtggaggaccctatagcaaacagtatgctggctatgactattcgcagcaaggcagatttgtccctccagacatgatgcagccacaacagccatacaccgggcagatttaccagccaactcaggcatatactccagcttcacctcagcctttctatggaaacaactttgaggatgagccacctttattagaagagttaggtatcaattttgaccacatctggcaaaaaacactaacagtattacatccgttaaaagtagcagatggcagcatcatgaatgaaactgatttggcaggtccaatggttttttgccttgcttttggagccacattgctactggctggcaaaatccagtttggctatgtatacgggatcagtgcaattggatgtctaggaatgttttgtttattaaacttaatgagtatgacaggtgtttcatttggttgtgtggcaagtgtccttggatattgtcttctgcccatgatcctactttccagctttgcagtgatattttctttgcaaggaatggtaggaatcattctcactgctgggattattggatggtgtagtttttctgcttccaaaatatttatttctgcattagccatggaaggacagcaacttttagtagcatatccttgcgctttgttatatggagtctttgccctgatttccgtcttttgaaaatttatctgggatgtggacatcagtgggccagatgtacaaaaaggaccttgaactcttaaattggaccagcaaactgctgcagcgcaactctcatgcagatttacatttgactgttggagcaatgaaagtaaacgtgtatctcttgttcatttttatagaacttttgcatactatattggatttacctgcggtgtgactagctttaaatgtttgtgtttatacagataagaaatgctatttctttctggttcctgcagccattgaaaaacctttttccttgcaaattataatgtttttgatagatttttatcaactgtgggaaaccaaacacaaagctgataacctttcttaaaaacgacccagtcacagtaaagaagacacaagacggccgggcgtggtagctcacgcctgtaatcccagcactttgggaggccgaggcgggcggatcacaagggcaggagatcgagaccatcctggttaacacggtgaaaccccgactctactaaaactacaaaaaaaattagctgggcgtggtggcgggcgcctgtagtcccagctactcaggaggctgaggcaggagaaaagtgtgaacccaggaggcggagcttgcagtgagccgagatcacaccactgcactccatccagcctgggtgacagggtgagactctgtctcaaaaaaaaaa

SEQ ID NO: 61923 - DNA, 547 bp, Homo sapiens
gacggcaccatggaggactccgaggcggtgcagagggccacagcgctcatcgagcagcggctggcacaggaggaggagaatgagaaactccgaggagacgcacgccagaagctgcccatggacttgctggtgctggaggatgagaagcaccacggggctcagagtgcagccctgcagaaggtgaagggccaagagcgcgtgcgcaagacgtccctggacctgcggcgggagatcatcgatgtgggcgggatccagaacctcatcgagctgcggaagaaacgcaagcagaagaagcgggacgctctggccgcctcgcatgagccgcccccagagcccgaggagatcactggccctgtggatgaggagaccttcctgaaagctgcggtggaggggaaaatgaaggtcattgagaagttcctggctgacggggggtcagccgacacgtgcgaccagttccgtcggacagcactgcaccgagcttccctggaaggccacatggaaatcctggagaagcttctagataatggggccactgtggacttccagg

SEQ ID NO: 61924 - DNA, 598 bp, Homo sapiens
cggacgcgtgggcgcgggcccctcctaatgtcttggacttaagattggggctcgctgggacctggtggtccggttatgggataagaagcctcgtgggagagcagaggacgctggacgatcccggacgccttctgacctctttttaggcaggcgagggttgcgtccacttccacgaagggaggggagcatttaacttttctcagggacagcgacccagtcaggatgtttcacagctttctccttccccagcctgaaaaaggactgcgcggactgacttcttggctactgaaagcaaagctccactgttccaggcacgattctgccttctctcaaatggcataactcaggactctgcaaattcccagaaacaggaggaaaaatgaccacattcaaggagggactgaccttcaaggatgtggctgtgatcttcactgaggaggagctggggctgctggaccctgtccagaggaatctgtaccaagatgtgatgctggagaacttcaggaacctgctgtcagtggggcatcaccccttcaaacatgatgtattccttttagaaaaggaaaaaaagcttgatataatgaagacagcaactcaa

SEQ ID NO: 61925 - DNA, 585 bp, Homo sapiens
aaatgacgccctaatagaggccggtagaccggccgaccacgcgtccggcggcgcttggaggaaaggaagccggttggagggcgcagcgcacccctgctgcgcggaggagggggctgagctgaactcagcagaagttacatgcacaagcaggcaaaaattctgacgttctcaagagaccagctctgcccccgtggctcaactgaccctaccatgtggacgctgctcctccaggtgggaactggagttttgaaataaaatggatgatttgacgttacttgatcttctggagtgccctgtgtgctttgagaagctcgatgtcacagccaaagtcctcccttgccagcacaccttctgcaaaccatgtctacagagggttttcaaggcccacaaagagctgcggtgccccgaatgcaggacgcctgtgttttccaacattgaggcgctgccggccaacctgctgctcgtgcgccttctggatggagtgcgctcagggcagagctccgggagagggggctccttccgcaggcctggcacgatgaccttgcaggatggcaggaaaagcaggaccaaccccagacgtctgcg

SEQ ID NO: 61926 - DNA, 766 bp, Homo sapiens
agcccccccaactgacgccgtgttgacggccctgaatcccggctcgacccacgcgtccgggcccagaaaggtggggcaggaacgatcccagccttcagctaattctgtcacctctaacgtctggggcaagaacgtttcaggaaaccaagggggaccgaggctcagcgccgaagagaaagacgccaactgcgggacctgtcgcgcctcccgcgccggggtggagctgaccccgccgagtcccgcccctgcctgagttcgccagtggtccaggagccgcttttttccactcgggaagacttcagagaagtctcacaaaggactcggctggctgcttttctcagtgccgaagccgcgccatgctcgttctcagaagcggcctgaccaaggcgcttgcctcacggacgctcgcgcctcaggtgtgttcatcttttgctacgggccctagacaatacgatggaacgttctatgaatttcgtacttattaccttaaaccttcaaatatgaatgcgttcatggaaaatcttaagaaaaacattcatcttcggacctcttactctgaattggttggattctggagtgtagaatttggaggcagaacgaataaagtgtttcatatttggaagtatgataattttcctcatcgagctgaagttcggaaagccttagccaactgtaaggaatggcaagaacaatctatcattccaaatttggctcgcattgataaacaagagacggaaattacttacctgataccatggtccaaatt

SEQ ID NO: 61927 - DNA, 461 bp, Homo sapiens
ttttttttttttggaaagagaaaatatatttactattcattaagtggatgcgggtcatcataaaggtcttcattctcatcctcttcacgttgagtaggctgaggaggaggaagaggaggagaaggggttggtcttgctgtctcagggcggcagaggcagaagagaatctgagcatacgtggacctgtagccaggtgggcatagataaaaggaaatattgtttgccagtccctgctggaatgatgcctttacacatctgtctgatctgattgctccatctgttttcaatctactcttccctttccacggttctagcctgttcatctagccccatgatggctgtggacatcgagtacagatacaactgcatggctccttccttgcgccaagagaggtttgcctttaagatctcaccaaagcccagcaaaccactgaggccttgtattcagctgagcagcaaga

SEQ ID NO: 61928 - DNA, 991 bp, Homo sapiens
tctcaggtctggaggtccaatctttacatgtgaggttaaaagtataactgttgtgggttatataaactattcaagttaggtctcttatggtggcaaaatggaagacttgagataggtgttggatgacctaaacctggagccctatttttgtaagattctttcttttgttctgaacttcagcttgcccagttattggcggaattgaactcgatgccagatttcttcccagtacgaaccccaacctcagcttctaggaagaagacagtgaggcgggccttctcggagggacagatcacgcggcgtatgaacccaacccggagtgcgcggcctcctgagaagtttgctctagagaacttcactgtctcagccgctaaatttgcggaagagttttacagcttccgaagaaggaagacaattggggggaaatgccgggagtacagacgacgtcaccgtatatcttcttttcggccagtggaggatatcaccgaagaggacttagaaaatgttgccataactgttcgagataaaatctatgataaagttctgggtaacacgtgccatcagtgtcgacaaaagaccatcgacaccaagacagtgtgtcggaaccagggttgctgtggtgtgcgaggacagttctgtggaccatgcctgcggaaccgctatggggaggatgtcagatcggcattgctggacccggattgggtgtgtcccccctgtcgtgggatctgcaattgcagctactgtcggaagcgtgacggccgctgtgccacaggaatcctcattcatctggccaagttttatggttatgacaatgttaaggaatatctggagaggtaagtaagtctctagcagcttacaaaacagcttgaaatcttgaggctgagcacaggagaccctctgggcaagtagttgttgccttcccgtgtgacttacttacttatataaaccacgagtaccatccattctgtatctgtttgcattggaaaagctc

SEQ ID NO: 61929 - DNA, 909 bp, Homo sapiens
tgagacctccgccgagctctgccccggcgagacgaggcgcctccgtcgccaagccgtgcggtcacggcggtcccgggagcggtccttatcgaccccgcccgggccccctcagcttacctaacactactcagcaaaataatgatctgctagactgctaacccgagcatccagcttccacaatgcctgtgcaggcagctcaatggacagaatttctgtcctgtccaatctgctataatgaatttgatgagaatgtgcacaaacccatcagtttaggttgttcacacactgtttgcaagacctgcttgaataaacttcatcgaaaagcttgtccttttgaccagactgccatcaacacagatattgatgtacttcctgtcaacttcgcacttctccagttagttggagcccaggtaccagatcatcagtcaattaagttaagtaatctaggtgagaataaacactatgaggttgcaaagaaatgcgttgaggatttggcactctacttaaaaccactaagtggaggtaaaggtgtagctagcttgaaccagagtgcactgagccgtccaatgcaaaggaaactggtgacacttgtaaactgtcaactggtggaggaagaaggtcgtgtaagagccatgcgagcagctcgttcccttggagaaagaactgtaacagaactgatattacagcaccagaaccctcagcagttgtctgccaatctatgggccgctgtcagggctcgaggatgccagtttttagggccaggtaagataggttactatcttaccttttttattagctattggggcttgaggatgccaatttctggagctcggtgaatcctgagactcaacccgtctttatatgtacaaatcttgatataattaaagataaatttgtttaaaaaaaaaa

SEQ ID NO: 61930 - DNA, 440 bp, Homo sapiens
cttgtctgaggcggaggcagccccgcgccgcgccggacccgagcatatttcattttctgtcattggactttgagccattagaaccatgagcaactacagtgtgtcactggttggcccagctccttggggtttccggctgcagggcggtaaggatttcaacatgcctctgacaatctctagtctcactttctggtggaggtgatagccaacagtaagatggccaaaagctacttacccttgaagaggaaatgaagggcttggagctccaactagatagcctatgaataattgagatttggctttttacctcattatggatttagtttgaatgtattctgtgtatatattttaaggatatgttttcatgatgatgatgatagcactgatgagaggagtaattaaagcttctatttattgagacttgactatatgtcaggtac

SEQ ID NO: 61931 - DNA, 678 bp, Homo sapiens
ttttccagactatatttgagaagaactatttttttcctccagaaaactcattattgagatactcagattttaaatccaaactaaaagctgattagcatgattttttaactaagaaataaaattatctaagcagttttatttggataactataggtgactttcacaaacagacctatgtcatgcttagttgaggattctaactcacttcactttcagtaggtacttcccggacatcagtaaccaagctcagtcttcatacaaagcccagaatgcctccatgtgacttcatgcctgaaagataccagtcccttggctacaaccgtgtcctggaaatccacaaggaacatctttctcctgtggtgacggcatatttccagaaacccctgctgctccaccaggggcacatggagtggctctttgatgctgaaggaaacagatacctggatttgatccacgctatagtctccgtacagaggacccggtctccagctgtggctacaacataggggttttacacaagaaaaataaagtgaattaagcctggaaaaaaaacatcaacaaataaaaacctggtcatttatgctatatttaaagcatttaaatcactttcagaatcaccactgtgaatgtgtggattaaaaattatggcccaacagtgctggatgtcgcctgtatttg

SEQ ID NO: 61932 - DNA, 546 bp, Homo sapiens
caacggttagcggtggcaggggctgactgagagcgtctgcttgtgcctggtacctagtacaaacttaataaatgtgtgacgcaagaataaaggaatgaatgaatggaagaatgatataatgccacagaactttcaaagatgggactgtctagttgcaaaaacaagctcagggatcccactgattctactttacgataatggattctgaattaatgcatagtatagtaggaagctatcataaacctccagaaagagtatttgttccctcattcacccagaatgaaccatctcagaattgccatcctgcaaacttagaagttacctctcctaagatacttcatagcccaaatagccaagctcttattttagccttaaaaactcttcaggaaaaaattcatcgtttagagctggagagaacacaagctgaagataacctgaacattctttccagagaagcagcacagtataagaaggccttagagaatgaaacaaatgagagaaatctggcacaccaggagctgataaagcagaaaaaagatataagta

SEQ ID NO: 61933 - DNA, 685 bp, Homo sapiens
  misc_feature (1)...(685): n = a,t,c or g
atgagggtcgtcccacgcgtccgcttggtccatgtgagagaagctggctgctgaaatgactgcgaaccggcttgcagagagccttctggctttgagccaacaggaagaactagcggatttgccaaaagactacctcttgagtgagagtgaagatgagggggacaatgatggagagagaaagcatcaaaagcttctggaagcaatcagttcccttgatggaaagaataggcggaaattggctgagaggtctgaggctagtctgaaggtgtcagagttcaatgtcagttctgaaggatcaggagaaaagctggtccttgcagatctgcttgagcctgttaaaacttcatcttctttggccactgtgaaaaagcaactgagtagagtcaaatcaaagaagacagtggagttacctctgaacaaagaagagattgaacggatccacagagaagtagcattcaataaaaccgcacaagtcctctccaaatgggaccctgtcgtcctgaagaaccggcaggcagagcagctggttnttcccctggagaaagaggagccagccattgctcccattgaacatgtgctcagtggctggaaaggcagaactcccctggagcangaaattntcaacctnctncatangaacaagcagncagtgacagaccctttactgacccctgtggaaaggcct

SEQ ID NO: 61934 - DNA, 375 bp, Homo sapiens
ggtatgtgtcatgtacgacaggagggaacaaagtgtgaaaaatgcctggacgtaaggcacctcagaccatttgcccttttttcgacaaaaagtatctaggtctcgtgggatggagaaatcgaaagtgtcattttctggccatttaaaaccattgtcgagtttgtattggggccaagcggtgttggagaagaaaataagatgcttagattttaggtcaggcaagaggtgaagaggttttaagctcttgagaacacaggctaagggagaagaaggagaaatggagggtggaaggttgcccatagtaaaggaggcaagtttaaagagaagggtagagacacggagaagcggggtggggagcagtccttggctgcaatg

SEQ ID NO: 61935 - DNA, 695 bp, Homo sapiens
cacccgcttccgtcagcctcactggggcttccttccgtctcgctcggagtttccctctgcgttcgctccgcgctgctggaggctgtcgtcccaatgctccccaaacggcggcgagcgcgggtcgggtcccctagcggcgatgccgcttcctccacgccgccctcgacgcgcttcccgggagtcgccatctacctggtcgagcctcgcatgggtcgcagccgccgggccttcctcacaggcctggcgcgctccaaaggcttccgcgtccttgacgcctgcagctccgaagcgacacatgttgtgatggaagagacctcagcagaggaggccgtcagctggcaggagcgcaggatggcagctgctcccccgggttgcacccccccagctctgctggacataagctggttaacagagagcctgggagctgggcagcctgtacctgtggagtgccggcaccgcctggaggtggctgggccaagcaaggggcctctgagcccagcatggatgcctgcctatgcctgccagcgccctacgcccctcacacaccacaacactggcctctccgaggctctggagatactggccgaggcagcaggctttgaaggcagtgagggccgcctcctcaccttctgcagagcagcctcggtgctcaaggcccttcccagccctgtcacaaccctgagccagctgcaggg

SEQ ID NO: 61936 - DNA, 1158 bp, Homo sapiens
ccgctcgcttcaatatggctgcccccagggagagacgaggctaccatgaaggagccgagcgcagaccctgagtccgtcacccatggatcgcagcgcggagttcaggaaatggaaggcgcaatgtttgagcaaagcggacctcagccggaagggcagtgttgacgaggatgtggtagagcttgtgcagtttctgaacatgcgagatcagtttttcaccaccagctcctgcgctggccgcatcctactccttgaccggggtataaatggttttgaggttcagaaacaaaactgttgctggctactggttacacacaaactttgtgtaaaagatgatgtgattgtagctctgaagaaagcaaatggtgatgccactttgaaatttgaaccatttgttcttcatgtgcagtgtcgacaattgcaggatgcacagattctgcattccatggcaatagattctggtttcaggaactctggcataacggtgggaaagagaggaaaaactatgttggctgtccggagtacacatggcttagaagttccattaagccataagggaaaactgatggtgacagaggaatatattgacttcctgttaaatgtggcaaatcaaaaaatggaggaaaacaagaaaagaattgagaggttttacaactgcctacagcatgctttggaaagggaaacgatgactaacttacatcccaagatcaaagagaaaaataactcatcatatattcataagaaaaaaagaaacccagaaaaaacacgtgcccagtgtattactaaagaaagtgatgaagaacttgaaaatgatgatgatgatgatctaggaatcaatgttaccatcttccctgaagattactaagctttggttctgatgtgtcttggccgtaatgtttctagtaggttttataaagctgctcttcataagagtattttagtttgttgagtgtatcagccattcataagccagtaatgacaagtgcagagcttcaaactataactttgttgcccagaggatgtgcagttgtcatctaagctctcagcagtacccggcttatcctacgacttcacctgaaatgctatagttatccctacttttttaccagtttctcccagaagcacctgcttaataaatcaaagatgtttgaaaaaaaaaaa

SEQ ID NO: 61937 - DNA, 435 bp, Homo sapiens
gaattcccgggtcgacgatttcgtggagaggggcgggcgccattgtgcttcgctgccgactgcatttcctcagtcacgggcctaaaactccaaggagaaaggcggcggtgcgtgttgctgcgagtgggacgcgcactggtcggtgccggctcaggagccgggaaaaatctttaagaatggagtctaaaccttcaaggattccaagaagaatttctgttcaaccttccagctccttaagtgctaggatgatgtctggaagcagaggaagtagtttaaatgatacctatcactcaagagactcttcatttagattggattctgaatatcaggtaacatttttatttggaatatatgtatacggcctttttcaaaatccctagggacactcttttgggggtatttaaaaaatgtgttagctggatctgaggcatcctg

SEQ ID NO: 61938 - DNA, 1289 bp, Homo sapiens
ctgagcgctcctgcagttcctggggcgtagtaggggatccacaagcgtttgtgaccagtgaagttctttacaagggtgagatctgcacgggaggacccgagcgagggtctcggcttgccaggaagccggggttccccgggaagcgtggagttcacccgcgcactcgaagtgcctttgcaaaattatatctgggtgttggcacccagccactattctgccaatgaagtacatcctggtcacgggtggggtcatctcaggcattggtaaagggatcattgccagcagcattggaacgattctaaaatcatgtggactccgagttactgccataaaaatcgacccctatattaacatcgatgctggcactttttcaccttatgaacacggtgaagtcttcgtcttaaatgatggtggagaagttgatttagaccttggaaattatgaaagatttttggatattaatctttataaagacaacaatatcaccacggggaagatatatcagcatgtgatcaataaagagaggcgtggtgattacctggggaaaacagtgcaagttgtccctcacattactgatgctgtccaggagtgggttatgaatcaagccaaggtgccggtggatggtaataaggaagagccccaaatatgcgttattgagctgggaggcaccattggagacatcgaaggaatgccgtttgtggaggcgtttagacaattccagtttaaggcgaaaagagagaatttctgtaatatccatgttagccttgtcccacagctcagtgctaccggagaacaaaaaaccaaacccacccaaaacagcgtccgcgcactgaggggtttaggcctgtctccagatctgattgtctgccgaagttcaacgcccattgagatggccgtgaaggagaagatttctatgttttgtcacgtgaaccctgaacaggtcatatgtatccatgatgtttcttccacataccgagttcctgtgcttttagaggaacaaagcattgtgaaatattttaaggagagattgcacctgcccatcggtgattctgcaagtaatttgctttttaagtggagaaatatggctgacaggtatgaaaggttacagaaaatatgctccatagccctggttggcaaatacaccaagctcagagactgctacgcctctgtgttcaaagccctggaacactcagccctggccatcaaccacaagttgaatctgatgtacatagactccattgatctggagaagatcactgaaaccgaggaccctgtgaaatttcatgaag

SEQ ID NO: 61939 - DNA, 353 bp, Homo sapiens
cacaatgaggctccctgctcagctcctggggctgctaatgctctgggtctctggatccattggggatattgtgatgactcagtttccactctccctgcccgtcacccctggagagccggcctccatctcctgcaggtctaatcagagcctcctgcatagttttggacacaactatttggattggtacgtacaaaagccagggcagtctccacaagtcctgatctatttgggttctagtcgggccgccggggtccctgacaggttcagcggcagtggatcaggcacagagtttacgctgaaaatcagcagagtggaggctgaggatgtaggaatctattactgcatgcaagctc

SEQ ID NO: 61940 - DNA, 971 bp, Homo sapiens
cccacgcgtccgagtaagtaaagtaagaagtgaagagaaagatgaagactctgaaagaggagatgaagatagagaaagaagataccgagaaagaaagagaagaaccaaagatgatacctggaaagcagatgacctcagaaaacatctctgggccatacagtcaggtggttccaaggaagaaagaaagcacagagagaagaagctgcgtaaggagtctgagatggaccttcctgaacataaggagccgaggtgcagggatcccgaccaggatgccaggagcagagacagggtggccgaagtccacaccgctaaggagagtcctcgtggggagagggacagagacagacagagggagaggagaagagacgcaaaagaccgggagaaagaaaagctgaaggagaaacatcgagaggcagaaaagtctcacagcagaggaaaggacagggaaaaagaaaaagacagaagggcccggaaggaagagctccggcagaccgtggcccaccacaacctgctgggccaggagacacgcgaccggcagctcctggagcgggcggagaggaaaggccgctcagtaagtaaagtaagaagtgaagagaaagatgaagactctgaaagaggagatgaagatagagaaagaagataccgagaaagaaagctgcagtacggagacagcaaggacaaccctctcaagtactggctttataaagaagaaggcgagaggagacacaggaagcccagagagccagatcgagacaagaaacaccgagaaaaaagcagcacaagggaaaaaagagagaaatattccaaagagaaaagtaattcattctctgacaaaggggaagaaagacataaagaaaagcgacacaaagaaggttttcattttgatgatgagaggcaccgaagcaacgtggatagaaaagagaaatcggcaaaagatgagcccaggaaaagggaatcccagaatggtaaca

SEQ ID NO: 61941 - DNA, 814 bp, Homo sapiens
ataatgggcggtgggaaatctggaacagtgtcttctcagaaacaaccagcctcaaagactgcaagtgacaagacagattctgctttgaatacagctacagaaataaaggatggactacaatgtgggacagtgtcttctcagaaacaacaagccttgaaggctacaactgacgaggaaggttctgtttcaaatatagccacagaaataaaggagggacaacaatctgggacagtgtctcctcagaaacaatcggcctggaaggttatatttaaaaagaaagtttctcttttgaatattgccacaagaataatgggcggtgggaaatctggaacagtgtcttctcagaaacaaccaccctcaaaggctacaagtgacaagacagattctgctttgaatatagctacagaaataaaggatggactacaatgtgggacagtgtcttctcagaaacaaccagccttgaaggctacaactgacgaggaagattctgtttcgaatatagccacagaaataaaggatggagaaaaatctgggacagtgtcttctcagaaacaaccagccttgaaggctacaactgacgaggaagattctgttttgaacatagccacagaaataaaggatggagaaaaatctgagacagtgtcttctcagaaacaaccagccttgaaggctacaactgacgaggaagattctgtttcgattatagccacagaaataaaggacggagaaaaatctgggacagtgtcttctcggaaaaaaccagccttgaaggctacaagtgatgagaaagattctttttcgaatataaccagag

SEQ ID NO: 61942 - DNA, 691 bp, Homo sapiens
cccacgcgtccggaagagcaagatagagaagatgggaaatgtcataaaatggaaatgaacccaatttcaggaaatctgaactgtgaccctattgctatgtcccagtgttcctcagatcatggatgtgaaactgatttagattcagatgatgacaaaatagaaaaaccaaacaattttatgaaagattctgcatcacaagacaatggactaagcagaaaaatttccaggaaaagggtctgttccagtgactcagacagtagtttacaggtggttaagaaatcatcaaaagccagaacaggtctcctgaggattactcgaagatgtgcagctacggctgccaataagatcaagctcatgagtgatgtagaagatgtcagtttagaaaatgtgcacactagaagcaaaaatggaaggaaaaaacctctccatcttgcttgtactacagctaagaagaaattgagtgattgtgaaggaagtgtacattgtgaagtaccaagtgaacagtatgcctgtgaaggcaagccacctgatcctgactccgaaggtagtacaaaagtgcttagtcaggctctaaatggagactcagactctgaagatatgttgaattcagaacacaagcacaggcataccaatattcacaaaatagatgcaccttctaaaagaaaaagttcctctgttacatcttcaggag

SEQ ID NO: 61943 - DNA, 418 bp, Homo sapiens
tcttgtgctccagctggagctttggtcccgtattctcggctatttatccccagctgcgggaggccctggtgactctgctgctgcagtgtctggtttccctgtgacctgcaggtactgggagttacatagctaagatgccaggacaccccgaaagccggaaaacgggactactggcattcagtgatgtggtcatagaattctctccagaggagtgggcatgcctggaccctgcccagcgaaatttgtatagggatgtgatgttcgagaactacagaaacctggtctccctggctattttatcttattccattcaagaccttttgccagagcaggatatgaaagatttatgccaaaaagtgacactgacaagacatagaagctggggccttgacaatttgcacttagtgaaagactggaa

SEQ ID NO: 61944 - DNA, 2021 bp, Homo sapiens
tttccgttctcttggcccggctgacagagttagccgaggccgccatattgaataagcgacccggcctcctagggggtcgtcgtggtgcagacagtttagcagaacagcctccgcggctccggggagaagcaatatgttaaggatacctgtaagaaaggccttagtaggcctttctaagtctcctaaaggatgtgttcgaacaactgccacagcagcaagcaacttgattgaagtatttgttgatggtcagtctgtcatggtggaaccgggaacgaccgtcctccaagcttgtgagaaggttggcatgcagatccctcgattctgttatcatgaaaggttgtctgttgctggaaactgcaggatgtgccttgttgaaattgagaaagcccctaaggttgtagctgcttgtgccatgccagtaatgaagggttggaatatcctaacaaactcagaaaaatccaaaaaagccagggaaggtgtgatggagttcttattagcaaatcacccattggactgtcctatttgtgaccagggaggtgaatgtgatctgcaggaccagtccatgatgtttggaaatgataggagccgatttttagaggggaagcgtgctgtggaagacaagaacattgggccattggtaaagaccatcatgacaagatgtatacagtgtactcgctgcatcaggtttgcaagtgagattgcaggagtagatgatttgggaacaacaggcagaggaaatgatatgcaagttggcacatacattgaaaagatgttcatgtctgaactgtctgggaatatcattgatatctgccctgtaggtgccctaacctctaagccctatgcctttactgcccggccttgggaaacaagaaagacagaatccattgatgtaatggatgcggttggaagtaatattgtggttagcacaagaactggagaagtgatgaggattttgccacgtatgcatgaggacatcaatgaagagtggatctctgataaaaccagatttgcctatgatgggctaaaacgtcaaagacttaccgagccaatggtcagaaatgaaaaagggcttttaacctatacttcttgggaggatgcgctctctcgcgtagctggaatgttgcagagttttcaaggcaaagatgtggcagcaattgcaggtggcttggtggatgctgaagccctggtagctctcaaagatttgcttaatagagtggactctgacaccttatgcactgaagaggtcttccccactgcaggagctggcacagatttgcgttccaattatcttcttaatactacaattgctggtgtggaagaggcagatgttgttcttctggttggtacaaacccacgttttgaggcaccactgtttaatgctagaattcgaaagagctggctgcataatgacttaaaagtggcccttataggcagtccagtggacctcacttacacatatgaccacctgggagactcccccaaaattcttcaagacattgcttcgggaagccatccatttagccaggtcctaaaggaagctaaaaaaccaatggtggttttaggcagttctgcactccaaagaaatgatggagcagcaattcttgcagctgtttctagcattgcacaaaagattcggatgactagtggtgttactggtgattggaaagttatgaatatccttcataggattgcaagtcaagtagctgctttggaccttggctataagcctggggtggaagcaattcggaagaaccctcccaaggtgctgtttctcctgggagcagatggaggttgtatcacacgacaggatttgccaaaggattgtttcattatttatcaaggtaagtatcacctgtgacaccagaaacaaaagagagtagtacattatgtatgttagaaaccatttagtaatatatttagtgaactgaatgttttccatttgagaattttgcctcccccactcctcctcctttttttttaaacaaaccacaagtgttattagttacataattgatactgct

SEQ ID NO: 61945 - DNA, 484 bp, Homo sapiens
acaaagacagaaaaaccacgacgaagacaccccaccgagccctctagagagatctcttgaggattcgaattcgcggtcgcgccgacttttgattataagagttctacaatttaattcctactacaacaaagcataagaaaacatgtaaaattataattttaacataaggaagcatgtcttacatctggtgtaaatcttttgaattcagccatccagttaggaagtgtagacaaagggccacagacaagaaaaggtcctggtactcctctctgaatcatcaatgcaatagtagcaatgcactgaactgtcttacccaatcccatttcatctgctaaaatgccattaattccattttcccaaagcatctggacaaaataatagatactgtatttaaacttggatataaacaactacaggattacaatattttatttcttctctttaaaaaatcacacccaaagatgagaattatgttaaagctgat

SEQ ID NO: 61946 - DNA, 962 bp, Homo sapiens
cgcggccgcgtcgactttaagattaaattcatgtattgaaaatattgttcagaccccatgtgacataactggagccagtgcagtgccatgaagaactacgagattagcctggatattaacttgtcttctagagaatagatttcatgttccattcttctgcaatggttaattcacacagaaaaccaatgtttaacattcacagaggattttactgcttaacagccatcttgccccaaatatgcatttgttctcagttctcagtgccatctagttatcacttcactgaggatcctggggctttcccagtagccactaatggggaacgatttccttggcaggagctaaggctccccagtgtggtcattcctctccattatgacctctttgtccaccccaatctcacctctctggactttgttgcatctgagaagatcgaagtcttggtcagcaatgctacccagcttatcatcttgcacagcaaagatcttgaaatcacgaatgccacccttcagtcagaggaagattcaagatacatgaaaccaggaaaagaactgaaagttttgagttaccctgctcatgaacaaattgcactgctggttccagagaaacttacgcctcacctgaaatactatgtggctatggacttccaagccaagttaggtgatggctttgaagggttttataaaagcacatacagaactcttggtggtgaaacaagaattcttgcagtaacagattttgagccaacccaggcacgcatggctttcccttgctttgatgaaccgttgttcaaagccaacttttcaatcaagatacgaagagagagcaggcatattgcactatccaacatgccaaaggttaagacaattgaacttgaaggaggtcttttggaagatcactttgaaactactgtaaaaatgagtacataccttgtagcctacatagtttgtgatttccactct

SEQ ID NO: 61947 - DNA, 1440 bp, Homo sapiens
gagtccgcccaggctgtgggactatcagtcctccctgtgcgtccagttcggagaggctgcgcgctctctcggctcactgcaacctctgcaacctctgcctccagggtcaagcggttctcctgcctcagccttccgagtacctgggattacaggaccgcaaataaccctgtacaaagaggaatggagattgcctctatccacctagattcataagctggcctgaggtgatcttggcatcaaggaagggatgcacatcatcacaccatcagcttcagagaatggcagccatttatttgtcccgtgggtttttttccagggaaccaatctgcccttttgaagaaaagacaaaggtagaaaggatggtggaggactacctggcaagtggttatcagtgaatattggtggaagtgttcattggctcaaaccagcatgtgtatgatgacttaggattcagtgacgtttgatgatgtggctgtggacttcaccccagaggagtgggctttactggacacaactgagaaatgcctctacagagatgtgatgctgggagaactacatgaacctggcctctgtggatttctttttctgcttaacttcagaatgggaaatacaacctagaaccaaacggtcatcacttcagcagggttttttgaagaatcaaatattcagtgggatacaaatgacaagagactacagtggatggaaactctgtgactgtaagaattgtggagaggtcttcagggaacagttttgccttaagacacacatgagagttcagaatggagggaatacttctgagggtaattgttatggaaaagacaccctcagtgtgcacaaggaagcctctactggacaggaactttccaaatttaatccatgtggaaaagtctttactctaactccaggtcttgctgtacatcttgaagttctcaatgcaagacaaccctacaaatgtaaggaatgtggaaaaggctttaagtattttgcaagccttgataatcatatgggaatccacactgatgagaaactctgtgaatttcaggaatatgggagagctgtcacagcttcttcacacctaaagcagtgtgtagcagttcatacaggaaagaaatccaaaaagactaagaaatgtgggaaatccttcactaatttttctcaactttatgcacctgtgaaaactcataaaggagagaagtcctttgaatgtaaagaatgtggaagatcctttagaaattcctcatgccttaatgatcacattcaaattcacactggaataaaaccacacaagtgtacatactgtgggaaagccttcactagatcaactcaacttactgaacatgtaagaactcacactggaataaaaccctatgaatgtaaggaatgtggccaagcctttgctcagtactcgggcctttctatacacatacgaagtcacagtgg

SEQ ID NO: 61948 - DNA, 973 bp, Homo sapiens
cactcgtccgaaagtcattacagagatggacctaaatattttgtctgcaagaggtgttactattttaggggatagtctgaattcagtgcggacttctactattgccttgacagggaatttaatagcaagcctggctcattctagagctggtatcccagaagcatttaccacattaggaacaatccaacggctctgctatcatttgtactcgggaatagaagagtctggagaagaatggaggaccatccataattcctatctttaaaagagcatgtcacctggtgctatgtccaaagactttccaagaagcagaaaatctgaaactccttgaactaatgccaacagacagtgacctccagaaatcaaaagaactaaaaaaggaaattctactttattggtcaacctaatagtaagtgcatgagcctccatatgatgaatgggaatgaatggcttttttaactgtcctaccagctgtaagctaaatgataagcccactcccaggcttaaagcaagtcctggttttatggtagttgcaattgctgagaggtcacttggagagactccactggcagaaagagcttcttgtactattcgttgaatattttctctgtgaagctgttgagctgctggaggaacaatcccacctgtttttaaatgaacttcagtttgggaatgtattgcttctcccaacacatttccagtttcatccaccacagcagctgctgtatcatcacaactagtttcaattcccaatactattttatgaagaaatagtgttccaggatgaaaattaaaacttcttaaaaattcataaactttcctttttgatggtttaaaaaaaactcctgcagtcttagtcaagattagcatacttactctatagataattccttccacttgggcggcagtagctagcacttgtctcctttccctactaaagactgtcgactgcccttatcgctgcaggagaaag

SEQ ID NO: 61949 - DNA, 920 bp, Homo sapiens
ggcacgaggtaccttaagagctctggagaccgcgaagaaagtgggaaaggttggcgctaatggtcagaaagctgctgggccctctgcagattctgtaactgaaaataaaattggttctccacccaagactcctgtaagtaatgtagcagctacctcagctgggccctctaatgttggaacagagctgaattctgtgcctcaaaaatccagcccatttctaactagagtaccagcatatcctccgcattctgaaaacattcagtattttcaagatccaaggactcagataccctttgaagtcccacagtacccacagacaggatactatccaccacctccaacggtaccagctggtgtggctccctgtgttcctcgctttgtgaggtccaataacgttccagagtcctccctcccacctgcttccatgccatatgccgatcattacagtacattttcccctcgagatcgaatgaattcttctccttaccagcctcctcctccgcagccgtatggaccagttcctccagtaccttctggaatgtatgctcctgtgtacgacagcaggcgcatctggcgcccacctatgtaccaacgagatgacattattagaagcaattctttacctccaatggatgtgatgcactcatctgtctatcagacatctttgcgggaaagatataactcattagatggatattattcggtggcttgtcagccaccaagtgagccaaggacaactgtgcctttaccaagggaaccttgtggtcatttgaagaccagttgcgaggagcagataagaagaaagccagatcagtgggcacagtaccacactcagaaagcacctcttgtctcttcaactcttcctgtggcaacacagtcaccaacaccaccttctacactgaacagaggagaagggtcga

SEQ ID NO: 61950 - DNA, 2263 bp, Homo sapiens
agatacagaaaagatgagtccttgggatatggagcttatacctaataatgctgtatttcctgaagaactaggtaccagtgttcctttaactgatggtgagtgcagatcactaatctataaacctcttgatggagaatggggtaccaatcccagggatgaagaatgtgaaagaattgtggcaggaataaaccagttgatgacactagatattgcctcagcatttgtggcccccgtggatctgcaagcctatcccatgtattgcacagtagtggcatatccaacggatctaagtacaattaaacaaagactggaaaacaggttttacaggcgggtttcttccctaatgtgggaagttcgatatatagagcataatacacgaacatttaatgagcctggaagccctattgtgaaatctgctaaattcgtgactgatcttcttctacattttataaaggatcagacttgttataacataattccactttataattcaatgaagaagaaagttttgtctgattctgaggatgaagagaaagatgctgatgtgccaggaacttctactcgaaaaaggaaggaccatcagcctagaagaagattacgtaatagagcccagtcttacgatattcaagcatggaagaaacagtgtgaagaattgttaaatctcatatttcaatgtgaagattcagagcctttccgtcagccggtagatctccttgaatatccagactacagagacatcattgacactccaatggattttgctaccgttagagaaactttagaggctgggaattatgagtcaccaatggagttatgtaaagatgtcagacttattttcagtaattccaaagcatatacaccaagcaaaagatcaaggatttacagcatgagtttgcgcttgtctgcattctttgaagaacacattagttcagttttatcagattataaatctgctcttcgttttcataaaagaaataccataaccaaaaggaggaagaaaagaaacagaagcagctctgtttccagtagtgctgcatcaagccctgaaaggaaaaaaaggatcttaaaaccccagctaaaatcagaaagctctacctctgcattctctacacctacacgatcaataccgccaagacacaatgctgctcagataaacggtaaaacagaatctagttctgtggttcgaaccagaagcaaccgagtggttgtagatccagttgtcactgagcaaccatctacttcttcagctgcaaagacttttattacaaaagctaatgcatctgcaataccagggaaaacaatactagagaattctgtgaaacattccaaagctttgaatactctttccagtcctggtcaatccagttttagtcatggcactaggaataattctgcaaaagaaaacatggaaaaggaaaagccagtcaaacgtaaaatgaagtcatctgtactcccaaaggcgtccactctttcaaagtcatcagctgtcattgagcaaggagattgtaagaacaacgctcttgtaccaggaaccattcaagtaaatggccatggaggacagccatcaaaacttgtgaagaggggacctggaaggaaacctaaagtagaagttaataccaatagtggtgaaattatacacaagaaaaggggtagaaagcccaaaaaagctacagtatgcaaagccagaagatttagagcaaaataatgtgcatcccatcagagatgaagtacttccttcttcaacatgcaattttctttctgaaactaataatgtaaaggaagatttgttacagaaaaagaatcgtggaggtaggaagcccaaaaggaagatgaagacacaaaaattagatgcagatctcctagtccctgcaagtgtcaaagtgttaaggagaagtaaccgaaaaaagatagatgatcctatagatgaggaagaagagtttgaagaactcaaaggctctgaacccaccattaaaactaagaaatcaaggtcgaaggacagctttctataatgaggatgactctgaagaggagcaaaggcagctgttgttcgaagacacctctttaacttttggaacttctagtagaggacgagtccgaaagttgactgaaaaagcaaaagctaatttaattggttggtaacttgtaccaaaatattttacttcaaaatctataaagcaggtacagttaaggaataagtagaactaaggcttctgcttccttgctgctgtggtggagtagggaatgttatgatttgatttgcaaa

SEQ ID NO: 61951 - DNA, 2654 bp, Homo sapiens
gggccgccgcgcactgccgggagagctcgatgggcttttcctgcgcgccgcccggtgtctggccgagtccagagagccgcggcgcctcgttccgaggagccatcgccgaagcccgaggccgggtcccgggttggggactgcaggggaaggcagcggcggcggcggcgggagccccaccggggtctgggactggggaactgcctccggcttcacgatgccagtatggacagaatagcttatgatgcttatccccacccaccacttccgaaacattgagcggaaaccagaatacctccagccagagaagtgtgtcccacccccctaccctggtcctgtgggaaccatgtggtttatccgtgacggctgtggcatcgcctgtgccatcgttacctggtttctggtcctctatgcggagttcgtggtcctctttgtcatgctgattccatctcgagactacgtgtatagcatcatcaacggaattgtgttcaacctgctggccttcttggccctggcctcccactgccgggccatgctgacggaccccggggcagtgcccaaaggaaatgccactaaagaattcatcgagagtttacagttgaagcctgggcaggtggtgtacaagtgccccaaatgctgcagcatcaagcccgaccgagcccaccactgcagtgtttgtaagcggtgcattcggaagatggaccaccactgtccctgggtcaacaactgtgtaggcgagaacaaccagaagtacttcgtcctgtttacaatgtacatagctctcatttccttgcacgccctcatcatggtgggattccacttcctgcattgctttgaagaagattggacaaagtgcagctccttctctccacccaccacagtgattctccttatcctgctgtgctttgagggcctgctcttcctcattttcacatcagtgatgtttgggacccaggtgcactccatctgcacagatgagacgggaatagaacaattgaaaaaggaagagagaagatgggctaaaaaaacaaaatggatgaacatgaaagccgtttttggccaccccttctctctaggctgggccagcccctttgccacgccagaccaagggaaggcagacccgtaccagtatgtggtctgaaggaccccgaccggcatggccactcagacacaagtccacaccacagcactaccgtcccatccgttctcatgaatgtttaaatcgaaaaagcaaaacaactactcttaaaactttttttatgtctcaagtaaaatggctgagcattgcagagaaaaaaaaaaagtccccacattttattttttaaaaaccatcctttcgatttcttttggggaccgaagctgctctcttttccttttaaaatcacttctctggcctctggtttctctctgctgcctgtctggcatgactaatgtaaagggcgctgtctcgcgctgtgcccattctactaactgagtgagacatgacgctgtgcgtggatggaatagtctggacacctggtgggggatgcatgggaaagccaggagggccctgacctcccactgcccaggaggcagtggcgggctccccgatgggacataaaacctcaccgaagatggatgcttaccccttgaggcctgagaagggcaggatcagaagggaccttggcacagcgacctcatcccccaagtggacacggtttgcctgctaactcgcaaagcaattgcctgccttgtactttatgggcttggggtgtgtagaatgattttgcgggggagtggggagaaagatgaaagaggtcttatttgtattctgaatcagcaattatattccctgtgattatttggaagagtgtgtaggaaagacgtttttccagttcaaaatgccttatacaatcaagaggaaaaaaaattacacaatttcaggcaagctacgttttcctttgtttcatctgcttcctctctcaccaccccatctccctctcttccccagcaagatgtcaattaagcagtgtgaattctgactgcaataggcaccagtgcccaacacatacagccccaccatcatccccttctcattttataaacctcaaagtggattcactttctgatagttaacccccataaatgtgcacgtacctgtgtcttatctatattttaacctgggagactgttgtcctggcatggagatgaccatgatgctggggttacctcacagtccccaccctgttgaaagtttgacatttgggccatcccattgggcagaatccacagacacacctaagcctgtggcactgggacagaatagattttccatttgagaggcacttcctgtgtcagtcttgtttgaaggaggtggtgatggtggatagaggtgaaggaggtagggagtgccctccaagtgcaaaaataacaaatatgattattgaccatcggggaattctcacacattgatttgttttttaagcaattgccagaaacccccttttttagcttttgcttggggtgggggtaggagttaaggtttattcaatcctgtcctgggtagggcgaaagttaatctagccatgtgatttttcagaaaagtaagtggaacatgctgccacttttcaattctgtcagtgcttccacatggaaacaaaatgcaataaaatttttcc

SEQ ID NO: 61952 - DNA, 563 bp, Homo sapiens
  misc_feature (1)...(563): n = a,t,c or g
acccagtctcttccccaactctccccacccctggtgctctccgccccgcttgcctcccgttcatccccgcccgctccatccgggtcgctgacggctgtctctggactggacagcagtggcgtccgcttttctctaaggaacccgataagaactccattttctgttgatgtggagacatagggtacctccaactttccggggtttcagaagagaattttttattgaaactggaagaccaaaataattacaagcatgttgtgctggggaaatgcatcctttgggcagctaggtttgggtggaattgatgaagaaattgtactagagcccagaaaaagtgacttctttataaataaaagggtccgagatgtaggatgtggactcagacatactgtgtttgttctggatgatggaacagtgtacacatgtggatgtaatgatctaggacagctaggtcatgaaaaatccagaaagaaaccagacagagtttcgctcttgttttccagggccgagtgcaattgcggccatttcgggtnaccgaanctttgcntccaggttcaagaatt

SEQ ID NO: 61953 - DNA, 436 bp, Homo sapiens
cccacgcgtccggttgacacaggagtgctcaggggagcagcatcacaagagggcagatcgaaagcatcgtccttgctgaaaaaatggcagaggtggaagcggtacagctgaaggaggaaggaaaccggcatttccagctccaggactacaaggccgccacaaatagctacagccaggccctgaagctgaccaaggacaaggccctgctggccacgctttatcggaaccgggcagcctgtggcctgaaaacggagagctacgtccaggcagcttcagatgcctccagagccatcgacatcaactcctcggacatcaaggctctgtatcggcgatgccaggcactggagcacctggggaagctggaccaggccttcaaagacgtgcagcgttgtgccaccctcgagccacggaaccagaacttccaggagatgctgag

SEQ ID NO: 61954 - DNA, 589 bp, Homo sapiens
aacagtccccggtgctttgcaagggttcagattgcagaacagtcacatatgggtatttgtagttataaatacttgaccgttctctaggggtggggtttccaactctttaaacaaccctgttgcctgttatcaagctgactttttgctccaagtgccagaattgattgtggttaggacatcttacgctgagaaataaataaaatggaacataatgggtctgcttcaaatgctgataaaatccaccagaatcgcctgtcgagtgttacagaagatgaagaccaagacgctgctcttaccattgtgactgtgctggacaaagtagcctccatcgtggacagtgtgcaggcaagccagaagagaatagaagagagacacagggaaatggaaaatgccataaaatccgtccagattgacctgttgaagctttcacagtcgcatagcaatacagggcatatcattaacaaattgtttgagaaaacccgaaaagttagtgctcacattaaagatgtgaaagcccgggtggagaagcaacaaattcatgttaaaaaagttgaagtcaagctgggagagagaaatgactgagatgaat

SEQ ID NO: 61955 - DNA, 534 bp, Homo sapiens
gaactccttggaatggcataaccatttgacctttcaaaggttctccagcagtatttaactgatgcaaaaggaacacacttgcaattttctacttttgacatgacagaccctcctcttagttcacacaatgttcaaaaggcacaagtccctcgcttcggaacgcaagagagcattactttcccaaagagctacacggttcatactgaaggatgatatgagaaattttcactttttgtcaaaacttgtactctcagcgggccctctaagaccaactccagcagtcaaacattcaaaaacgactcactttgagattgaaatatttgatgctcaaacaaggaaacagatatgtattctggataaggggacacaatcatctactattcatgatgttaagcaaaagtttcacaaagcatgtccaaagtggtacccttctcgagttggtctgcagctagaatgtggcgggccttttttgaaggactacattaccattcaaagtattgcagcttcctccattggcacactgtatgctacaag

SEQ ID NO: 61956 - DNA, 1065 bp, Homo sapiens
tccagagtcccgttgctccgccgcgatattcagtaaaccactgggagtccggcagcatggaggcagcgcgccctcccccgacggcagggaagttcgtggtggtcggcggcggcatcgcgggcgtcacttgtgcggagcagttggctactcactttccatcggaagatattctcttggtaacagcttctcctgttattaaagcagttacaaatttcaagcagatttctaaaatattggaagaattcgatgttgaagaacaatcaagtaccatgttaggaaaacgctttcccaacattaaggttatagaatctggcgtaaagcaactgaagagtgaagaacactgcattgtaacagaagatggcaatcagcacgtatataagaaactctgtctgtgtgctggagctaaaccaaagttgatatgtgaaggaaatccttatgtattaggaatccgtgatacagacagtgctcaggaatttcagaaacagcttactaaagctaaaagaataatgatcatagggaacggtggtattgcacttgagttattgtatgaaattgaaggctgtgaagtgatttgggccattaaagataaagctatagggaatactttcttcgatgcaggagcagctgaattcttgacttcaaagctcattgctgaaaaatcagaggctaaaattgcacataaaagaaccagatatacaactgaaggaaggaaaaaggaagctagaagcaaatctaaagcagataatgtaggaagtgcattgggaccagattggcatgaaggcttgaatcttaaaggaacaaaagagcaatactcacagcatcctcaccagaagtaaactccatctcagataactacgttctttgctcatccatgagaaacaacaactcatcttttcaaattttatcatgagattgcagcaatgtagtctcatcttcaggattcatttctaattacagttcttttgttatttccaccatatctgcctttctccattgaaatcttgaatccctcaaagtcatccatgaagttttctcataagattcaccttgaaactatgtgtgaag

SEQ ID NO: 61957 - DNA, 676 bp, Homo sapiens
accgatcgaagatccctcggagcgacccacgcgtccggacgccagcgcctgcagaggctgagcagggaaaaagccagtgccccagcggaagcacagctcagagctggtctgccatggacatcctggtcccactcctgcagctgctggtgctgcttcttaccctgcccctgcacctcatggctctgctgggctgctggcagcccctgtgcaaaagctacttcccctacctgatggccgtgctgactcccaagagcaaccgcaagatggagagcaagaaacgggagctcttcagccagataaaggggcttacaggagcctccgggaaagtggccctactggagctgggctgcggaaccggagccaactttcagttctacccaccgggctgcagggtcacctgcctagacccaaatccccactttgagaagttcctgacaaagagcatggctgagaacaggcacctccaatatgagcggtttgtggtggctcctggagaggacatgagacagctggctgatggctccatggatgtggtggtctgcactctggtgctgtgctctgtgcagagcccaaggaaggtcctgcaggaggtccggagagtactgagaccgggaggtgtgctctttttctgggagcatgtggcagaaccatatggaagctgggccttcatgtggca

SEQ ID NO: 61958 - DNA, 575 bp, Homo sapiens
tgagtctcaactgtagtaacagtcttcctcaattccaatcccttggagttgatgtcagtcacttgggcattaacacttttggacgataatctagcaacagacgtaagaacccgcgccggagcggacctttggcttggcttgtcagggcttgtccaggagttccgctcctctctccaaccggggtccccctccagcgaccctaaagcttcccagacttccgcttcaattcctgtccgccccccacgcccacctcaacgtggagcgcagtggtctccgaggagcgccggagctgccccgcctgcccagcggggtcagcacttcgcatcaaggcccaagaaaagcaagtcctccagcgttctgagcacccgggcctgagggaaggtcctaacagcccccgggagccagtctccaacgcctcccgcagcagcccgccgctcccagaatcctgtgaagcagctccagctatgtgtgaagaagaggacagcactgccttggtgtgtgacaatggctctgggctctgtaaggccggctttgctggggacgatgctcccagggctgctttcccatccattgtg

SEQ ID NO: 61959 - DNA, 832 bp, Homo sapiens
ttaacattcctgatcgattgactctgtccatataacctcccttactgaatctgattacttttgccttgcttttcttttaaaactggcattaattttccacacttttaaggggtttgaccatgggagttttccagccaagtcttcaaaatcctttagaacttcttcctttgtttgtttgaactggtaatcttgaaactcctgaaccaccacaaataagttatcaactgatctcagacaatgaacctgtgccagactttccactgaaatgacaaaatcagcagagaccgtggcaagatatattttgcatgatgacccaagtttctctctgacttcatctgcagctgtttgctcaaagccagtaggtacagtggctccaatagtgactagaagctcagattcacttccgaggtcgctttctgtcacttgtacagacttctggttctcatgaaggttcacatctaggagttggttagtggcttcttcaatgtcacacatgttggctgtgcttccaagatccctaacactgtctctttaaaagcagtactgtcgtctcccaactcccacctacagggcccgggaatcctagggagcgggtaaaggcctgggagagggagcaagatgggctccgccacgagatccgcctgaagtccggctcggcgccggcctcaactgcaagaggaaggccacccctctctccccaagctgaaacaccagaagagccacactcggccgttcccaaccgccgccagttaccggccgccagcgaagaccctttcagctcccacactccattggcctcttgcggtcaggtcacgccgccggaagccgcccc

SEQ ID NO: 61960 - DNA, 882 bp, Homo sapiens
cgcctgcgccaccggcgcacacctgtaggctgaagtcgcgcatgctagatgggaacgttgtttcttctcccctaccccttttctgtggggctgttttagggacagactgcttccgggtcgaagggcttgcttccggagagcgggaaggctaaaacgcggtagctaaactgcagccaactttggttgtgtgtggaaaaggctttagccatggacaggagtggctttggagagatatcatcccctgtaatccgggaggcagaggtgacacggactgcacggaaacagagtgctcagaaaagagttttacttcaggcatctcaagatgaaaattttggtaatactacaccaagaaaccaggttatccctcgaactcctagctcatttcgacagccttttaccccaacaagccgaagcttactaaggcagccagatatttcctgcattcttggaacaggagggaagtcgccccgacttacgcagtcttcagggttctttggaaatctctccatggttactaatctggatgacagtaactgggcagctgcattttcatcacagcgttccgggctgttcacaaacacagagccccacagtataacagaagatgtaactatcagtgctgttatgttacgtgaggatgatcctggagaagctgcatccatgagtatgttttctgatttcctgcagtcttttctgaagcactcttcgagtacagtttttgatcttgtggaagagtatgaaaacatctgtggtagtcaggtgaatatactgagtaaaatagtgagtcgagcaacacctggacttcaaaaattttcaaaaacagccagtatgctctggcttcttcaacaggagatggtcacatggaggctgctggcttctttg

SEQ ID NO: 61961 - DNA, 645 bp, Homo sapiens
ctgcgctactgccggagcggggcggttatggcggctccatattaacagcctcctcctcctccgccgccgccgccgtctcctcctcctcctcctttccctcccgcccgcgctctaagccatctccgccttcaccctgacgcctgcctcttcccctcacctttccccctcccctgttctaccatgcccggcatgatggagaaagggcccgagttactggggaagaaccgatcggccaacggcagcgccaagagcccggcaggcggcggcggcagcggcgcctcgtccaccaacggcgggctgcactactcagagcccgagagcggctgcagcagcgacgacgagcacgatgttgggatgagagtcggagccgaataccaagctcggatccctgaatttgatccaggtgctacaaagtacacagataaagacaatggagggatgcttgtatggtctccatatcacagtatcccagatgccacatgtaagttttcttaagttgaatggtaatgtcagcaggagtttatcagccaattcacaatatgacttacgtttggttttgggtcttatagattctcataagaaaacagccctgcctgagctttagcttccatgccttcacttcttttttaatggaggctgtgatac

SEQ ID NO: 61962 - DNA, 845 bp, Homo sapiens
gtagatttggttgctgtgtacgtggaagaagcaagcgcatgcgcacatgggcccccttcgtctcagctgtgcgggaacggccgagggtaacatcccgggctcgcgggaggctgtcagggtaatggccacacgctgacagaaccagccgagtggaaaaggggagcgaagccgttcctctgcacccttccccaggcctgaggccttcccgcttggtgctgccgccgccactgccggctgaggaggggcgatgagttggttcaacgcctcccagctctccagcttcgctaagcaggccctgtcccaggcccagaagtctattgacagggttctggacatccaggaagaggagccgagcatctgggccgagaccattccgtatggagagccgggaataagttcccctgtcagtggaggatgggatacttcaacctgggggttgaaatcaaacactgaacctcagagtccaccaatagcctctcctaaagcaatcacaaagccagttcggaggactgtggtcgatgaatctgaaaatttcttcagtgcctttctctcgccaactgatgtccagaccattcagaagagtccagtggtatcaaaacctccagcaaaatcacaacgaccagaagaagaagtgaaaagcagcttacatgaatccttgcacattggccagtcaagaactcctgaaacaactgaatcacaagtaaaagactcttctttgtgtgtttcaggggaaactctggcagcaggtacttcatcacctaaaacatcacaaagtgtattcggtgaacgatgttcagtccccaaatttggaagttagggcggcaacttctgcttgaaataagaca

SEQ ID NO: 61963 - DNA, 639 bp, Homo sapiens
cggacgcgtgggcgtatttgcgcgtatgagatgcattgtctcttcctctggagttgagctgaatgaatacctccgaagccgttttgttctccaaatgggaatagctccactataccagcctcgtcttccttccgggggacaacgtgggtcagggcacagagagatatttaatgtcaccctcttggggctttcatgggactccctctgccacattttttggaggttgggaaagttgctagaggcttcagaactccagcctaatggatcccaaactcgggagaatggctgcgtccctgctggctgtgctgctgctgctgctgctggagcgcggcatgttctcctcaccctccccgcccccggcgctgttagagaaagtcttccagtacattgacctccatcaggatgaatttgtgcagacgctgaaggagtgggtggccatcgagagcgactctgtccagcctgtgcctcgcttcagacaagagctcttcagaatgatggccgtggctgcggacacgctgcagcgcctgggggcccgtgtggcctcggtggacatgggtcctcagcagctgcccgatggtcagagtcttccaatacctcccgtcatcctggccgaactggggagcgatcccacgaaaggct

SEQ ID NO: 61964 - DNA, 856 bp, Homo sapiens
ggcacgaggtggctgaagaggcaggaggaacagtgtatccacagcgtgggaccatgccaggcacaaaacggtttcaacatgtcattgagaccccggagcctggcaagtgggagttgactgggtacgaggcagctgtgccaatcacggagaagtcaaacccactgacccaagatctagacaaagcagatgctgagaacattgttcgactgctagggcaatgtgatgctgagatctttcaggaggaggggcaagccctgtccacataccagagactctacagcgaatccattctgaccaccatggtacaggtggctgggaaagttcaggaagtgctgaaggagccagatggggggctggttgtgctgagtggagggggcacctctggccggatggcattcctcatgtcggtgtcctttaatcagctgatgaaaggtctgggacagaaacctctttacacctacctcattgcaggtggtgacaggtctgtggtggcctctagggaggggacagaagatagtgccttgcacgggattgaggaactgaagaaggtggctgccgggaagaagagagtgattgtcattggcatttctgtgggactctctgctccctttgtggcaggccagatggactgctgcatgaacaacacagctgtcttcttgccagtcctggttggcttcaatccagtgagcatggccaggcacccctttcctcccccgaggatcctcagatctctcactgtcttcccttccctgagagcccctcattaccaaatcacctccctcttattctctatgtcagtggtcactcttatttcagaataaatcaacatattaaaccagtaaaaaaaaaaaaaagg

SEQ ID NO: 61965 - DNA, 556 bp, Homo sapiens
cgataaaacagacatctcttgttttccagatactacgggtcataatccctaactccaatcactggcaactcctgagatcagaggaaaaccagcaacagcgtgggagtttggggagaggcattccataccagattctgtggcctgcaggtgacatgctgcctaagagaagcaggagtctgtgacagccaccccaacacgtgacgtcatggccagtagggaagatgagctgaggaactgtgtggtatgtggggaccaagccacaggctaccactttaatgcgctgacttgtgagggctgcaagggtttcttcaggagaacagtcagcaaaagcattggtcccacctgcccctttgctggaagctgtgaagtcagcaagactcagaggcgccactgcccagcctgcaggttgcagaagtgcttaaatgctggcatgaggaaagacagtaactgtgctatgctcccaaaggaggatgtaactggggctcacagaagttaatttgcccaagttaattcaactaaaaacttgtgcaggccgagcacggtggctcacacctct

SEQ ID NO: 61966 - DNA, 766 bp, Homo sapiens
tttcgtaaggcatgcctcgtgcagtgcccaccctctgttactcaaaaatgtagttcacctccgcgacctcaccccttcttcccttagcatgtgaaaatgacggcttggcagtttcaccagctcacaggagagcgtccagctgctctgctcctggtataatcctgggcctccaaaactgaaacgagcacatgaagaggactgtcagaaggacgtagaaggcacggttttactgtgaggagcaaagattctttacctacgcattttacaagaaatgtgcagaaagccattgataaatatacctgcaaatccttgtcatccttttcctccagcggaagccatacacccacgggagcccacacctcttggtctgggtcggccacacagagctctaccaccggctcatccacggagaggggctccgtttattcctggagagatgacgaatttgacgaagccagttcacagtcagtgcagcggttactctgggaggtggaggaaatgttatttgaagggaaagtgaaccctcagacccaaagtctgctggccgaatgcggggagtggacaagaagatccctccatttgagagtattaggaagacagctgatcctgcccactgacgaaggcgtccagcatttccagggcagcactcctgcctccgcagtccacagacccccgctcagtgcctgcggacacagcagcaacatcagagagttgtgcatttctggctctcaaatagtcccagcagcactctcagcctctgccctgc

SEQ ID NO: 61967 - DNA, 438 bp, Homo sapiens
  misc_feature (1)...(438): n = a,t,c or g
gcttgaatggtggagccgaagctcggctcgtgaacacacactgacagctatagggcaggcggcggcaccgtccccgcttcccctcggcggcggggtgtcccgtcggcggccctgaagtgacccataaacatgtcttgtgagaggaaaggcctctcggagctgcgatcggagctctacttcctcatcgcccggttcctggaagatggaccctgtcagcaggcggctcaggtgctgatccgcgaggtggccgagaaggagctgctgccccggcgcaccgactggaccgggaaggagcatcccaggacctaccagaatctggtgaagtattacagacacttagcacctgatcacttgctgcaaatatgtcatcgactaggacctcttcttgaacaagaaattcctcaaagtgttcctggagtacanactttattaggagcg

SEQ ID NO: 61968 - DNA, 987 bp, Homo sapiens
gaatgacagggtccagaaactggcgagccacgagggacatgtgtaggtatcggcacaactatccggtacgtacctgcccctgccccgggacacagaaccctcccgccagctgctcttctcaggcagaatgtcccaggttctactggaaggctggcctggcttgctgtgccagggccacagttctgggcaggaccctgcctggggcacagcctggtatagattcagagccctgcccttcccctctcgcgggagaccgggggcatccccctacttttctgagcttcagcacaccgtcgccttgcaaacatggccatagtgccagcctcgtgatgcacacgtgtggggtccgtgataccgcccacacagcaccccacccccatgccagccctgtctcctgcaggttgtcctcagccattaccctccacacccctgaatcacggaaacccctgtgctgccttcagggtgctgaggaggggacctgccaggcctggcctggctggcgaaatggggaaggggggtccctggggcttggaggcagctgctgtcctctgaatggcccccacctgcagagtgaggagccaggcgggctcttggggtattgggccagcctggaggtttgcagatgcgcctccccgaaagacacggagggccccagggcagcttgtgtctgatggatccctgctgtcccctttctctggctcttcaggatctggtggaacgagactgcaatggggacacgccaaacctgagtttctacagaaatgagatccgcttcctgcccaacggtaggtgcctcacaaccactggcagccggcacttccatccttgcctggcaggggtggtccactgggccctggtttgggatgtacccggcgattaccagggccacggctttcaaatagccccacagtgccccctggaggcggccagagggactccaggatccccagcttgggatctccgcagtggtgtttgggtcggggtggg

SEQ ID NO: 61969 - DNA, 509 bp, Homo sapiens
acaaacaggtggggtcaagcacggagagagaactgcccagggtataaaaagggcccacaggagaccggctctaggatcccaaggcccaactccccgaaccactcagggtcctgtggacagctcacctagtggcaatggctccaggctcccggacgtccctgctcctggcttttgccctgctctgcctgccctggcttcaagaggctggtgccgtccaaaccgttccgttatccaggctttttgaccacgctatgctccaagcccatcgcgcgcaccagctggccattgacacctaccaggagtttgaagaaacctatatcccaaaggaccagaagtattcattcctgcatgactcccagacctccttctgcttctcagactctattccgacaccctccaacatggaggaaacgcaacagaaatccaatctagagctgctccgcatctccctgctgctcatcgagtcgtggctggagcccgtgcggatcctcatgagtatagtccccaac

SEQ ID NO: 61970 - DNA, 768 bp, Homo sapiens
  misc_feature (1)...(768): n = a,t,c or g
acctgcttgcggtgtagtgggcggaccgcgcggctggaggtgtgaggatccgaacccaggggtggggggtggaggcggctcctgcgatcgaaggggacttgagactcaccggccgcacgccatgagggccctgtgggtgctgggcctctgctgcgtcctgctgaccttcgggtcggtcagagctgacgatgaagttgatgtggatggtacagtagaagaggatctgggtaaaagtagagaaggatcaaggacggatgatgaagtagtacagagagaggaagaagctattcagttggatggattaaatgcatcacaaataagagaacttagagagaagtcggaaaagtttgccttccaagccgaagttaacagaatgatgaaacttatcatcaattcattgtataaaaataaagagattttcctgagagaactgatttcaaatgcttctgatgctttagataagataaggctaatatcactgactgatgaaaatgctctttctggaaatgaggaactaacagtcaaaattaagtgtgataaggagaagaacctgctgcatgtcacagacaccggtgtaggaatgaccagagaagagttggttaaaaaccttggtaccatagccaaatctgggacaagcgagtttttaaacaaaatgactgaagcacaggaagatggccagtcaacttctgaattgattggccagtttggtgtcggtttctattccgccttccttgtagcagataaggttatttgcnnncttcannntct

SEQ ID NO: 61971 - DNA, 390 bp, Homo sapiens
aggtcttggagcaagagaacttggcaggctctccccatggcagtcttattcctcctcctgttcctatgtggaactccccaggctgcagacaacatgcaggccatctatgtggccttgggggaggcagtagagctgccatgtccctcaccatctactctacatggggacgaacacctgtcatggttctgcagccctgcagcaggctccttcaccaccctggtagcccaagtccaagtgggcaggccagccccagaccctggaaaaccaggaagggaatccaggctcagactgctggggaactattctttgtggttggagggatccaaagaggaagatgccgggcggtactggtgcgctgtgctaggtcagcaccacaactaccagaactgg

SEQ ID NO: 61972 - DNA, 695 bp, Homo sapiens
agggcgacccacgcgtccgggacgcgtgggcggaagatggcggccggcgaaaggagctggtgcctgtgcaagttgttgaggtttttttattcattattcttccctgggctcattgtatgtggaactttatgtgtgtgtttggtcattgtcctttggggaatcagactgctgctacagagaaagaaaaaattagtgtcaactagcaaaaatgggaaaaatcaaatggtgattgcattttttcatccatactgcaatgctggtggaggaggagaaagagttttatggtgtgctttaagagccctgcagaaaaagtatcctgaagcagtttatgttgtttataccggcgatgttaatgtcaacggtcaacagatactagaaggtgctttcagaagatttaacatcagattaattcacccagtgcagtttgtttttttaaggaaacgctatcttgtggaagattcactgtatcctcacttcacactgctgggccaaagtctaggatccatttttcttggctgggaagctctaatgcagtgtgttcctgatgtttacattgattcaatgggatacgcttttacgcttcctctgtttaagtatatagggggctgccaagctggaagctatgttcattatcctactatcagcaccgacatgctctctgtagtgaagaatcaaaatattggaattaataatgg

SEQ ID NO: 61973 - DNA, 206 bp, Homo sapiens; identical to SEQ ID NO: 61831

SEQ ID NO: 61974 - DNA, 503 bp, Homo sapiens
gatcacgtgggcagctccgggcgcggcgcttgttttggtttccttctaacttgcccacggcagcttcggggtgagcgactttcctgcaccagctgccgcgcctgctcacaccctgacctcgttttcgggctctctgagcccgcagttccgcaagcccctggggcgggctcctgccatgccgctagtccgctacaggaaggtggtcatcctcggataccgctgtgtagggaagacatctttggcacatcaatttgtggaaggcgagttctcggaaggctacgatcctacagtggagaatacttacagcaagatagtgactcttggcaaagatgagtttcacctacatctggtggacacagcagggcaggatgagtacagcattctgccctattcattcatcattggggtccatggttatgtgcttgtgtattctgtcacctctctgcatagcttccaagtcattgagagtctgtaccaaaagctacatgaaggccatgggaaaa

SEQ ID NO: 61975 - DNA, 343 bp, Homo sapiens
ggttaccataggaggaattttttccattgatagtgtttcctttactttttccagaatgactttttcagcttccgtttttacttcttgttcttgctttttcactaattttacttggggaggcactgctgttttctgagatgatgattctgtaggaacaggcataggagatgctttgggtcctgatggtgcaggtggcatgtgtgttttaaaatttcttagttaaaaaaaaatcataaaagctttaaatattgtacctgattcattatggttgttaaaaattatggagtgtaagaaatataaatttgtattgcaaaaaaagtcgacgcggccgcgaattccagat

SEQ ID NO: 61976 - DNA, 488 bp, Homo sapiens
ctgcatccgggtccgtgggattcgcgctccactggtcagctggggtcgctctcgggtggttgggtgttgcttgttcccgctgttccagcgtcgaaaaaccattgggtctgccggtttgaacttgttctggaagctgtgcgtcaccgtaatgaggcttgtaattcttgataactatgacttggctagtgaatgggcagccaaatacatctgtaatcgcatcattcagttcaaacctggacaggacagatattttacactgggtttaccaacagggagtacacctttaggatgctataaaaaactaatagaatatcataagaatggacacctttcttttaaatatgtgaagacctttaatatggatgaatatgtaggacttccaagaaatcatcctgaaagctaccattcttatatgtggaataatttttttaagcatatcgatatagatcctaataatgcacatatccttgacgggaatgctgcagatt

SEQ ID NO: 61977 - DNA, 1347 bp, Homo sapiens
ttttttttttttgatgtagggctttggcctctttattttctttttacagtttattccacaagtaaaagacttcacaaagcactatggctctgactattccccgaatgagctgctgaggatggagctggctattctggacagactgcactgggacctctatattgggacgccgctggacttcttgactatagtgagtaaggaggtgtttacagagtctaccctaaactcgtttgtgcctttggaacagctgtttacaacatgggatggcaaagcacaggcgtgcacacgcccttgcacatgcaccacagtgaggtgacccacaaggctcatgacatacggaagagtgaaaaggtatcttaaatccaacacagttccaccagactcccacttctaaaggacattaaattaactttacaaagatttttagacggcactattatggtgagtttctcttttaaatacacactgcaaaaatatttaactttccattctatgaatactgtacataaatatctgtctgcttttgctacactttacacacattcacttagctgtctttattcacctacacacaatccttattgaagctttagaccatattgatctggcacttaaaaaaatatcatacattagtttgtatttgttttagttgggggaatgatggtcatccttaaggatatgattctgttagtaaggcaaaattatgcaatgtggaaatctcatggggttttggtttgttatgaagcatgaagattaaattactaaagactgtttcattacgaaaactggcccccgttgccaagttgcagagtttcgtcttatgataagcagatacaagtaacttttctgctaccttggtcttgaatagtatgtttctatttttcagaatggaaacattgtcatctaggtactttccgctcataacgatgatgtcacaaagcagacttttttttttttttggtcccggagtggaagctcagcttggccacaggatgggcattaagcctcaagccccttacggagccatggataggaatgaaaagggttgggcaacatttgatgttccctgatggaaatttaaattgtttgcacttttgatcattgatataggaaaagtatggcgttttctgttctaacattaaaaaccatggtctccagttccatgccctggtggtcctgagctggccccatgtgttggagctgctgcctcagaggaatccttccctccacgtcgcatccctgaccaggcagctgcagcactgtatggcgggccaccagctgctgcagttcaagggctccacactggccttggtcatcatcaccttagagctggagaggctcatgccc

SEQ ID NO: 61978 - DNA, 874 bp, Homo sapiens
ttttgttacgttgacatctcaaacaccaaacgccaagcttggcacgaggggcactggtgtgaaggaacatggccctgtatcagaggtggcggtgtctccggctccaaggtttacaggcttgcaggctacacacggcagttgtgtcgacccctccacgctggttggcagagcggcttggcctttttgaggagctgtgggctgctcaggtaaagagattagcaagcatggcacagaaggaaccccggactattaagatatcacttcctggaggccagaaaattgatgctgtggcatggaacacaaccccctaccaactagcccggcagatcagttcaacactggcagatactgcagtggctgctcaagtgaatggagaaccttatgatctggagcggcccttggagacagattctgacctcagatttctgacattcgattccccagaggggaaagcagtgttctggcactccagcacccatgtcctgggggcagcagctgaacaattcctaggtgctgttctctgcagaggtccaagtacagaatatggcttttaccatgatttcttcctgggaaaggagaggacaatccggggctcagagctgcctgttttggagcggatttgccaggaacttacagctgctgctcgacccttccggaggctagaggcttcacgggatcagcttcgccagttgttcaaggataacccctttaagcttcacttgattgaggagaaagtgacaggtccaacagcaacagtatatgggtgtggcacattggttgacctttgccagggcccccaccttcggcatactggacagattggaggactgaagctgctatcgaactcatcatccttatggaggtcttcaggggg

SEQ ID NO: 61979 - DNA, 658 bp, Homo sapiens
catgtattcagactctttagcatatacagtagagtttctaatgttgtcagcattccctagtgggcagttacaagttaggttgggattctaatcatattttatgatatctcacagattaaattgcactttgtctctgcccagtcttgattcccttttggccagcagtttttaggtctgtcagtactgcactgcaagaatggcagattttgggatctctgctggccagtttgtggcagtggtctgggataagtcatccccagtggaggctctgaaaggtctggtggataagcttcaagcgttaaccggcaatgagggccgcgtgtctgtggaaaacatcaagcagctgttgcaatctgcccacaaagaatccagctttgacattattttgtcaggtttagtcccaggaagcaccactctgcacagtgctgagattttggctgaaatcgcccggatccttcggcctggtggatgtctttttctgaaggagccagtagagacagctgtagataacaatagcaaagtgaagacagcatctaagctgtgttcagccctgactctttctggtcttgtggaagtgaaagagctgcagcgggagcccctaacccctgaggaagtacagtctgttcgagaacaccttggtcatgaaagtgacaacctg

SEQ ID NO: 61980 - DNA, 1002 bp, Homo sapiens
ataactttgtaacttcacttcagcctcccattgatcgctttctgcaaccattcagactgatctcgggctcctatttcatttacattgtgtgcacaccaagtaaccagtgggaaaactttagagggtacttaaaccccagaaaattctgaaaccgggctcttgagccgctatcctcgggcctgctcccaccctgtggagtgcactttcgttttcaataaatctctgcttttgttgcttcattctttccttgctttgtttgtgagtttgtccagttctttgttcaacacgccaagaacctggacactcttcactggtaacatattttggcaagccaaccaggagaaaagaatttctgcttggacactgcatagctgctgggaaaatgaacatcagtgttgatttggaaacgaattatgccgagttggttctagatgtgggaagagtcactcttggagagaacagtaggaaaaaaatgaaggattgtaaactgagaaaaaagcagaatgaaagggtctcacgagctatgtgtgctctgctcaattctggagggggagtgatcaaggctgaaattgagaatgaagactatagttatacaaaagatggaataggactagatttggaaaattcttttagtaacattctgttatttgttcctgagtacttagacttcatgcagaatggtaactactttctgatttttgtgaagtcatggagcttgaacacctctggtctgcggattaccaccttgagctccaatttgtacaaaagagatataacatctgcaaaagtcatgaatgccactgctgcactggagttcctcaaagacatgaaaaagactagagggagattgtatttaagaccagaattgctggcaaagaggccccgtgttgatatacaagaagaaaataacatgaaggccttggccggggttttttttgatagaacagaacttgatcggaaagaaaaattgacctttactgaatccacacatgttgaaattaa

SEQ ID NO: 61981 - DNA, 1671 bp, Homo sapiens
gcggcttgtgtccacgggacgcggtacggatgcttctccggccatgaggaaaccagccgctggcttccttccctcactcctgaagggtgagaggtttacacctgctccaacagactctccccgggctagtcctctccctcccgagagctctgcttttacggtttctggatcgcttcctcatggtggtcgcgctgggtcggctccctaggtcctgggatactcccatctccccccgcccgcggccggacctttgcctctgtctctagactccccccgccctggtcagcagggataaccctcaccccgttcctaatttgccagtctgggtctgtctgccctggtctcggagcgggttttggggttcggtcctttcatcatccggtcgcccgctccgcagtgctgctcctgcctctggcacctgccgcagcccaggattcgactcaggcctccactccaggcagccctctctctcctaccgaatacgaacgcttcttcgcactgctgactccaacctggaaggcagagactacctgccgtctccgtgcaacccacggctgccggaatcccacactcgtccagctggaccaatatgaaaaccacggcttagtgcccgatggtgctgtctgctccaacctcccttatgcctcctggtttgagtctttctgccagttcactcactaccgttgctccaaccacgtctactatgccaagagagtcctgtgttcccagccagtctctattctctcacctaacactctcaaggagatagaagcttcagctgaagtctcacccaccacgatgacctcccccatctcaccccacttcacagtgacagaacgccagaccttccagccctggcctgagaggctcagcaacaacgtggaagagctcctacaatcctccttgtccctgggaggccaggagcaagcgccagagcacaagcaggagcaaggagtggagcacaggcaggagccgacacaagaacacaagcaggaagaggggcagaaacaggaagagcaagaagaggaacaggaagaggagggaaagcaggaagaaggacaggggactaaggagggacgggaggctgtgtctcagctgcagacagactcagagcccaagtttcactctgaatctctatcttctaacccttcctcttttgctccccgggtacgagaagtagagtctactcctatgataatggagaacatccaggagctcattcgatcagcccaggaaatagatgaaatgaatgaaatatatgatgagaactcctactggagaaaccaaaaccctggcagcctcctgcagctgccccacacagaggccttgctggtgctgtgctattcgatcgtggagaatacctgcatcataacccccacagccaaggcctggaagtacatggaggaggagatccttggtttcgggaagtcggtctgtgacagccttgggcggcgacacatgtctacctgtgccctctgtgacttctgctccttgaagctggagcagtgccactcagaggccagcctgcagcggcaacaatgcgacacctcccacaagactccctttgtcagccccttgcttgcctcccagagcctgtccatcggcaaccaggtagggtccccagaatcaggccgcttttacgggctggatttgtacggtgggctccacatg

SEQ ID NO: 61982 - DNA, 915 bp, Homo sapiens
gcggaggcggtgagtgcgcggctccggggctggccgactccgctagtggcccggccggcctgtgctcgggggctccgggctctgggctctgggtgcgcggaccgggccaggctgcttgaagacctcgcgacctgtgtcagcagagccgccctgcaccaccatgtgcatcatcttctttaagtttgatcctcgccctgtttccaaaaacgcgtacaggctcatcttggcagccaacagggatgaattctacagccgaccctccaagttagctgacttctgggggaacaacaacgagatcctcagtgggctggacatggaggaaggcaaggaaggaggcacatggctgggcatcagcacacgtggcaagctggcagcactcaccaactacctgcagccgcagctggactggcaggcccgagggcgaggtgaacttgtcacccactttctgaccactgacgtggacagcttgtcctacctgaagaaggtctctatggagggccatctgtacaatggcttcaacctcatagcagccgacctgagcacagcaaagggagacgtcatttgctactatgggaaccgaggggagcctgatcctatcgttttgacgccaggcacctacgggctgagcaacgcgctgctggagactccctggaggaagctgtgctttgggaagcagctcttcctggaggctgtggaacggagccaggcgctgcccaaggatgtgctcatcgccagcctcctggatgtgctcaacaatgaagaggcgcagctgccagacccggccatcgaggaccagggtggggagtacgtgcagcccatgctgagcaagtacgcggctgtgtgcgtgcgctgccctggctacggcaccagaaccaacactatcatcctggtagatgcggacggccacgtgacctt

SEQ ID NO: 61983 - DNA, 390 bp, Homo sapiens
ggccagttgggatgaggcacacaccatatccaaattcccttggtgtgagactgcaccgtagatgcaacagagaagcctgtcagggggagtgagaggttgtaatagaagagaaactctggaaattggggatttgcttgatcattcagctagagtttaaggaaagcaagatgaggagatagcagaatgtacaaccagtattgatttgaatgatgatgcagaaatggaaaaacaatatcaaataccataggttggaactttgatattaaaaaaatattatgctactaaaatgttgctagtttataattatgtatacgggaattacttcattgatgtcttactccttacaaggagaatatattatacattttacaagaagaaatcaaggcaaag

SEQ ID NO: 61984 - DNA, 898 bp, Homo sapiens
  misc_feature (1)...(898): n = a,t,c or g
ttttttttttttgtgacagtttctccactttattagcctggagctcctccctgccagccccaggggctggtcgctggtccctgggcacagtgagcagggctgaggtcagacgggttcggcccttggccatggcagcttggttgggacagccgggccaagggaaaaaaaggtgcaaaagtccaaatgctggcacttcaggtgtggccggcacccagccaggcgcagtgggtgggcagggcgccatgcttctctcctggcgacaggtcggccgtgtagcagcgccccctcccagcagccactaggaacagctggtgattctcgccaggaactgctgcgcccaccactcgtctaggtcaatggggcacaaagttctgcagccggggattgggggtcctctccacgtactgcacaggccttggcccgccctcaccggctgggccaccatccagctgctgttgcacctgctgccaggcttcggacacaaagcggacattctcctcgtgggccactgtgtaggtctcctgggtcccctcgaaggatggggacgtggagggggcccgccggccattcacacgattgaacacaagccttggccctggactgcaggaagggaggagacggacatggttggtgcccatcccaggtgcggtgctgcctggcagaactcaggagcagccccgggccagcccactttccccagacttggccagcctaggcacttcctgaaccagagagagcagccacccacagcagccggtggcccaggcctctcttgcagtccccaagccatcggcagctcagctcacacctgcagccctgtgtcctgagggaagtgagtgactgtagggggganatgcnccgcctagaggttcgatcggtggaaagacagccgggcccc

SEQ ID NO: 61985 - DNA, 600 bp, Homo sapiens
ggaattcggctttgacatagttaacaagccctaggatgtctgcactggaaaaatgggagatctcatttagtccaaactcctcctctgttaagagacctggaataaagccactattaatcaactattagtttggtgactattagtcaaagccaggaccagagccagaagctggactttcctttcccctggccaaaccttgtgtgcacactgtttcttcccctccccaccctgtcaggccattgatgtgatggctccccattcacaccttcatttctcctctttaacgtgaccagggctgttctgaacctccttactttggcctcctctgcccagaacaggtcaggcccctctgcatccatcaaccaggtgtgctctcctgaccattctttgtcagatgggcaccttcactaactcagctctttggattgctttgcagattatgtttgagactttcaatgtcccagccatgtatgtggctatccaggcggagctgtctctctatgcctctggacgcacaactggtaggtggctgggcgggacagcaagctggttggagcgcactgccagagatgggattgaatggtcgctaacacggggcgg

SEQ ID NO: 61986 - DNA, 681 bp, Homo sapiens
tttttgctggtaaaaatcttttttaattactgatttttccacatggagttctgtttcaatctgtaatctctgatgtacccaaagcctccccaaggccacagtagtcatgctcccgggcagtatctgccatcccagccacttacattcccatcgtggtttgggcaagagagaggctttcccgcagccacagcagtgactgtctccaggatggaagactcctcagcgttgctgcctggagttcgctgcagcacgtccatcaggtttgtgatgaagaaattgttctggagcgcggccacccctttctcgggcaggatggaggtctggcggcacactgggcaggagagggttaaactgtgggcaggaatgtagttctgcaggcacctctcgcagaaagtgtgcagacaggggagaaccttgggattcttgtaccgttccaggcatatactgcaaatcagaaactgcttgtcaatctggcgcaccacaggacttgggatgttggtgccttcactggccatcctagaccactgacatggggggccggctgtctttgaccctgcacgctgctgtacgagacggcgactcgcttcgcgggaacagcgcgcgctccggagtggcctgggcctcacccctctgggcctgggcctcgctgcgcgcccagccagggccgaggtgccgtagctc

SEQ ID NO: 61987 - DNA, 447 bp, Homo sapiens
cggggcctgcaggcccccggtacgacaagatccggactccggcccggactacgaggcgctgccggctggagccactgtcaccacgcacatggtggcaggcgccgtggcagggatcctggagcactgcgtgatgtaccccatcgactgcgtcaagacccggatgcagagtctacagcctgacccagctgcccgctatcgcaatgtgttggaggccctctggaggattataagaacggagggcctatggaggcccatgagggggctgaacgtcacagcaacaggcgcagggcctgcccacgccctttattttgcctgctacgaaaagttaaaaaagacattgagtgatgtaatccaccctgggggcaatagccatattgccaatggtattgagccttcctgtgctggttcccccactttcccaactctttgggctttgctgctgtcagg

SEQ ID NO: 61988 - DNA, 1103 bp, Homo sapiens
cgccaagggcagagcaaacgggatatatcttagggtggaagatggataaataattctgtcacacgtgccctggcctctggagctcagctgccagtccacgtctagggaatcttagcatctgggaccaagacactttacagcaatcatcaccctttgcagaggaggtgagctcaccaggactcatctgccatttcagaccttttgctgctacctgccaggtggcccccactgctgacgagagatggtggatctctcagtctccccggactccttgaagccagtatcgctgaccagcagtcttgtcttcctcatgcacctcctcctccttcagcctggggagccgagctcagaggtcaaggtgctaggccctgagtatcccatcctggccctcgtcggggaggaggtggagttcccgtgccacctatggccacagctggatgcccagcaaatggagatccgctggttccggagtcagaccttcaatgtggtacacctgtaccaggagcagcaggagctccctggcaggcagatgccggcgttccggaacaggaccaagttggtcaaggacgacatcgcctatggcagcgtggtcctgcagcttcacagcatcatcccctctgacaagggcacatatggctgccgcttccactccgacaacttctctggcgaagctctctgggaactggaggtagcagggctgggctcagaccctcacctctcccttgagggcttcaaggaaggaggcattcagctgaggctcagatccagtggctggtaccccaagcctaaggttcagtggagagaccaccagggacagtgcctgcctccagagtttgaagccatcgtctgggatgcccaggacctgttcagtctggaaacatctgtggttgtccgagcgggagccctcagcaatgtgtccgtctccatccagaatctcctcttgagccagaagaaagagttggtggtccagatagcaggtcagtggctgttagctcacacccatcttcctagtcctcatgtgtacatacacattggcccaaaggcagtctataaagagacaatggtactgcgcctgtctgcatatagggtgtgttggccttgaa

SEQ ID NO: 61989 - DNA, 1072 bp, Homo sapiens
  misc_feature (1)...(1072): n = a,t,c or g
acgtggtgaggagtgggtttcgggcatgagaagtcacagggccgtttcctagtctctcttcacttctttgggccttctcaaaaaaagaaggctgccgtgggtaggctgggggcggagactatcgggaagagaaaattacttttcccactgaaacacacccaagtatatgcccagccttcatgaaagtgaacagagaaacgaagcgcctttatgtgggtggccttagccaggacatttctgaggcagacctacaaaatcagttcagcagatttggagaagtttcggatgtggagatcatcacacggaaagatgaccaaggaaacccacagaaagtttttgcatatatcaacatcagtgtagcagaagcggacctgaaaaaatgtatgtctgttttaaataaaacaaaatggaaaggtggaacattacaaattcaactagcaaaagaaagctttctgcacagattggcccaagagagagaagcagcaaaagctaagaaagaagaatcaacaacaggtaacgccaacttgttagaaaagacaggaggagtggatttccatatgaaagctgtgccagggacagaagtgccagggcataagaattgggttgtgagcaaatttggaagagtcttacctgttcttcaccttaaaaatcaacataaacgtaaaatcatcaaatatgatccctcaaaatactgccacaacctgaagaagataggggaggatttctcaaacaccattcctatatccagcctgacttgggaattagaaggagggaatgaccctatgagtaagaaacggcgaggagagttctctgactttcatggccctcccaagaagataataaaagtgcagaaggatgagagttccactgggtctctggccatgagtacaaggcccaggagggtaatagagagaccacccttaacacagcaacaggctgcacaaaaaagaacttgtgattccattactccttctaaatcatctcctgtacctgtttctgatactcagaaacttaaaaatctaccttttaagacttctggcttgggaactggcccaaggagagnaacagcctt

SEQ ID NO: 61990 - DNA, 757 bp, Homo sapiens
gatctcagaggcagctgagtttatcaaattcacagtcatcaggccgcttccagggcttgagctcagtaatggtgagtattctacagtgggaaaacgcaagatagaccaggagggccgtgtgtttcaagaaaagtgggagagagcgtatttcttcgtggaagtacagaatatttcaacatgtctcatatgcaaacgaagcatgtctgtgtccaaagaatataacctaagacgccactatcaaaccaatcacagcaagcattatgaccagtatatggaaagaatgcgtgacgagaagcttcacgagctgaaaaaagggctcaggaagtatctcttaggcttgtcagacaccgagtgtcccgagcaaaaacaagtgtttgcaaacccaagtccaacccagaaatcccccgtgcagcctgtagaggacctagctgggaacttatgggagaagttacgtgaaaaaatcaggtcttttgtggcatattctatcgcaatcgatgagatcacggatataaataataccacccagttggccatattcatccgtggtgtcgatgagaatttcgatgtgtccgaagaacttctggacacggtgcccatgacgggtacaaaatctggcaacgagatcttttcgcgtgttgagaaaagcctgaaaaacttctgtatcaactgggcgaaattagttagcgtggcctccactggcaccccaacgatggtggatgccaataacgggcttgtcacaatactgaagtgcagggtg

SEQ ID NO: 61991 - DNA, 1005 bp, Homo sapiens
tccgcggacgcgtgggggtctgttgcactttttgcagttccccttctgtgatgcgcttttatacaattagctataaggtttttgctttttttccccccaaattttgcttttttcccccaaaattaggggtgtgtttaaatagatacagtatttggatgtagtatttagatatagtacttagttactaaggattatgtttaaaatccttgatattgtgtgtatttgaagtttaagagaggaatttaatactttacaacaaacatactttatagcccctgacataatgtaatcatactacaagactaaatacttgttccacgattgctgatcttgtacgtaacgttttttgttctgattttggaattgtcctcaagacaatctcattcaacatttattcctttatttattaatttgtttttaaacaactaaaaaatacagtaaaattttacaaattgagtttcatttattggtatagttttgttattttatagtatcactttttatatggcaaagaagctatgatttgcttttaataggcttattgtaagtatgccattaactttttcattttgaaaactgtatttcctgttagaataaaactacataaatttcttttttaggaaagaatacccacctcatgtccaaaaagttgaaattaatcctgtaaggttaagtcggctccaaggtgttgaacgtataatgaagaaaacagaagagtccgaatcacaagtggagcctgaaattaagaggaaagtacaacagaaacggcactgtagtacctatcagcctactcctcctctatctcctgcttcaaaaaaatgtttaacccatttagaggatttgcaaagaaattgcagacaagctattactttgaatgagtctactggaccattattaagaacgtcaattcatcagaattctggaggacagaagtcacaaaacacaggattaacaaccaagaagttttatggcaacaatgtggaaaaggttccaattgatattatt

SEQ ID NO: 61992 - DNA, 621 bp, Homo sapiens
ctggcagtagggtgccaggttcaaagagcccgcggcgtcttcacgcccctgcgctcagctctagactcagtcgctcgctgagagacgccctggaacgtctgtgtagcctcagtcgctgagagacgccctggaacgtctgtggcagcctctgtcacagtgggacccgcactggcagcgggaggcagagggaggaccctggaacatcccggaagccgggaaatggacgcagtggcctttgaggatgtggctgtgaacttcacccaggaggaatgggctttgctgggtccatcacagaagaatttatacagatatgtgatgcaagaaaccatcaggaacctggactgtataagaatgatatgggaagaacagaatactgaagatcagtacaaaaatcctaggagaaatctaagatgtcatatggtagagagattcagtgaaagtaaagacagtagtcagtgtggagaaacatttagcctcattcgagatagtattgtgaacaacagcatttgtcctggagaagatccatgtcaaagcgctgagtgtgaagaagtcataatgggtcatttatcccttaatagccacatcagagttgattctggacaccaacccacatgagtatca

SEQ ID NO: 61993 - DNA, 924 bp, Homo sapiens
gatgagatgaagtttctgtcacgcaggctggagcgcagtggtgcgatctcggctcactgcaacctctgcctcttgggttcaagtgattcttgtgcctcagcctcctgagtagttgggattacatgtgcctgccaccatgcccagctaatttttgtattttttttagtagagatggggtctcaccatgttggtcagtctggtcttgaactcctgtagtaagtgagcttttattttattcaccataaaatatttgcatctcttactcctcaggttcttacataagacaacatttaattaattaagttaccattatagccatcgagggcctgagaaaccacatcctttgcaactgtctcataaaccaagtcctgggaggcatcgtgaagaactccatccaacttaaacgaccagtctgtctgttggttattgacaactcctctccgaatgtctttttttaagtgaatatcaatgcttcttttgtcatctccgtatctgatcatttcatgagcaaagtcatcggtgggtttgacacggacaaatgcatgaacttttttcctagtacccattctagcgttcaccaggcagcgacgctcccgggacgcgactgccgcaaccgaaaccacctgcactccccacgcggggctgcctggctgtgtacatagtcgccatggcaacgggtcgcttccggggattccggaagtgtcggggtggcggaaatgaagtccgaggtcctacgtcgaggatacgggtgaggtcatggccgaatcgggaagacgagagatggggccgattgatctagaaagacttcggcggatgcacatgcgaagtcaaggtcgagatagcgagggaacgaaggccgcacatgaaccaggaagcggagtggcagggcttccggcgccgaggagattcaactacggcggccgc

SEQ ID NO: 61994 - DNA, 849 bp, Homo sapiens
  misc_feature (1)...(849): n = a,t,c or g
ggcacgaggaacaaatgcgtatcttgtccatttgttggtacacaaaagccgttagttatcctacatttctttttatgcctaagggagcccagcaaaggggtcttagctgcaacaagatgctgcagtcattgaaccattcatttagtaattcctgacctctagaatgaacctaagcctatgggcactttggaggggctacccagtcctaccagcctccatgtagcggcagctctgctgcaagctctgcaccttagcagtgagggccacgattttgccatctaggacttgaaggtcagcatcactcaccatgtcaaactggtcctgccagacaaagagggaaaatacaagtgaactgttgtgaggcacaaagatgggaacacacacctgggaaggcaccatttggatatgctcaggaaccagccacaccccaaagtctccagagggtctgcagaaatagtgggagagtacttttgagaaattgttttcagttaaggagcggccccactaaaaaggtaggaaanaaaagctgaaatctaatgcttgtccttaagctactaggttgacaggatactgattaggacagaaatcttcccatttagtgataaaaccactacctgggctgaagcagttaagtaacattgttcccacggtggggaaacctagatcatgggtttccataatagatagaaactggacaggtgaagaagcatgatggatgggatggatggacttcttttcttcttccttcctgtcctttcttcccatccttctttccaccttcctctctccctccttccttccttcctttttcctccctccctccctctttctccctcccttccctctttt

SEQ ID NO: 61995 - DNA, 879 bp, Homo sapiens; identical to SEQ ID NO: 61900

SEQ ID NO: 61996 - DNA, 468 bp, Homo sapiens
tagcggctctccccgcgtccaatatggcggcagaagcagctggtgggaaatacagaagcacagtcagcaaaagcaaagacccctcggggctgctcatctctgtgatcaggactctgtctactagtgacgatgtcgaagacagggaaaatgaaaagggtcgccttgaagaagcctacgagaaatgtgaccgtgacctggatgaattgattgtacagcactacacagaattgacgacagccattcgcacataccagagcatcacagagcgcatcactaactcccgaaataaaataaagcaggtaaaagagaacctgctttcatgcaagatgctgctgcactgcaaacgggatgagcttcggaaactgtggattgaatggattgattcctggtttttcattcattagacaacttttggtacagtgtatatgctttactggtggttcagtagaaataatattggctgaaact

SEQ ID NO: 61997 - DNA, 912 bp, Homo sapiens
cgcgaccgtcccggaatgaccgggtcgacgatttcgtggggcctgcctgtgcgctctgcgcccgcccgcgcctaccctccatggcgtttatccggaagaagcagcaggagcagcagctgcagctctactccaaggagagattttccttgctgctgcttaacttggaggagtactactttgaacagcatagagccaatcacattttgcacaagggcagtcaccatgaaaggaaaatcagaggctccttaaaaatatgttcaaaatcggtgatttttgaaccagattcaatatcccagcccatcatcaagattcctttgagagactgtataaaaataggaaagcatggagaaaatggagccaatagacacttcacaaaggcaaaatctgggggtatttcactcattttcagtcaggtatatttcattaaagaacataatgttgttgcaccatataaaatagaaaggggcaaaatggaatatgtttttgaattggatgttcccgggaaagtggaagatgttgtggagacgttgcttcagcttcacagagcatcctgccttgacaaattgggtgaccaaaccgccatgataacagctattttgcagtctcgtttagctagaacatcatttgacaaaaacaggtaagtttctaatgatctttcctaattagaaaagtggaggacattttcatctgtatgcctcattcagcaaatccaagcctgctgtcatcattggtctcacccaaaacctgcttgtcttatagaatggctcatcctcagtgcaggagaactctctagggcttcctcaactcttctccatcctgatgtctgtcagtcagaaaggcctgatagatgcttcggtttctgcttctgtgatctcacattggtggtgcctcagttcaggccaccgtcacctg

SEQ ID NO: 61998 - DNA, 922 bp, Homo sapiens
ggcacgagggccgagagaaatttcggtactgcgcatgaaccgagcgtgacgttgaggtttgaaataaccggcaaagagtaaaggctgaaactagcttcctgaaagcttcgtagggcccgagccctgtgagcccaggttctgcgcccactaggaggtgtcatgctgactgctttttttaaagccctagaatcttggcttcggcgtttggggtaagctccgttctcgttctcaagcgcgtttccgcgaactctcgcgggattgacgggccgtctcgagagccggcatctcctaggagctagtcctggtcctcggctaggcggcttggggtcgcggcgtaactggggagccagcctgacgccggcggaccccgcctgtgatcctggcaacgatggatgatgacttgatgttggcactgcggcttcaggaggagtggaacttgcaggaggcggagcgcgatcatgcccaggagtccctgtcgctagtggacgcgtcgtgggagttggtggaccccacaccggacttgcaggcactgtttgttcagtttaacgaccaattcttctggggccagctggaggccgtcgaggtgaagtggagcgtgcgaatgaccctgtgtgctgggatatgcagctatgaagggaagggtggaatgtgttccatccgtctcagcgaaccccttttgaagttgaggccaagaaaggatcttgtagaggtatttttcgtgtaaacttgcttcctagcgcagtaatttacaaatacttgtcaatgatttagactgctgtgaattcgcctgtatgtatcgttaaaaaaagtcactttgccctcagtgaaagcttgaattatggggcaaacaataatgaacaccttatgttttttatagtgcttcatagtaaaaaaaaaaaaaacaaaaaaaaggcttctatgg

SEQ ID NO: 61999 - DNA, 719 bp, Homo sapiens
ggcacgaggcgagcggagttagcagggctttactgcagagcgcgccgggcactccagcgaccgtggggatcagcgtaggtgagctgtggccttttgcgaggtgctgcagccatagctacgtgcgttcgctacgaggattgagcgtctccacccatcttctgtgcttcaccatctacataatgaatcccagtatgaagcagaaacaagaagaaatcaaagagaatataaagactagttctgtcccaagaagaactctgaagatgattcagccttctgcatctggatctcttgttggaagagaaaatgagctgtccgcaggcttgtccaaaaggaaacatcggaatgaccacttaacatctacaacttccagccctggggttattgtcccagaatctagtgaaaataaaaatcttggaggagtcacccaggagtcatttgatcttatgattaaaggtatgaaaaaatagataacttttgtcttaattttaaattatgatataaggaaaaatttgttaatactattatgaattctgccaattactgtaatctggggatagtataacagcactataaatgtttttgtatgtgaccatttgtttgacaagatccatgtgtggatgaaatgttaggaaaagggaggcccagtggaagtgggctcacacctgtaatcccagtaggctagggaggttgaagcaagaggatggcttgagtctagaagt

SEQ ID NO: 62000 - DNA, 807 bp, Homo sapiens
gtgagcaccatcattacgccatgcttggcacgaggactggctgctggcagaactcgctcttctccttggcttttacttttggcagaagttctgcgaaggctgctccttgcggcgttgggactgagggtcacaggcacctatatttccgtttccggttcgcctccggagccatggcggcggcactgaagtgtctactgacattaggaagatggtgccccggccttggagtggctccccaggcccgggcgctcgccgccttagtacccggagtgacccaggtagataacaagtccggtttcctgcagaagaggcctcatcgccagcaccctggcatcctaaagctgccgcacgtgcggctgccacaggcactggctaacggtgcccagttattgctacttgggagcgctgggcccactatggagaatcaggtgcaaacactgaccagttatctctggagcagacatttgcctgtagagccagaggagttgcaaagacgggctaggcatcttgagaaaaaattcctggaaaacccagacttatctcagacagaggagaaacttcgtggagcagtgctacacgcactacgtaaaactacctaccattggcaagaactgagctacactgagggactgagcctggtgtatatggcagcaagactggatggtggctttgcagcagtctccagagcattccatgagatccgggctcgaaatccagcatttcagccacaaactttgatggactttggctcaggtactggttctgtcacctgggctgctcacagtatttggggccagagcctacgtg

SEQ ID NO: 62001 - DNA, 405 bp, Homo sapiens
caacggttcaaaaatcaccaactaccttttagagtgggatgagggaaaaagaaatagtggtttcagacagggcttcttcgggagccagaagcactgcaagttgacaaagctttgtccggcaatggggtacacattcaggctggccgctcgaaacgacattggtaccagtggttatagccaagaggtggtgtgctacacattaggaaatatccctcagatgccttctgcaccaaggctggttcgagctggcatcacatgggtcacgttgcagtggagtaagccagaaggctgttcacccgaggaagtgatcacctacaccttggaaattcaggaggatgaaaatgataaccttttccacccaaaatacactggagaggatttaacctgtactgtgaaaaatctcaa

SEQ ID NO: 62002 - DNA, 793 bp, Homo sapiens
  misc_feature (1)...(793): n = a,t,c or g
aggcggcagaggattcgctcccagagcagctgcggccaggtatatgaatgacctaaaggtacaaataaagacggagagagaacagtgccaactgggagcagggcaagaatgccaattcctcctcccccgccacccccacctggtcctcctccacctcccacatttcatcaggcaaacacagagcagcccaagctgagtagagatgagcagcggggtcgaggcgccctcttacaggacatttgcaaagggaccaagctgaagaaggtgaccaacattaatgatcggagtgctcccatcctcgagaagccgaaaggaagcagtggtggctatggctctggaggagctgccctgcagcccaagggaggtctcttccaaggaggagtgctgaagcttcgacctgtgggagccaaggatggttcagagaacctagctggtaagccagccctgcaaatccccagttctcgagctgctgccccaaggcctccagtatctgccgccagcgggcgtcctcaggatgatacagacagcagccgggcctcactcccagaactgccccggatgcagagaccctctttaccggacctctctcggcctaataccaccagcagtacgggcatgaagcacagctcctctgcccctcccccaccacccccagggcggcgtgccaacgcaccccccacacctctgcctatgcacagcagcaaagcccccgactacaacagagagaaacccttgccaccgacggctgggacaaaaggnttnaccctgggtcgagagggaccttctgnttcca

SEQ ID NO: 62003 - DNA, 622 bp, Homo sapiens
tgttctcaacttttaactcttgagaaacagctggaagaaaagatagttgcttattcctctattgctgcaaaaaatgcagaactagaacaggagcttatggaaaagaatgaaaagataaggagtctagaaaccaatattaatacagagcatgagaaaatttgtttagcctttgaaaaagcaaagaaaattcacttggaacagcataaagaaatggaaaagcagattgaaagacttgaagctcaactagagaaaaaggaccaacaatttaaagaacaagaaaagactatgtccatgttgcaacaagatataatatgcaaacaacatcatcttgaatcactagatagactcttgacggaaagcaaaggggaaatgaaaaaggaaaatatgaagaaagatgaagctttaaaagcattacagaaccaagtatctgaagaaacaatcaaggttaggcaactagattcagcattggaaatttgtaaggaagaacttgtcttgcatttgaatcaattggaaggaaataaggaaaagtttgaaaaacagttaaagaagaaatctgaagaggtatattgtttacagaaagagctaaagataaaaaatcacagtcttcaagagacttctgagc

SEQ ID NO: 62004 - DNA, 812 bp, Homo sapiens
cttccccaggcctggctggaggtggaggcaggcccaaaggtagggggtcagctcgcgcacctagggccgggagacagacaaattctggcggaaagttggcagccacggtccccctcccctgcttttctcctcaactctccacccccactccgggtgataacggcggaggtggggggttgggggaactggccttgtgttttggaacagctgcagccggcgctgggcccgcctggaatgcgggaacaggctgcacaccaggacttttatggaaacttgctgctggagacggcggcggcggcggcggcagcggcagccagaggactcccagcggctggagcagaagtgttagcggccagagctcccagacccctacccacagccaggcgggacgcgcacagtccctccacgcggaaagaagtaccttcgccggtcaccggctcctgcagggtgcaaatatatacagagcttcataatcagcccaagaccacatagagcaaacatgaatgatatttcccaaaaggctgagattctgctttcttcatctaaacctgtcccaaaaacctatgtaccaaaacttggcaagggtgatgtaaaggataagtttgaagccatgcagagagccagggaagaaagaaatcaaaggagatctagagacgaaaaacaaagaagaaaagaacaatatattagagagagagaatggaacaggagaaagcaggagattaaagaaatgcttgcttctgatgatgaggaagatgtatcttctaaagtagaaaaggcttatgttccaaaattaacaggaactgtgaagggtg

SEQ ID NO: 62005 - DNA, 867 bp, Homo sapiens
cgctcaacccggccgcgccccctttagaaaccccttagataccctgcggaaccgcccccggaatcccggggcgacccacgcgtccgctaatgactgccgccataagaagacagagagaactgagtatcctcccaaaggtgacactggaagcaatgaacaccacagtgatgcaaggcttcaacagatctgagcggggccccagagacactcggatagtacagctggtattcccagccctctacacagtggttttcttgaccggcatcctgctgaatactttggctctgtgggtgtttgttcacatccccagctcctccaccttcatcatctacctcaaaaacactttggtggccgacttgataatgacactcatgcttcctttcaaaatcctctctgactcacacctggcaccctggcagctcagagcttttgtgtgtcgtttttcttcggtgatattttatgagaccatgtatgtgggcatcgtgctgttagggctcatagcctttgacagattcctcaagatcatcagacctttgagaaatatttttctaaaaaaacctgtttttgcaaaaacggtctcaatcttcatctggttctttttgttcttcatctccctgccaaatatgatcttgagcaacaaggaagcaacaccatcgtctgtgaaaaagtgtgcttccttaaaggggcctctggggctgaaatggcatcaaatggtaaataacatatgccagtttattttctggactgtttttatcctaatgcttgtgttttatgtggttattgcaaaaaaagtatatgattcttatagaaagtccaaaagtaaggacagaaaaaacaacaaaaagctggaaggcaaagtaaaaaaaa

SEQ ID NO: 62006 - DNA, 891 bp, Homo sapiens
tttcgtgtggagaggctgcgtggagctgcgcgctcggggtgggtgctgcactcccaatgaagcgcgtgaagggcaagcggtgatgggttctgcgccagtggggctgggagcccgtccggggctgtacatggggctgcgcgcaagtacagacggggtttcatcatgttggcaaggctggtctcgaactcctcacctcaagtgatctgcctgcctcgggctcccaaagtgctgggattacaggcatgaggcaacgtacctggccacagttaagcttaaaaaccactgagttaaggaatttcaggttacatttagtaacactttttgaaaatgatcgtcatttctctcacctctcatctttggaacgggagatgacttttcgcactgaaatgggactttattattcatacttcaagaccattattgaagcaccttcgtttttggaaggactgtggatgattatgaatgacaggcttactgaatatcctcttataattaatgcaataaaacgcttccatctttatccagaggtaatcatagcctcctggtattgcacattcatgggaataatgaatttatttggactagaaactaagacctgctggaatgtcaccagaatagaacctcttaatgaagttcaaagctgtgaaggattgggagatcctgcttgcttttatgttggtgtaatctttattttaaatggactaatgatgggattgttcttcgtgtatggagcataacctgaggatgtcatgcccaaagctgtagcagtcatcttgtgaccataagggaaaggtcataaaaatagcggatatatctggcctaccatccttctgctgctgaaccaatgccaacagggactgtattattcctatttcaagactatagaggaaa

SEQ ID NO: 62007 - DNA, 666 bp, Homo sapiens
gcttcctccactccccaggttactgccaatgaagaaattaatgttacctcaactgacagtgaagtggagattgtaacagttggagaaagctatcggtctcgttcaacccttggacactccagatctcattggagccagggttcaagttctcatgcaagtcggccacaggagccacggaaccgcagtaggatttctactgttatacagcccttgaggcagaatgcagcagaagttgtggaccttaccgttgatgaagatgaacctactgtagtaccaaccacttctgcaagaatggaatcacaagctactagcgcttccattaacaattcaaatccatctacctctgagcaggcctctgatactgcttcagctgtcaccagtagccaaccttccacagtgtcagagacttcagctactcttacaagcaatagtaccactggcacttctataggagatgactcaaggagaactacatctagtgctgtaacggaaactggccctcctgcaatgccaaggttaccttcctgctgtccccagcactcaccatgtggagggtcgtcacagaaccaccatgcattaggacatcctcatacaagttgctttcagcagcatggtcaccattttcaacatcatcaccaccaccaccatactccccacccttgtatt

SEQ ID NO: 62008 - DNA, 565 bp, Homo sapiens
gcaaaatgaatgcttaaggaggacaggacaatccttcagttacaggaggaggtgggaggaagcaagaggaatactcagggaaagccttcagtaacagctctggccttagggtccataaaaggatccacacaggtgagaaaccttacgaatgtgatgagtgtgggaaggccttcattacttgtagaacacttctcaaccataaaagcatccactttggagataaaccctataaatgtgatgagtgtgagaaatcttttaattatagctctcttctcattcagcataaagtcatccacactggagagaaaccttatgaatgtgatgaatgtgggaaggctttcaggaacagctcaggcctcatagtgcataaaaggatccacacaggagagaaaccttacaagtgtgatgtctgtggcaaagcattcagctatagctcaggcctcgcagtccataaaagcattcaccctgggaagaaagcccatgaatgtaaggagtgtgggaaatcctttagttataactcactacttcttcaacacagaactattcataccggagagagtgtatt

SEQ ID NO: 62009 - DNA, 420 bp, Homo sapiens
acatttcgtgttaatggcgggcagtagccgctgaggggattgcagataaccgcttcccgcacggggaaagtctaccctgcctgccactttctgctcgccgtcagcgccggagctcgccagcatgtctgtggtaccgcccaatcgctcgcagaccggctggccccggggggtcactcagttcggcaacaagtacatccagcagacgaagcccctcaccctggagcgcaccatcaacctgtaagtgcggcgcggccttggcgggcatttctctcgtgaaagctcctatagactctccgacgcgcccccggcttttcggcgcgcttcacgcctctgcacctccccgcctccaactcccgctggcggatgcgcgccttcctccctctctcaggcccctttctcatcctccagcctccaggattc

SEQ ID NO: 62010 - DNA, 422 bp, Homo sapiens
gcggaaggagaagatgtgccgccgctgccaacgtcgagcggcgacggctgggaaaaagatcttgaagaagctctggaagcaggaggttgtgatcttgaaacgttgagaaatataattcaaggaagaccgctgcctgctgatctgagggccaaagtttggaagattgctctgaatgttgcaggaaaaggtgatagtttggcatcatgggatggtattttagacttgccagaacagaacactattcacaaagattgcctgcagtttattgaccagctttcagtgccagaggagaaggcagcagaattacttttggatattgaatctgtaattaccttttattgtaaatcacgtaacattaaatatagcacatcccttagctggatacatctactgaaaccattggtgcatcttcaactgccacg

SEQ ID NO: 62011 - DNA, 1051 bp, Homo sapiens
  misc_feature (1)...(1051): n = a,t,c or g
aagtgaaggcgattgagaggggctgagggaattgtcctctgtggaagggactttcttttggccctaggccccttcctgcccctgtcgtcagcagggagatggaaaacttgatgactagctccaccctaccgcccctttttgcagatgaagacggttccaaggagagtaatgatctggctaccactgggttaaatcacccagaggttccatacagtagtggcgccacatcatccaccaacaatccagaatttgtggaggatctctctcaaggtcagttgcttcagagtgagtcttcaaatgcagcagaaggcaatgaacagaggcatgaagatgagcaacgaagtaaacgaggaggttggtccaaaggaagaaagaggaagaaacctcttcgagacagcaatgcacccaaatccccccttacaggatatgttcggttcatgaatgagcgtcgagaacaacttcgagcaaagagaccagaagtcccatttccagaaatcacaaggatgttaggcaatgaatggagtaaactgcctcctgaggaaaaacagcgctaccttgatgaagcagacagagataaggagcgttacatgaaggaactggaacagtatcagaaaacagaggcctacaaggtcttcagtaggaaaacccaggaccgtcagaaaggcaaatctcataggcaagatgcagcccggcaggccactcatgatcatgagaaagaaacagaggtaaaggaacggtctgtttttgacatccctatatttacagaggaattcttgaaccatagcaaagctcgggaagcagagctccgccagcttcgcaaatccaacatggagtttgaggagaggaatgcagccctgcaaaagcacgtggagagcatgcgcacagcagtggagaagctggaggtggatgtgatccaggagcggagccgcaacacagtcttacagcagcacctggagaccctgcggcaggtgctgaccagcagctttgccagcatgcccttgcctgaangtggagagacacctacagtggacaccattgactcatatatgaa

SEQ ID NO: 62012 - DNA, 713 bp, Homo sapiens
ggattccatcaccaggctggggctgaataaaggcgtgcttgtgtggtagtgtctctttttaaaaaatctcaaagccaagaagaacaagctgaaatagcatcttcaaaaaatggagcgtaaaataaacagaagagaaaaagaaaaggagtatgaagggaaacacaacagcctggaagatactgatcaaggaaagaactgcaaatccacactgatgaccctcaacgttggtggatatttatacattactcaaaaacaaacactgaccaagtacccagacactttccttgaaggtatagtaaatggaaaaatcctctgcccgtttgatgctgatggtcattatttcatagacagggatggtctcctcttcaggcatgtcctaaacttcctacgaaatggagaacttctattgcccgaagggtttcgagaaaatcaacttcttgcacaagaagcagaattctttcagctcaagggactggcagaggaagtgaaatccaggtgggagaaagaacagctaacacccagagagactactttcttggaaataacagataaccacgatcgttcacaaggattaagaatcttctgtaatgctcctgatttcatatcaaaaataaagtctcgcattgttctggtgtccaaaagcaggctggatggatttccagaggagttttcaatatcgtcaaatatcatccaatttaaatacttcataaagt

SEQ ID NO: 62013 - DNA, 3396 bp, Homo sapiens
cgacgatttcgttgggtgccatggcaacggagagagacggcaacctgggttccggaagccggagagctggagctttgaagccaccccggtcaaaggatgctgagtccggagcgcctagccctaccggactacgagtatctggctcagcgacatgtcctcacctacatggaggatgcagtgtgccagctgctagaaaacagggaagatattagccaatatggaattgccaggttcttcactgaatattttaacagtgtatgccagggaacacacattctctttcgagaattcagcttcgtccaagccaccccccacaatagggtatcatttttacgggccttctggagatgcttccgaactgtgggcaaaaatggcgatttgctgaccatgaaagaatatcactgtttgctgcaattactgtgtcctgatttcccgctggagctcactcagaaagcagccaggattgtgctcatggacgatgccatggactgcttgatgtctttttcagatttcctctttgccttccagatccagttttactactcagaattcctggacagtgtggctgccatctatgaggacctgctgtcaggcaagaaccccaacacagtgattgtgccgacgtcgtccagtgggcagcaccgccaacgacctgccttgggcggggccggcacgctggagggcgtggaggcgtcgctgttctaccagtgtctggaaaacctgtgtgatcggcacaagtacagctgcccacccccagcacttgtcaaagaggccctcagcaatgttcagagactgaccttctatggattcctcatggctctctcaaagcaccgtggaatcaaccaagccctcggagctttgcctgacaagggggatctgatgcacgacccagcaatggatgaagagctggaacggctggtggtgaggtcgaagctgcaccggacctcacggcagcacagagccaaggagccaggggcctttggctttcagagaagagagaagcaggaggccctggagagagtgtcctcagcttcggtaccgacgccctaccattaccggtgggagcccagagagtgacgccaggggccggcactgggcagggaggcaggatccagaggacactgcttcactcaaaccaacagggagccaggccctgcaggggctttattttgacaccactttgtttcaatacaaacagtccagaaagaaagtcaagtccctctgggggaggggcaaggggaagagtggtctgtgttgcttgggagcccaacctacaacccaaaggtgggggctgggctgagactgccggtgcggcaggggaagatggcaccaagaatgacagtgcttggctcagctgccagagggtgaggcccacagctctcactggcgggtgctgtccaggccaagcccagaatgatgcagaggaaggagctcagccccaggagcctgcctctgcctctcacatcctctgcttccctggccagcatcaagctcacagcatccagagtcgaatcacagcagacaagaccctccatggccaccaacccggggaagaagggataaagaatgtcacagagggtcctgcattccacagcagatggtacagagggaccctgagacaccctgaaacaatcttccaagtgcttactgtagaaaggggtggtgagacgggagaacccaagggtctccggtctgatcccaaatgaaacctttaggtaccaggtaaagtttccagcccttggtaacgcccagacaaaggtccttcccctctcctggcacccagaagaggccactggcagcagcagcagcagcaagtccgcagcctctttccccatgggacgggtctacagtgaactccttccaggcctccccctggttccagaggatggggacccaaggcctcgaactagaagaaccctagagccagcaaaaaaagccttctaccttccgctttccctacctggggaaagtctggacccagaataagccatcgtgggggaaccccctttcccagtatggcaggataagtgagcagcagctgtgggggcaggacagaaggacaagagtctaacacacggagggtggtgtgagagggaataaagggctcagtccacaggcagaggacaagggctggtactgaccattcccctcacaggagtgagcgcctcaaaggccaccccacacacacaccacacatacgaagtaacaaatcctccccagcttccacaaggcaaagcatccccagcctgggaactgtggagttcttgttgccgtcaccatcgtaagcctgagtcacagagctcggatcagtaggaaccgtagcgatcctgcaaggaattcatcacaccattggccagcacagccattttcccagccacagacttgacaccctgcttaaactgggcaatgtccgctgtaggcagcacgttccccagagatacacttcctgctccgtgagctccatccatgtccccaaagaggtctgaagagctgatggcactgctgcctgagagctgctgcagccgagacctggcctcatactccgcatccacctcccgcccaaagaacatgtcagatgagatggctttggctcctgcgaatttctgacgcgcctcactagactcgaggcctgagctccggctctccacttccctccggtttgtggctctttctgaaataggccggatgcttgagatggtcacttctggctccttctcctctaccctgtccataccccaggcagcatctgtatcccagcgggagccaaagctttcccctaaggaaaagggattgtccttgtactttgggggtccagaggcgaaagtaccaacatcgtcaaacaagtccagctgcgagcgagaggattttgcactcactggggtttcctgctcaatcacctgcatctcagacagcacggagtgggagacagagcttcgggataccaagcccatgcccaacctttctgcctgctctcgcttcttcccttccagattctgtagcttcttttcctctttcttacgatcaatctggagctcctggtaggccagacgcatggaggcgaccatggactcctccgcctgcttcttggcatcggctgcctgctgctcacggagcttctctgccacctgagcctgccgctcaatctcactgaagctctggctgctcaccttctgggcccctaggcctttcttggcacccagctgatgaagctcagatggacgcccagggagcggtgcaccccggaacagtcaatgcacaagaaaacaccgtacgtgatgctggcccaactcggattcttggcgccgcagtcgaaacaggccttgttggttggaactgcgcgaagcctcttaaaaagagtctggatttcggtcttgttcggctccgccgccattttct

SEQ ID NO: 62014 - DNA, 723 bp, Homo sapiens
tggaagtaaaaaagtaaatgggaaaatccaaagtacctatgaccaagaccacacagtgccagcatatgtcccaaggaaactaatcccaataacaatcatcaagcaagtgattcagaatgttactcacaaggattcagctaaatccccagaaaaagctccactgggaggagtgatactagtccaccttattattccaggtcttaatgaaactactgtaaaacttcctgcatccctaatgtttgagatttcagatgcactcaagacacaattagctaagaatgaaaccttggcattacctgccgaatctaaaacaccagaggttgaaaaaatctcagcacgacccacaacagtgactcctgaaacagttccaagaagcactaaacccactacgtctagtgcattagatgtttcagaaacaacactggcttcaagtgaaaagccatggattgtgcctacagctaaaatatctgaagattccaaagttctgcagcctcaaactgcaacttatgatgttttctcaagccctacaacatcagatgagcctgagatatcagattcctacacagcaacaagtgatcgtattctggattctatcccacctaaaacttctagaactcttgaacagccaagggcaacactggctccaagtgaaacaccatttgttcctcaaaaactggaaatctttaccagtccagaaatgcagcctacgacacctgctcccca

SEQ ID NO: 62015 - DNA, 412 bp, Homo sapiens
cggacgcgtgggttcaaatttgccaatgtaaccatacttcaccattacagtgagaaaccagatgatgattttggagcacagcctaataagaacctggggtttgcctcttctttcggcattgttgatgctcttgagagcatcaggcaggacattcatgtgcaccattgtggcggcacgaaaagatggcggaaagagccaaacgacaaccctttcattgctcttgacaccgtgggtcaggaatttgggtaaagctcatttggatggctcatttttgttcctcgtggtgttgggaaggcttgacgagagctagagatccaggaaggcctcactcatgtgttggacacctcagttctctttggacttttttctatccaagtggtttctggagagggctatatttgggagtgatctg

SEQ ID NO: 62016 - DNA, 984 bp, Homo sapiens
gcggccgctgaccccggcccctcgctcctgcatcatcgacaaggatgagctgaaggacggcctgcgtgtgctcatccccatggatgacaagctgactgtacgccgggcacgtgcagaccgtgcactcgccagacatataccgcgtggtggtggagggtgagcggggcaaccggccccacatctactgtctggagcagttgctgcaggaggcgatcatcgatgtgaggccagcctccactcgcttcttgccacaagggaccaggattgcagcctactggagccagcagtaccgctgtctctacccaggcactgtggtccgagggttactggacctggaggacgatggggacttgatcaccgtggagtttgacgacggagacacgggcaggatccccctctcacatatccgcctcctgccccctgactataagatacagtgtgctgagccgtccccggcccttctggtgccaagtgccaagcgccgcagccggaagaccagcaaagacactggggagggcaaagatggtggcacggctgggtcggaggagccaggagccaaggcccgtgggcgtgggcggaaacccagcgccaaggccaagggtgacagagccgctaccctggaggaggggaacccaacagacgaggtccccagtacccccttagccctggagccgagcagcaccccaggttccaagaagagccccccagagcctgtggacaagcgagccaaggcccccaaggcgcgcccggcactgccgcagcccagtcccgcaccacccgccttcaccagctgcccagcacccgagccatttgcagagctgccagctcctgccacctccctggccccagcacccctcatcaccatgcctgccacacgccccaagcccaagaaggcgcgggcagccgaggagtcgggtgccaagggccctcggaggccgggggaggaggccgagctgcttgtcaaactggaccacgagggtgtca

SEQ ID NO: 62017 - DNA, 613 bp, Homo sapiens
gggtcccttttgtctggggggaaatgtgggtctttccatgggtatgaggaagaaatgtccacttgccttgagcttctcggtggcatcttctatctgggttatgttgtcaatgtgctgctgcttcttgattgccagctgctttaaacattcttggctgagtttctgtacaggagggagttaggaaaaaagtcgtaatactgtcactttccaaataacaggccccccacaggggtcacctcctcttacccttgtattcttttccaatggaggcatctgaaggtgaggtaacttgcccaaagtcatatggcaagttggtggatgagctgggactaggacatctctgatcctcggaggtccacatcaggtatgcctctaatcttgatttgcaccccttcctcacactttactttatctaggacaagtcttgcctgtgacttgcttttccagcctttcaagtgggactttaaggcaaacagcttggggtctgggaaagaacatctacttatggagtattaactgagcacctattatgtgctgggccctgtttcaggtgctgccctcatgaaacatacattccagggagtctgtgaccctctggccctggactacgtgg

SEQ ID NO: 62018 - DNA, 977 bp, Homo sapiens
agcggccgcttgccggcgttctggctcctgtggcctcaccaggaagcgtcagagtcccgacactggggaagctcggagcgccgcctccgctgccgccgcctcctgcctggctctgggtccccgagccccctcccctggcccagcccgactccctcctccttcccgaaccatccggctcgggctccttccctggcgatggctggccgctgagccatggctcagtacggccaccccagtccgctcggcatggctgcgagagaggagctgtacagcaaagtcaccccccggaggaaccgccaacagcgccccggcaccatcaagcatggatcggcgctggacgtgctcctctccatggggttccccagagcccgcgcacaaaaagccttggcatccacgggaggaagaagtgttcaggcagcatgtgactggttattctcccatgtcggtgaccccttcctggatgaccccctgccccgggagtacgtcctctacctccgtcccaccggccccttagcacagaagctttccgacttttggcagcagtcgaagcagatctgcgggaagaacaaggcacacaacatcttcccccacatcacactctgccagttctttatgtgcgaggacagcaaggtggatgccctgggggaagccctgcagaccacggtcagtcgctggaaatgtaagttctcggccccgctgcccctggagctctatacgtcgtccaacttcatcggcctctttgtaaaggaagacagtgcggaggtcctcaagaagtttgctgctgactttgctgcagaggctgcatccaaaaccgaagtgcatgtggaacctcataagaagcagctacatgtgaccctggcttaccacttccaagccagccacctacccaccctagagaaactggcccagaacattgacgtcaagctagggtgtgactgggtggctaccatattttctcgggatatccgatttgctac

SEQ ID NO: 62019 - DNA, 474 bp, Homo sapiens
tagtccagcgtggtggaattcaaggagcagcgcagaacaaaagctccaggcagctgcttccgctgtttcgggggttgggcggagtgacagccccacgggccacgcagcaagcagaagatccccgggagtcaccctcaaccctctggggccacgtgggcccataaataccagcctgtctgcgagttagacgccagtcctggtggcccgggaagcccagatccgcatcagcggagcccctgcgtcgcgtggctgtgactgggggcacgcatggcaacgagatgtcgggcgtctacctggcccggcactggctgcatgcccccgcagagctgcagagagccagcttctccgctgtgcctgtgctggccaacccggcagccacatccggctgccgccgctacgtggaccatgacctcaaccgcaccttcaccagcagcttcctcaattccaggcctttgactttgtccttgacctgca

SEQ ID NO: 62020 - DNA, 1117 bp, Homo sapiens
tgagctccatgggctcaaattcagagataaacgggctggccctgcgcaagacggacaagtatggcttccttgggggcagccagtactcgggcagcctaaaaagctccattcccgtggacgtggctcggcagcgggagctcaaatggctggacatgttcagtaactgggataagtggctgtcacggcgattccagaaagtgaagctgcgctgccggaaggggatcccctcctctctcagagccaaagcctggcagtacctgtctaatagcaaggaacttctggagcagaacccaagaaagtttgaggagctggaacgggctcctggggaccccaagtggctggatgtgattgagaaggacctgcaccgccagttccctttccacgagatgtttgctgctcgaggggggcatgggcaacaggacctgtaccgaatcctgaaggcctacaccatctaccggcctgacgagggttactgccaggcccaggcccccgtggctgcggtcctgctcatgcacatgcctgcggagcaagccttttggtgcctggtgcagatctgcgacaagtacctcccaggttactacagtgcagggctggaggccattcagctggacggggagatcttttttgcactcctgcgccgggcctccccgctggcgcatcgccacctgcggcggcagcgcattgaccctgtgctctacatgacggagtggttcatgtgcatcttcgcccgcaccctgccctgggcgtcggtgctgcgtgtctgggacatgtttttctgtgaaggcgttaagatcatcttccgggtggccctggtcctgctgcgccacacgctgggctcagtggagaagctgcgctcctgccaaggcatgtatgagaccatggagcagctgcgtaacctgccccagcagtgcatgcaggaagacttcctggtgcatgaggtgaccaatctgccggtgacagaagcactgattgagcgggagaatgcagcccagctcaagaagtggcgggaaacgcggggggagctgcagtatcggccctcacggcgactgcatgggtcccgggccatccacgaggagcgccggcggcaacagccacccctgggcccctcctccagcct

SEQ ID NO: 62021 - DNA, 1067 bp, Homo sapiens
cctgcggtccccggtgtgtccgtctcggaacggttcgattccctccagagccggggaagggacggggggggcccagagaagggggcctcgggcgccccgcctgcgcctgctgcccccgccccggcggtaatgcgctcctgcccgtgacccccgctgggggcgggggccggggtccatgcgcggagtccccacccggcccggcgcctgccgctaacgacggcgggggtgggggggcgcgcgcctgacctcctgcccacaccctggcgtcaacaccgcgggccgtcaggggctgcggccccgggctgcgccctcccccgcggccaggctctggagggacccaggagctgccgccggcctcagcccatggcccggaggtatgatgagctgccgcactacccaggcatcgtggatggccccgcagccctggctagcttcccagagacagtgcccgcagtaccagggccctatggcccgcaccggcctccccagcccctgcccccaggcttggacagcgacggcctgaagagggagaaggatgagatctatggacacccgctcttccccctcttggccctggtctttgagaaatgtgaactggctacatgctctccccgtgacggggccggagctgggctggggacaccccctggaggtgacgtctgctcctctgattccttcaacgaggacatcgctgcctttgccaagcaggttcgctctgagaggcccctcttctcctccaacccagaactggacaatctgatgatccaggccatccaggtgctgcggttccacctgctggagctggagaaggtccacgacctgtgcgacaacttctgtcaccgctacatcacctgcctcaagggaaagatgcccatcgacctggtcatcgaggatcgggacggcggctgcagggaggacttcgaggactacccagcctcctgccccagcctcccagaccagaataatatgtggattcgagaccatgaggatagtgggtctgtacatttggggaccccaggtccatccagtgggggcctggcctcccagagaggggacaactccagtga

SEQ ID NO: 62022 - DNA, 532 bp, Homo sapiens
gcgaaatcctttccttcccagggctagcaggcttctttagaatatggatttccaactttgccctcctagctcatcccctctatgaagtggccaaaggccctcccaatgaacccctaaacccctcacataacatactccccagcttccacaaactccaaactgctcttgtcactgcgtcagctccgtccttacctgatatctcccaacctttcactctctatactgctgaaagctgaggaatagccctcggtgtcttaggacaacagaaaggaaatcctccttcctttgcccctgtagcttacctctctaaacaactagataacacagtcaaagggtggccagcctgctttaaagcactagaagtggtagccagcttagctctagaaagcaggaaactaactttcagccagaataccaccgtccacagttctcataatctacaagatctcctctcctcccaagcagtaagctcccttcctccttccaggattcaattactccatgccctctttataaaaaatcccaaattcag

SEQ ID NO: 62023 - DNA, 831 bp, Homo sapiens
tttcgtgggatgggggacgagcggccccactactacgggaaacacggaacgccacagaagtatgatcccactttcaaaggacccatttacaataggggctgcacggatatcatatgctgtgtgttcctgctcctggccattgtgggctacgtggctgtaggcatcatagcctggactcatggagaccctcgaaaggtgatctaccccactgacagccggggcgagttctgcgggcagaagggcacaaaaaacgagaacaaaccctatctgttttatttcaacattgtgaaatgtgccagccccctggttctgctggaattccaatgtcccactccccagatctgcgtggaaaaatgccccgaccgctacctcacgtacctgaatgctcgcagctcccgggactttgagtactataagcagttctgtgttcctggcttcaagaacaataaaggagtggctgaggtgcttcgagatggtgactgccctgctgtcctcatccccagcaaacccttggcccggagatgcttccccgctatccacgcctacaagggtgtcctgatggtgggcaatgagacgacctatgaggatgggcatggctcccggaaaaacatcacagacctggtggagggcgccaagaaagccaatggagtcctagaggcgcggcaactcgccatgcgcatatttgaagattacaccgtctcttggtactgggatatcataagcctgggcattgccatggcgatgagccttctgttcatcatcctgcttcgcttcctggctgggattatgggccgggggatgatcatcatggggattctggtgctgggctac

SEQ ID NO: 62024 - DNA, 1149 bp, Homo sapiens
ggcattcccgggtcgacgatttcgttcggtctctgggcggcggcggcggcccactctgccctggccgcgctgtgtggtgaccgcaggcccgagacatgagggcggcccgtgctctgctgcccctgctgctgcaggcctgctggacagccgcgcaggatgagccggagaccccgagggccgtggccttccaggactgccccgtggacctgttctttgtgctggacacctctgagagcgtggccctgaggctgaagccctacggggccctcgtggacaaagtcaagtccttcaccaagcgcttcatcgacaacctgagggacaggtactaccgctgtgaccgaaacctggtgtggaacgcaggcgcgctgcactacagtgacgaggtggagatcatccaaggcctcacgcgcatgcctggcggccgcgacgcactcaaaagcagcgtggacgcggtcaagtactttgggaagggcacctacaccgactgcgctatcaagaaggggctggagcagctcctcgtggggggctcccacctgaaggagaataagtacctgattgtggtgaccgacgggcaccccctggagggctacaaggaaccctgtggggggctggaggatgctgtgaacgaggccaagcacctgggcgtcaaagtcttctcggtggccatcacacccgaccacctggagccgcgtctgagcatcatcgccacggaccacacgtaccggcgcaacttcacggcggctgactggggccagagccgcgacgcagaggaggccatcagccagaccatcgacaccatcgtggacatgatcaaaaataacgtggagcaagtgtgctgctccttcgaatgccagcctgcaagaggacctccggggctccggggcgaccccggctttgagggagaacgaggcaagccggggctcccaggagagaagggagaagccggagatcctggaagacccggggacctcggacctgttgggtaccagggaatgaagggagaaaaagggagccgtggggagaagggctccaggggacccaagggctacaagggagagaagggcaagcgtggcatcgacggggtggacggcgtgaagggggagatggggtacccaggcctgccaggctgcaagggctcgcccgacgaaa

SEQ ID NO: 62025 - DNA, 1196 bp, Homo sapiens
tttcgtccagcccacaccttcaccagggcccaggagccaccatgtggcgatgtccactggggctactgctgttgctgccgctggctggccacttggctctgggtgcccagcagggtcgtgggcgccgggagctagcaccgggtctgcacctgcggggcatccgggacgcgggaggccggtactgccaggagcaggacctgtgctgccgcggccgtgccgacgactgtgccctgccctacctgggcgccatctgttactgtgacctcttctgcaaccgcacggtctccgactgctgccctgacttctgggacttctgcctcggcgtgccacccccttttcccccgatccaaggatgtatgcatggaggtcgtatctatccagtcttgggaacgtactgggacaactgtaaccgttgcacctgccaggagaacaggcagtggcagtgtgaccaagaaccatgcctggtggatccagacatgatcaaagccatcaaccagggcaactatggctggcaggctgggaaccacagcgccttctggggcatgaccctggatgagggcattcgctaccgcctgggcaccatccgcccatcttcctcggtcatgaacatgcatgaaatttatacagtgctgaacccaggggaggtgcttcccacagccttcgaggcctctgagaagtggcccaacctgattcatgagcctcttgaccaaggcaactgtgcaggctcctgggccttctccacagcagctgtggcatccgatcgtgtctcaatccattctctgggacacatgacgcctgtcctgtcgccccagaacctgctgtcttgtgacacccaccagcagcagggctgccgcggtgggcgtctcgatggtgcctggtggttcctgcgtcgccgaggggtggtgtctgaccactgctaccccttctcgggccgtgaacgagacgaggctggccctgcgcccccctgtatgatgcacagccgagccatgggtcggggcaagcgccaggccactgcccactgccccaacagctatgttaataacaatgacatctaccaggtcactcctgtctaccgcctcggctccaacgacaaggagatcatgaaggagctgatggagaatggccctgtccaagccctcatggaggtgcatgaggacttcttcctatacaagggaggcatctacagccacacgcca

SEQ ID NO: 62026 - DNA, 1038 bp, Homo sapiens
gcatgatgggagttgtagttcgatgctggtttagggtttcaggcgtggaggttccaaaatccgaggtttgatttcagcctgcccttgccagtgcctgggccgctgggagccgttattggctgccgttaaggaccgttacgtttcccgggctggagtgcaatgacgcaatctcggctcactgcaacctctgccttctgggttcaggtgattgtcctgcctcggcctcctgagtagctgggactgcaggcacgtgccaccacacctggctgatttttgtatttttagtggagacggggttttgctatgttggccaggctggtcccgaactcctgacctcaggtgacccgcctgcctcagcctccgaaagtgttgggattacaggcgtcagccaccgcacccatccgcttgccacagcttttaaggtccttctggcactcctctggtggaccgcccccatcggccacacttgccctgctctccagtgattctgtagctcctggctccgtagtctcgcggacagctctctttcctggaagatgtttctggtgggcctgacagggggcattgcctcaggcaagagctcagtgatccaggtgttccagcagctgggctgtgcggtgattgacgtggacgtgatggcccggcacgtcgtgcagccaggataccctgcccaccggcgcatcgtagaggtcttcggcactgaggtcttgctggagaacggcgacataaatcgcaaggtcctgggggacctgatctttaaccagcctgaccggcggcagctgctcaacgccatcacccaccccgagattcgcaaggagatgatgaaggagacgttcaagtacttcctccgggagccccgtaccagccccagaggaaagaagcacgttccctcagctcttaaggaggctgacagtttaatgagaagagacacatgaggctttcgagccatgagcccaggaattactggtatatctgcagggcttcgaggcggcagtggctctccccttctgaaattaaacatcggataatgtcaccagc

SEQ ID NO: 62027 - DNA, 530 bp, Homo sapiens
tttcgtctcagctcgggcccgcgttacatcctcctcctcttcttccttcggcccagctttccttaggggctgcaacccggacgccgaggccggtttcggagtggggagtgcccattttctctccttcccacgttcctggcccccagacgccatttgcaggcgggtggcttgggtcagcctccccgcccccacccgactcccgtcacgggagagcgcacaccgcgccccgagaaccaatcagcagccgcgttaggtaaccatgtctgagtctggacacagtcagcctggactctatgggatagagcggcggcgacggtggaaggagcctggctctggtggcccccagaatctctctgggcctggtggtcgggagagggactacattgcaccatgggaaagagagagaagggatgccagcgaagagacaagcacttccgtcatgcagaaaacccccatcatcctctcaaaacctccaacagagcggtcaaaacagccaccacctccaacagcccctgctgccccgctgtatt

SEQ ID NO: 62028 - DNA, 944 bp, Homo sapiens
tttcgtgcagcccgccggcgattggggcgcgcgcgcctccttcggtttggggctaattataaagtggctccagcagccgttaagccccgggacggcgaggcaggcgctcagagccccgcagcctggcccgtgaccccgcagagacgctgaggaccgcgacgagtcgtgtctgaacccggcttttccaattggcctgctccatccgaacagcgtcaactccatggcgcggttcctgacactttgcacttggctgctgttgctcggccccgggctcctggcgaccgtgcgggccgaatgcagccaggattgcgcgacgtgcagctaccgcctagtgcgcccggccgacatcaacttcctggcttgcgtaatggaatgtgaaggtaaactgccttctctgaaaatttgggaaacctgcaaggagctcctgcagctgtccaaaccagagcttcctcaagatggcaccagcaccctcagagaaaatagcaaaccggaagaaagccatttgctagccaaaaggtatgggggcttcatgaaaaggtatggaggcttcatgaagaaaatggatgagctttatcccatggagccagaagaagaggccaatggaagtgagatcctcgccaagcggtatgggggcttcatgaagaaggatgcagaggaggacgactcgctggccaattcctcagacctgctaaaagagcttctggaaacaggggacaaccgagagcgtagccaccaccaggatggcagtgataatgaggaagaagtgagcaagagatatgggggcttcatgagaggcttaaagagaagcccccaactgaaagagaaagccaagatccactaccggaagaagaaacagctcatgaggctacggaaacaggccgagaagaacgtggagaagaaaattgacaaatacacagaggtcctcaagacccacggactcctgg

SEQ ID NO: 62029 - DNA, 977 bp, Homo sapiens
ttttttttgttttttttcatcacctgaactttcagactcttcagtggtaaagatacttttcagtgcagtgcactcgggtccggagtcttctgactcagaaatatcagaatatcctgatgatctactcctgagttctgatttcacacttgtaaaaaacccattcagtggtttttgagattcttcatgttccactccctctactcctgaactctcttctatcttcatttttgccttttttgtccttcttttatcctcttcattttcactatctgctgtataaagactttgatctgcaaagggctgcctttcatctttaattattcttccatttgtcagcagtaatcgtagatcattatctttcgctctccattcaggtactgtggaggatggttggagatgtttgttgaattttccattcagtttagagctcaagatgtcctcttcccatggacacatctctaatcttttgaggacctcccttgtgtggagctctaggatgtctaggttagaaggagttcggacattatgatctcgaagtttcctcatctttcttcgggaatggtatggggaagttgcttcatttgaggatcgtgaaactggacacacaataggaattccctgagatttaactggtttgccgttttcctcctctattgctcgaattactttagaaagttctttaataaggtgtccaggtctaacattgtctggaatttcaaaggcatgttcagatacaagttcttttttcatccataattttaaagcagtatgcagtgctttcactccctgtactaggtaagtttgaggctggaaaccatcttctctcagttctttcagggtttccagcaagtttttggctacaaaccaacatatggcttcaaagaaagggaatttgaaaagatctggtgtttttagccttttctccatctcataacacctgagctgcatgccaatgttaagacgaagtcgtcgaaccg

SEQ ID NO: 62030 - DNA, 745 bp, Homo sapiens
ggggccaggactgctgctgtcactgccatccattggagcccagcaccccctccccgcccatccttcggacagcaactccagcccagccccgcgtccctgtgtccacttctcctgacccctcggccgccaccccagaaggctggagcagggacgccgtcgctccggccgcctgctcccctcgggtccccgtgcgagcccacgccggccccggtgcccgcccgcagccctgccactggacacaggataaggcccagcgcacaggcccccacgtggacagcatggaccgcggcacgctccctctggctgttgccctgctgctggccagctgcagcctcagccccacaagtcttgcagaaacagtccattgtgaccttcagcctgtgggccccgagaggggcgaggtgacatataccactagccaggtctcgaagggctgcgtggctcaggcccccaatgccatccttgaagtccatgtcctcttcctggagttcccaacggtgagtgtcccatggcagggtcgggtgggggctcagaggaagctccaaggcagatggggtgaggggtgccttccttgtggctgtccctggggcagaggctgagtcctcgttaggccccctgccaagagagtgatgtgggcatctcacagggcccataagaggtggcatttctaggggcagggtctggatcaaggcagtcttttgggtgccaccagaaaactcaagtgggaaaaagttgataaagaaat

SEQ ID NO: 62031 - DNA, 1191 bp, Homo sapiens
gcattcccgggtcgacgatttcgtcgccgggacaccagggctccgcgctccgcactcaagaggctcccgcgtcccaacccctcgcgcccgcgcgttcgcggatccaggccgaggaccgaaaggggccgcccgagcccccggggccggcgcccagagagcccagcaaggccggccgccctgccggtgtgccgccggcgggtgcttctggaagggccaatgcgttcgggcagcagcccctgaagccgagcccgaggctaagtgggactgaccggggcccagagtggacgaaccgccagcatggggagagaccagcgcgcggtggccggccctgccctacggcggtggctgctgctggggacagtgaccgtggggttcctcgcccagagcgtcttggcgggtgtgaagaagtttgatgtgccgtgtggaggaagagattgcagtgggggctgccagtgctaccctgagaaaggtggacgtggtcagcctgggccagtgggcccccaggggtacaatgggccaccaggattacaaggattccccgggctgcagggacgtaaaggagacaagggtgaaaggggagcccccggagtaacaggacccaagggcgacgtgggagcaagaggcgtttctggattccctggtgccgatggaattcctggacacccggggcaaggtgggcccaggggaaggccgggctacgatggctgcaacggaacccagggagactcaggtccacaggggccccccggctctgaggggttcaccgggcctcccgggccccaaggaccaaaagggcagaaaggtgagccttatgcactgcctaaagaggagcgcgacagatatcggggtgaacctggagagcctggattggtcggtttccagggacctcccggccgccctgggcatgtgggacagatgggtccagttggagctccagggagaccaggaccacctggaccccctggaccaaaaggacagcaaggcaacagaggacttggtttctacggagttaagggtgaaaagggtgacgtagggcagccgggacccaacgggattccatcagacaccctccaccccatcatcgcgcccacaggagtcaccttccacccagatcagtacaagggtgaaaaaggcagtgagggggaaccaggaataagaggcatttccttgaagggagaagaaggaatcatg

SEQ ID NO: 62032 - DNA, 819 bp, Homo sapiens
ccgaatcatcggataccgctccggaatttccgggtcgacgatctcgtccgagttggagtacgagtctgtgctgtgtgtgaagccagacgtcagcgtctaccggattccgccccgggcctccaaccgcggttacagggcctctgactggaaattagaccagcctgattggactggtcgcctccgaatcacttcaaaagggaagactgcctatatcaaactcgaggataaagtttcaggggagctctttgctcaggcaccagtagaacaatatcctggtattgctgtggagacggtgacagattctagccgctactttgtaatccggatccaggatggtactgggcgcagtgctttcattggcattggcttcacagatcggggagatgccttcgactttaatgtctccttgcaggatcacttcaagtgggtaaagcaggaatctgagatttccaaggaatctcaagaaatggatgctcgtcctaagttggatctgggcttcaaggaaggacaaaccatcaagttgtgtatcgggaacattacaaacaagaaaggaggtgcttctaagcccaggactgcaaggggtgggggtctgagcttactcccacccccgccaggaggcaaagtcactattcccccaccatcctcctcagttgccatcagcaatcatgtcaccccaccacccattccgaaatctaaccatggaggcagtgatgcagatatccttttagatttggattctcctgctcctgtcacgacaccagcaccactgtattgcggccgctctggaggatccacgctaacgtacgcgggcgttacact

SEQ ID NO: 62033 - DNA, 1207 bp, Homo sapiens
cgccccagaccttaagtgcaaatgccccgattgcacgaagggggcttaactgcaacctccccttcccgggttcaagcatttatcctgcatcagcctcccaagtagttgggattacaggcgcccgccatcacgcctggataatttttatgtatttttggtggaaacagagtttcaccatgttggcccggctggttgcgaactcctgaacgcaagtgatccgcctgcctcagcctcccaaggtgctgggattacaggcacgagccactgtgcctggcctcaactgttgcttcttataaaggtgtgttccagagaacaagccttcagacatttgctatattgacgctgagctgtcaggggactcaggcttatgaggaggtattgttacacaaaacagtgtctagtgaagacgacaagaaagaggggaaaggatcggaaaaagaagctaaaatactatagaaaaccatgagatctattcgatcttttgctaatgatgatcgccatgttatggtgaaacattcaacaatctatccatctccggaggaacttgaagctgttcagaatatggtatctactgttgaatgtgctcttaaacatgtctcagattggttggatgaaacaaataaaggcacaaaaacagagggtgagacagaagtgaagaaagatgaggccggagaaaactattccaaggatcaaggtggtcggacattgtgtggtgtaatgaggattggcctggttgcaaaaggcttgctgattaaagatgatatggacttggagctggttttaatgtgcaaagacaaacccacagagaccctgttaaatacagtcaaagataatcttcctattcagattcagaaactcacagaagagaaatatcaagtggaacaatgtgtaaatgaggcatctattataattcggaatacaaaagagcccacgctaactttgaaggtgatacttacctcacctctaattagggacgaattggagaagaaggatggagaaaatgtttcgatgaaagatcctccggacttattggacaggcagaaatgcctgaacgccttggcgtctcttcgacatgccaaatggtttcaggcaagggcaaatggattaaaatcatgtgtaattgtcctccgcattctgcgtgatttgtgcaacagagtccccacatgggcaccattgaaaggatggccactagaacttatatgtgaaa

SEQ ID NO: 62034 - DNA, 578 bp, Homo sapiens
ttctatttcgtccaggggatggacgagtactcaggctttcctcgaatctctgcttgagtggggcagcctcggggcctccggacgctggagaagctcacagcatctgtggccgggggtgcaactaacttttttggtgacattgaaagagatttaggtccaagagatacgagcaggggaattaggggtgggaatttgggggacagaggctgttcttcagcggaaatggcctatgcctcctggcagaggtggtccccagtggaatgggcccggtggatgtggacagcggtgaccagcagtggggactccagtctgctggtgcttcagggagactctggaaaaaggagttccgattctgaagaggcatttgagaccccggagtcaacgacccctgtcaaagctccgccagctccacccccaccaccccccgaagtcatcccagaacccgaggtcagcacacagccacccccggaagaaccaggatgtggttctgagacagtccctgtccctgatggcccacggagcgactcggtggaaggaagtcccttccgtcccccgtcacactccttctctgccgtctt

SEQ ID NO: 62035 - DNA, 486 bp, Homo sapiens
ggcagacgaggccggcttctccgcggacagctagggagagtgtcctgggtgtcagccagaacatgtctttcaacctgcaatcatcaaagaaactgttcattttcttaggaaaatcactgtttagtcttctggaggctatgatttttgccttactcccaaagccacggaagaacgttgctggtgaaatagtcctcatcacaggtgctggaagtggactcggaaggctcttagccttgcagtttgcccggctgggatctgttcttgttctctgggatatcaataaggaggggaatgaggaaacatgtaagatggctcgggaagctggagccacaagagtgcacgcctatacctgcgattgcagccaaaaggaaggagtgtatagagtagccgaccaggttaaaaaagaagtcggcgatgtttccatcctaatcaacaatgccggaatcgtaacaggcaaaaagttccttgactgtccagatgagctta

SEQ ID NO: 62036 - DNA, 839 bp, Homo sapiens
gaattcccgggtcgacgatttcgtgcggtgcctgcgctgtggccatgtctgtgtacgcagggggccggggccccgcgaagctgtgccctcaggccggccccggccggacacccttacccctccatgggtccggcagagggcagtgaccggcaccttctgtgcgtcctggactcctctgagaaacaggagagctcaaaggatggctactgacatgcagaggaagagaagcagcgaatgccttgatggcacattgactccttctgatggacagagtatggagagagctgagagccccacaccaggaatggcccagggaatggagccaggtgcgggccaggagggtgccatgttcgtccatgcccgttcctacgaggacctgactgagtcagaggatggggcagcttctggggacagccacaaggagggtaccaggggtcccccgccgctgcctacagacatgcgccagatcagccaggactttagcgagctaagcacccagctgacgggtgtggcccgggacctgcaggaggagatgctgccaggaagctctgaggattggctggaacccccaggggcagttgggcgaccagccacagagccccccagggagggcacaaccgagggggatgaggaggatgccacggaggcatggcgcctgcaccaaaagcatgtctttgtgctgagtgaggcagggaagcctgtgtactcccgctatgggtctgaggaggcactttccagcactatgggtgttatggtggccctggtgtccttcctggaggcagacaagaacgccatccgctccatccatgcagatggctacaaggtagtattcgtgcgcc

SEQ ID NO: 62037 - DNA, 1126 bp, Homo sapiens
tttcgtctgccgaggaggccgcagcagtcgccgcgcgaacatggcggccgaaatccactccaggccgcagagcagccgcccggtgctgctgagcaagatcgaggggcaccaggacgccgtcacggccgcgctgctcatccccaaggaggacggcgtgatcacggccagcgaggacagaaccatccgggtatggctgaaaagagacagtggtcaatactggcccagcatttaccacacaatggcctctccttgctctgctatggcttaccatcatgacagcagacggatatttgtgggccaggataatggagctgtaatggaatttcacgtttctgaagattttaataaaatgaactttatcaagacctacccagctcatcagaaccgggtgtctgcgattatcttcagcttggccacagagtgggtgatcagtaccggccacgacaagtgtgtgagctggatgtgcacgcggagcgggaacatgctcgggaggcacttattcacgtcctgggcttcgtgtctgcaatatgactttgacactcagtatgctttcgttggtgattattctgggcagatcaccctgctgaagcttgaacagaacacgtgttcagtcatcacaaccctcaaaggacatgaaggtagtgtcgcctgcctctggtgggaccctattcagcggttactcttctcaggagcatctgacaacagcatcatcatgtgggacatcggaggaaggaaaggccggacgctgttacttcagggccatcatgacaaggtgcagtcgctgtgctaccttcagctcaccaggcagctcgtctcctgttcctcggacggcggaattgcagtgtggaacatggatgttagcagagaagaggctcctcagtggttggaaagtgattcttgtcagaaatgtgagcagccatttttctggaacataaagcagatgtgggacaccaagacgctggggctaagacaacatcactgcaggaaatgcgggcaggctgtctgcgggaagtgcagcagcaagcgctcaagttacccagtcatgggcttcgagttccaagtccgggtttgtgattcttgttacgactccatcaaagatgaagatcggacttctctagcgaccttg

SEQ ID NO: 62038 - DNA, 747 bp, Homo sapiens
ccccagtacccaatgatcccatgcaatgagagttgttccgttgtggggaaagttatcgctagtcagtggcctgaagagacgtttggctgatcggcaaggtgttctggtcggcgcatagctgataacaattgagcaagaatcttcatcgaattaggggaattttcactcccctcagaacataacatagtaaatggattgaattatgaagaatggtttttatgcgacttaccgcagcaaaaataaagggaaagataagcgctcaataaacctgtctgttttccttaattctctgctggctgataatcatcacctgcaggttggctccaattatttgtatattcataaaatcgatggaaaaacttttctctttaccaaaacaaatgacaagagtctggttcagaagataaatcgctctaaagcttcagttgaagatattaagaacagcctcgcagatgacgaatcattgggattcccatcttttttgtttgttgaaggcgacaccattggttttgccagaactgttttcgggccgaccacatccgatctgacagattttttaatcgggaaaggaatgtcattaagcagtggagagcgcgttcagatagagccactgatgaggggaaccaccaaagacgatgttatgcatatgcatttcatcggccgaacaacggtgaaggtagaagccaagctacctgtatttggcgatatattaaaggtcttaggggcaacccggtacccaattcgccc

SEQ ID NO: 62039 - DNA, 739 bp, Homo sapiens
cgttgctgtcgcaccaccgcctccggtcctgactccgatgatggcggacggcgccgcagctggcgctggcggcagcccatccttgagagagctgcgggcacggatggttgctgcagcaaacgagattgctaaggaaaggaggaagcaagatgtggttaatcgtgttgcaacccattcctcaaatataagatcgacatttaaaccagtaatcgatggatccatgcttaaaaatgacataaaacaaagattagcaagagagcgcagagaggagaaaaggagacagcaagacgccaataaagaaacacaactacttgaaaaagaaagaaagaccaagctccaatatgaaaaacagatggaggaaagacagagaaagctgaaggagcgaaaagagaaagaagaacaacggagaatagctgcagaagaaaaaagacaccagaaggatgaagcacaaaaggaaaaatttacagccattctttatcgtactttggaacggaggagacttgctgatgattatcagcaaaaaagatggtcatggggaggctctgcaatggcgaattctgagagcaaaactgccaataaacgatctgcatctactgaaaaacttgaacagggtacttctgctttaatcagacaaatgcctttgtcatctgcaggccttcaaaattccgttgccaaaaggaaaacagacaaggagagaagctcatctttaaatagaagagatagtaacctacattcgtct

SEQ ID NO: 62040 - DNA, 1806 bp, Homo sapiens
cccccgcttggcttccagcgccgcttgcgctccggagcgctggctctgctggcgctgagaaatggaccaattttgacaagatatagtgctgcagcgtgcctgatgggatatattcagtcatggcgtccgaactttgtaagacgatctctgtggcaaggctagaaaagcacaagaatttgttcttaaattataggaatctgcaccattttccattggagttactgaaagatgagggactgcagtacttggagagactctatatgaaaaggaactccctgacatccttgccagaaaaccttgctcagaagcttccaaaccttgtggaactatacctgcactcaaataacatagttgtggttccggaagccattgggtctcttgtaaaactccaatgtctggatcttagtgacaatgccttagaaattgtttgcccagaaattggtcgtctgagagctttacgtcatcttcgattagctaataaccaactgcaattcctacctccagaggttggcgatttgaaggagctgcagacactagacatttctaccaatcgtttgctaactttacccgagaggcttcacatgtgcctttctctgcagtacctcactgtggaccgaaatcgtctatggtatgtgccgcgccatctctgccagctgcccagcctcaatgagctctccatggctggaaaccgtcttgcatttttgccacttgatttaggtcgatctcgagaactacagtatgtatacgtggataacaacattcacctgaaaggcttgccatcttatctgtacaataaagtcatcgggtgcagtggctgtggtgctcccattcaagtttccgaggtgaagctgctttccttttcatcagggcagcgaaccgttttcctcccagctgaggtgaaggccatagggacggagcatgatcacgtcctccctctgcaggaattggctatgagagggctgtatcatacctaccacagcttgctgaaagatttgaactttctgtctccaatctcattacccagaagtctcctagagctgctgcactgccctctggggcactgtcatcggtgtagtgagcctatgtttaccatcgtctaccccaagctctttcccttgagagagacgccaatggcagggctgcaccagtggaagacaactgttagttttgtggcttactgctgctccacccagtgtctgcagacttttgacctgctgagttgataaacactcaagaacctcaggagcgctgccagcttgacactggggaatccagccagtccagcacactcttccatcctgtcctgtccaatgcgggggcactgcagaactctctagaaatgtcatgattgagcttcagagctaaaatgccttcacccttcccccaagttggaatatatcctcccccaaattaaggacccatttgtcttctgtgtttttcctttttatgtgagtgtgtcttttacagaaaccatttagattgatgggcctccccaaatctaatttaaagcaagtttccggtccttggagaacagtgacttgatcatctagccagattcccttttgaacacacataccttcagtgatgcttcctctcctctcccctcccttgctttccccagagagttatttccctgagaccatgttctccacagtgtctccagtggaaacttgtcagtttttgaggagtttcagcaaaccccgtggcctcaaatggtcttgaagtagcagggtggggcgcctgagttggcaagcaaagtgaggctcccatggaggctcagtgagggtcccagagcacacaccctct

SEQ ID NO: 62041 - DNA, 765 bp, Homo sapiens
ctccccgtgaagtcccatactacacaatattcatctggtgttgttgcctagagtttgtcccagcggagggttggcttcggatctgcagaggctttagggacctgctccagccactgaacacactagccgtctgagacggcagctgagttgcactgtgcgacgcgacagagactacatttcccagcattccagcggcgcactcgggggaccacagatcccagcgcaccacagatcccagcgcaccacaaagaggcccggggactacaaatcccagcatcccctgcactcggttcctctgtaacttagactccagtgtgccgcgcagtgtgcgcaaattcacaaacccgcccgctgagttggtcgtttcggaatcccgagacttgaaacccaacgggaagacccttctcaccctcaaaagaagatgacagcccgcagagagttaacttctgtttacatggaactcagacatctgcaaatcatgatttcaaggccagagaatggcaggggaacagaaaccctcaagtaatctcctggagcagtttattttactagccaaaggtaccagtggctcagccctcactgctctcataagccaggtcttagaggctcccggagtgtatgtctttggagaacttctggagctggccaacgtgcaggagcttgcggaaggagctaatgctgcttatttgcagttgttgaacctgtttgcctatgggacatacccagattacatagccaacaaggagagcctgccagaactgtatt

SEQ ID NO: 62042 - DNA, 857 bp, Homo sapiens
  misc_feature (1)...(857): n = a,t,c or g
tgacatcgccctttcctcttggccatgcccgctggcgagccgagcccccccaacgatgaggtcgtcctgtgtcctgctcaccgccctggtggcgctggccgcctattacgtctacatcccgctgcctggctccgtgtccgacccctggaagctgatgctgctggacgccactttccggggtgcacagaaagtgagtaacctgatccactacctgggactgagncatcacctgctggcactgaattttatcattgtttcttttggcaaaaaaagcgcgtggtcttctgcccaagtgaaggtgaccgacacagactttgatggtgtggaagtcagagtgtttgaaggccctccgaagcccgaagagccactgaaacgcagcgtcgtttatatccacggaggaggctgggccttggcaagtgcaaaaatcaggtattatgatgagctgtgtacagcaatggctgaggaattgaatgctgtcattgtttccattgaatacaggctagttccaaaggtttattttcctgagcaaattcatgatgttgtacgggccacaaagtatttcctgaagccagaagtcttacagaagtatatggttgatccaggcagaatttgcatttctggtgacagtgctggtggaaatctggctgctgcccttggacaacagtttactcaagatgccagcctaaaaaataagctcaaactacaagctttaatttatccagttcttcaagctttagattttaacacaccatcttatcagcaaaatgtgaacaccccaatcctgccccgctatgtcatggtgaagtattgggtggactacttcaaaggcaactatgactttgtgcaggcaatgatcg

SEQ ID NO: 62043 - DNA, 2132 bp, Homo sapiens
cgtgaggaccagcggctgctgccctgccgcaagtacgagcagatcgaagagggcactgtccggcgcctcatcatccacaggctgaaggcagacgatgatggtatctacctgtgcgagatgcggggccgggtgcgcaccgtggccaacgtcacagtcaaagggcccatcctgaagcgtctgccccggaagctcgacgtcctgggaaggagagaatgctgtgctgctagtggaaactctagaggccggggtcgagggacgctggagccgtgatggggaggagctgccggtcatctgccagagcagcttcaggccacatgcatgccctggtccttccaggggtcacccgacgaggatgctggcgaggtcacctttagcctgggcaactcccgtaccactacgcttctcagagtaaaatgtgtcaagcacagtcccccaggaccccccatattggcagagatgttcaagggccacaagaacacggtcctgttgacctggaagcctcccgagccagctcccgagaccccattcatctaccggctggagcggcaggaagtgggctctgaagactggattcagtgcttcagcatcgagaaagccggagccgtggaggtgccgggcgactgtgtgccctccgagggtgactaccgcttccgcatctgcacagtcagcggacatggccgtagtccccacgtggtgttccacggttctgctcaccttgtgcccacagctcgcctggtggcaggtctggaggatgtgcaggtatacgacggggaagatgccgtcttctccctcgatctctccaccatcatccagggtacctggttccttaatggggaagagctcaagagtaacgagccggagggccaggtggaacctggggccctgcggtaccgtatagagcagaagggtctgcagcacagactcatcctgcatgccgtcaagcaccaggacagcggtgccctggtcggcttcagctgccccggcgtgcaggactcagctgccctcacaatccaagagagcccggtgcacatcctgagcccccaggacaaggtgtcgttgaccttcacaacctcagagcgggtggtgctgacttgtgagctctcaagggtggacttcccggcaacctggtacaaggatgggcagaaggtggaggagagcgagttgctggtggtgaagatggatgggcgcaaacaccgtctgatcctgcctgaggccaaagtccaggacagtggcgagtttgagtgcaggacagaaggggtctcggccttcttcggcgtcactgtccaagatcctcccgtgcacatcgtggacccccgagaacatgtgttcgtgcatgccataacttccgagtgtgtcatgctggcctgtgaggtggaccgagaggacgcccctgtgcgttggtacaaggacgggcaggaggtggaggagagtgacttcgtggtgctggagaatgaggggccccatcgccgcctggtgctgcccgccacccagccctcagacgggggcgagtttcagtgcgtcgctggagatgagtgtgcctacttcactgtcaccatcacagacgtctcctcgtggatcgtgtatcccagcggcaaggtgtatgtggcagccgtgcgcctggagcgtgtggtgctgacctgtgagctatgccggccctgggcagaggtgcgctggaccaaggatggagaggaggtggtggagagccccgcgctgctcctgcagaaggaagacactgtccgccgcctggtgctgcccgctgtccagctcgaggactccggcgagtacttgtgtgaaattgacgatgagtcggcctccttcactgtcaccgtcacagagtcttaccaaagtcaggacagttcaaataacaatccggagttatgcgtcctcttgaaaaagccgaagacccggcggctctggtcccgcttccccccatggcgacgaacagctggcactgagtagcagctgcccccatagtttggggcccacattcctctgtcccacctccctgccattgctttttgcctctccccagactgcttcagccgctaacctaacctggcccctgtgggcatttgagtttgcgacccctgtgttaaaccaataaacatgcaaataaatgtacaaaaaaaaaa

SEQ ID NO: 62044 - DNA, 466 bp, Homo sapiens
gcgaggaaccctctggccgcgctgtggctgtttcaccgctccccggctgggacttggagtcccttatctttccctggtttggtacatgacccggaagcctcggctggccgttgcgtcatccatggcgccggcgcagagcgagaaggaggtgggaacgccgtgaagcaagagcggtcggcagagcggggaggcgaactgcagcagagttcttgctttccggcaggtgatggcgccccccgcggcctagaggtccagcgcccgccgcgagcagcggacagtcctcctgttgtgtccgaccgagagtcctggtgactttgaacatgctggtgccgctagccaagctgtcctgcctgggagtgaacatggaaaggtttgcagaagaagcagatgttgtaatagttggtgcaggccctgcagggctctctgcagctggtcgtctaaaacagttggctgtggcacatgaaaa

SEQ ID NO: 62045 - DNA, 640 bp, Homo sapiens
aaattcattgttgacaaaaattatctaggttttgtaagaagacaaatcgaaagtgccatttctctggccacttggttctattgtcgagtttgtattggggccaagtggtattacagaagaaaataagacatttaggttttaggtcaggtgttagttgaaggggttttaggtttttaagaacacaggctaagggggaagagggaggaatggatggcggaaggttgcccatagtggagaaggtaagtttaaagaggaaggtagacacatggagaaatggaggtgggcagctaccagtcttccagtaggcatccctgactgagtcctgggctttaatgtgggtgagcagccaaagcaggcatccctgcaattgacctgccatcaagggaatgtgggtgaatgatcaaggaaggcatctccgcagtgatcaaacgccaagggaagactgtcttcccaagtccatgaccaacatcggagtctttggatgcacggataaaatgtgtctcctttttgtctctactaggaagggagagaaactgaaactgaaagaagagagattgaagggaggtgagagaggttaggtaaagagcaaaaaaaccgcttatccaagtgcaaaaaaaccgcttaccgatttgaaattagg

SEQ ID NO: 62046 - DNA, 508 bp, Homo sapiens
gcgttgaattcgtatgctgctgaaggaatcttgtggaaatgtttttttctctgcagtgagaataaggaggagcaggaaacacagcataattagcatcatcattattctggctggagcaattgcactcatcattggctttggtatttcagggagacactccatcacagtcactactgtcgcctcagctgggaacattggggaggatggaatcctgagctgcacttttgaacctgacatcaaactttctgatatcgtgatacaatggctgaaggaaggtgttttaggcttggtccatgagttcaaagaaggcaaagatgagctgtcggagcaggatgaaatgttcagaggccggacagcagtgtttgctgatcaagtgatagttggcaatgcctctttgcggctgaaaaacgtgcaactcacagatgctggcacctacaaatgttatatcatcacttctaaaggcaaggggaatgctaaccttgagtataaaactggagccttcagcatg

SEQ ID NO: 62047 - DNA, 1374 bp, Homo sapiens
gggcggaattcgcctggcggttgctttgtctctccttcgccggagccggctcttcctgttagtctccgctgctagttcttggctctgggaggcccaggtggctctgcagcagcctctgccaccctgtgacctgcgagtattgggacatccctagctgacgccaggacacccgggaagccgaggaatggactcggtggcttttgaggatgtggctgtgaactttacccaggaggaatgggctttgctagattcttctcagaagaatctctacagagaagtgatgcaggaaacctgcaggaacctggcttctgtaggaagccaatggaaagaccagaatattgaagatcacttcgaaaaacctgggaaagatataagaaatcatatcgtacagagactgtgtgaaagtaaagaagatggtcagtatggagaagttgtcagccaaattccaaatcttgatctgaacgagaacatttctactggattaaaaccatgtgaatgcagtatttgtggaaaagtctttgtacgtcattccctccttaataggcatatcctagctcactcaggatacaaaccatatggagagaagcaatataaatgtgaacagtgtgggaaattcttcgtttctgttccaggtgttagaagacacatgataatgcacagtggaaatccagcttataaatgtacgatatgtgggaaagctttttattttctcaattcagttgaaagacatcagagaactcacacaggagaaaaaccctataaatgtaaacaatgtggtaaagcattcactgtttccggttcttgtctaatacatgaacgaactcacactggagagaaaccctacgaatgtaaggaatgtgggaaaacattcagattttcttgttcttttaagacgcatgaaaggactcacactggagaaagaccctataaatgtaccaaatgtgataaagccttcagctgttccacttcccttcgttaccatggaagcattcatactggagagagaccctatgagtgtaaacaatgtggcaaagcctttagtcgtttgagttccctttgtaaccatagaagtactcataccggagagaaaccctatgaatgtaaacaatgtgatcaagccttcagtcgcctcagttcccttcacctccacgaaagaattcatactggagaaaaaccctatgaatgtaagaaatgcggtaaagcctacactcgttccagtcaccttactcgccatgaaagaagtcatgatatagaggctgggtgtagtgactcagcctataatcccaacttactgggattacaggcatttgccactgtgcccagcccatttcaatatttttgatcaataaatgtgcctgtccttcaaaaaaaaaa

SEQ ID NO: 62048 - DNA, 1015 bp, Homo sapiens
ttttttttttttttaaacacacaactttccaaatcttggatgcattttttacagcagtaaaccttgggtggacaaagatactataatctcaaatgacttaccactggcatgcagaaagttaacatatcaggctacttcctccaagaggctttcattgacacccccagcctgagctgtctctcatataattgtttagcatccagtacttcctctcatcataactattatattgtaactaagttacttgtttgtatctccctctgaactgtttcttgactgaaataaatatgtcaactgtttgaatactttcttcacccgtaagtcagtacttcatttttctaaaccaaagcatagaagagctgggaagcaattaaggcgcagtaatctagaggtcatattatgcaagggatatgctgtggctattagcaacagattccattggcttatgaggcactgcctgaagcttccagggaaacatacaggggaaacagtccagaggattcaggatggtctggtacgactctggactagctctatttggaaggtccagtccctacactgaccccagaatgacaccataatgcagccctctctgacatatttgtaactctgcttgccacataatcagtatcctcatctcttagcacatggtaataacattgtctttaacataaaagtgtacctatttgcagtcactacctctatcaccaccaccagcagagcctgagctgaggaaaccacggttctcaatacccagcacacccacttccaactatctgttaaaacatggtggattactatgaagttctaggactgcaaagatatgcttcacctgaggacattaaaaaagcttatcataaagtggcacttaaatggcaccctgataaaaatccagaaaataaagaagaagcagagagaaaattcaaagaagtagctgaggcatacgaggtattatcaaatgatgagaaacgggacatttatgataaatatggcacagaaggattaaacgaattcc

SEQ ID NO: 62049 - DNA, 446 bp, Homo sapiens
ggaattcggaagaggctgcatggcgcggtagtcccccgagtggaggtcggctgcccctgggaaaccagagagtcggagggagtccatctggagcggccaacttctcctcttaagaacaatgatgaaggctcactggacatatacgctgggttggacagtgctgtttctgacagcgcttccaaatcctgtgtaccatcaagaaattgtttggacttatatgaagagatcctgactgaagaaggaactgcaaaggaggcaacatataatgatttgcaagtagaatatggaaaatgtcaactacaaatgaaagagctgatgaaaaaatttaaagaaatacagacacagaatttcagcttaataaacgaaaaccagtctcttaagaagaatatttcagcacttatcaaaactgccagagtggaaataaaccgcaaggatgaagaaataag

SEQ ID NO: 62050 - DNA, 539 bp, Homo sapiens
aaagcacaccagtgataatattcactcagcatcattatatacccgttggaatgggatctgccgagatgatgggaatatcaagtctgatgtcttcatgacccagttctctgccctgcagacagctcgatctgttcgaacaagacggttggcagctgcagaggaaaatattgaagtggctcgggcagcccgcctagcccagatcttcaaagaaatttgtgatggtatcatctcttataaagattcttcccggcaagcactggcagctccacttttgaaccttcccccaaagaaaaagaatgctgattattatgagaagatctctgatcccctagatcttatcaccatagagaagcagatcctcactggttactataagacagtggaagcttttgatgctgacatgctcaaagtctttcggaatgctgagaagtactatgggcgtaaatccccagttgggagagatgtttgtcgtctacgaaaggcctattacaatgcccggcatgaggcatcagcccagattgatgagattgtgggagaga

SEQ ID NO: 62051 - DNA, 987 bp, Homo sapiens
ttttttttttttaaggtgaaatcacctatgttttattataaaaaacatgtgacacttataataaaacccagtaaggagcacatacaatttgccctgggttcccattttctgagcgatctgtgtttgcttggggtggaggcaccgggaggtgtggccacgtggcttcataaagctcagctgcggttctccgtggccacagtgactctgctccgggtacccagtccccgactccttggcctcccaggggccatcccgggggtctcggaaggcacagcctcggttagctttgacttcttggtgtggctgaaactcagcctgtacaggagagctgccattgctgccgcggggcctgcccaggtgtgagcacacaagctcacccgggcccaccctgtgccctggagggcggctctggcggctgcacccatgtccaagtgacaggcatcacctccttgtgccccagagtttcctctaagtccggccaggccaccgtcccttctgatccggataaccagcgaatactctaattccgttaggctaaaaaaaacctcactctggtcagcttggctcccacaagtctaagggctcagggtgtctgtccgcccctgcccttcctcctgtgcacctgaaggtgccccccatgtggccaaagcccccttgcctgaccaggcctgacacccaccgtgtcctgagccaccctctggaggaggcggcatgcagtttcatatgcgtctaacggcctccatccaacaggacaggcgggagaacggcggacggcctgggcgtgtggcaggggctgcttccctcattttaaacgcgcctacagggtcactgaggctcacacccaaggtctgtccctacaggtggtcccacttcgacaggaagttcctcagcagggtcctcatgagacggtcggcccagaagtctcgagaccggatcctgaatgtcttccacgagctgaacctgaaggatgccatcagctctcgtgcc

SEQ ID NO: 62052 - DNA, 482 bp, Homo sapiens
gcttgaaaccatcccttccagacaaaaggtctggatgagagtagaggacaattttttaaatgcgaagctatgactgctaaatgggacatactgattttgtaacaacaacaaaaaacaaaccctggcacctagggaatctcaaaggaggcaaagactgatcatctttgtttttcaatactgcctttccgctcttccctaaaaacttccatgctacctttttaagatgctgcaagcactttgaattcaaacagcctgctgagcctgtgctcaaacctatgagagcagggagtggcctcagctcctgcacttcccacacggaacacctccagatgtcatccacagtcgtgaggctgataacctgatgtcatggaccaacatggaactgactgtcttcagattctttgtgggaaagagattcctcgctggatcaatcgacttgcctacttcagctcctgtataccctttctacagagttgcctccc

SEQ ID NO: 62053 - DNA, 712 bp, Homo sapiens
ggtggaattcgcgggtgcctggagccgccagagtttccgcacccgggagggagatgcggccggggctcaggctccttgcagttgtaatttagattcgagaagtggtttatcctttgactggaaaagaaaagtagctgcagtattcccccagcacttgctgagagcatgccgtatgccaggctgtgaggctcgagagacaagcagtggaagagttgcggcctgtttcatctctggattgtaaatctgagcctccttctggcccctggaaggggacagcatcaccatggaatgattcctaaccagcataatgctggagccgggagccaccaacctgcagttttcagaatggccgtgttggacactgatttggatcacattcttccatcttctgttcttcctccattctgggctaagttagtagtgggatcggttgccattgtgtgttttgcacgcagctatgatggagactttgtctttgatgactcagaagctattgttaacaataaggacctccaagcagaaacgcccctgggggacctgtggcatcatgacttctggggcagtagactgagcagcaacaccagccacaagtcctaccggcctctcaccgtcctgactttcaggattaactactacctctcgggaggcttccaccccgtgggctttcacgtggtcaacatcctcctgcacagtggcatctctgtcctcatgg

SEQ ID NO: 62054 - DNA, 819 bp, Homo sapiens
  misc_feature (1)...(819): n = a,t,c or g
cagtgtggtggaattcaagcgacccaaggagccgagcggctccgacggggagtccgacggacccatcgacgtgggccaagagggccagctgagccagatggccaggccgctgtccacccccagctcttcgcagatgcaagccaggaagaaacgcagagggatcatagagaaacggcgtcgagaccgcatcaacagtagcctttctgaattgcgacgcttggtccccactgcctttgagaaacagggctcttccaagctggagaaagccgaggtcttgcagatgacggtggatcacttgaaaatgctccatgccactggtgggacaggtacccatgctcttctctttcaggcgtcattcatacaacaaatattttgaggctgggccctggggatatgctggtgagcaaagtccacacgctgcccactctgaggagctcagtcaatggagggaacatttgcaaagcttctctctctcctttcagcatctccctctccactttcagtgtctccatttgtcgcaaccttttcctcagttcagctccctccagtcttagacctgggaggcgctttcttctgtaacagactgttcctatgggtcccactcttgtccaacccaggacctcattaagaattcacctgaatgagctaattctcactgggatcccaatctgaccccccttaacccagggaggagcctggtatcctacccactggtctagccttctgggctactggtgggtccttggcagaactggggtgacatatcatgctcaccacaggtctcaggattgtagcaggacacacattaactcattntgt

SEQ ID NO: 62055 - DNA, 462 bp, Homo sapiens
ggaattccaggaggctgccaagctgtaccacaccaactatgtgcggaactcgcgggccatcggcgtgctgtgggccatcttcaccatctgctttgccatcgtcaacgtggtgtgcttcatccagccctactggataggcgacggcgtggacaccccgcaagccggctatttcgggctcttccactactgcatcggcaacggcttctcccgggagctgacctgcaggggcagcttcacggacttctccacgctgccctcgggcgccttcaaagccgcctccttctttatcggcctctccatgatgctcatcattgcctgcatcatttgctttaccctcttcttcttctgcaacacggccactgtgtacaagatatgtgcctggatgcagctcacctccgctgcctgccttgtgcttggctgtatgattttccctgatggctgggactcagatgaagtaaaccg

SEQ ID NO: 62056 - DNA, 727 bp, Homo sapiens
gatgagaaccctctaaagcacgctgggtgacctcagatggctccgctgggactggaaggtcactggagccactggtgaaaatgatgctgtcactaccaactcaaaaggtcacctatcagtgtgccatgtgccacctcctggagcacacacatgtgcacacacatacactcacacgtgtgtgcaggtgcacacctcccccagaggctgcagccaagacgggcatcccacatcatagggatgaatggcaggtctgtcccgccagctgtgtgctctctcccacccgaagaaagcagcagagactcagacggcggagcctggaggagcccacgcagtctgttcccggcacccggtgcgtgtgaagggacttgagggcagcgagatggaatcagcaagagaaaacatcgaccttcaacctggaagctccgaccccaggagccagcccatcaacctgaaccattacgccaccaaaaaaagcgtggcggagagcatgctggacgtggccctgttcatgtccaacgccatgcggctgaaggcggtgctggagcagggaccatcctctcactactacaccaccctggtcaccctcatcagcctctctctgctcctgcagggggtcatcggtgtcctgctcgtggtcattgcacggctgaacctgaatgaggtagaaaagcagtggcgactcaaccagctcaacaacgcagccaccatcttggtcttcttcactgag

SEQ ID NO: 62057 - DNA, 1381 bp, Homo sapiens
tttttttttttttttttaaagctccaaacatttattgtgtcaatgataagcacactttttaaaagacaacatagaatgtatagaaacaaggggttggggactcatgcgcatttccacaatacaggtaattaggttggctggtttcagaagggccagggcatcactcatgacagcgatggtccacgggccctctctatgggactgattcactgttccaatgtgggtctgtttttttgtttttactttttattaaaaaatataaataaaatgggcgctgcagggcctaggctggaaggactctgcaggactctgtcttcggcacaacggcttcttggaggctactgtcagaaaacatcacaaactagcaggatgacagaccacgctgacgtcgactgggcggcacgcgtccaccccacccctgggggcttcaaattttctcagaacttaagggctctcgagcttccatccgaaaactgccacacatcttgagctctctgggtactacgccgaatgggggtgtgtgaagaacccgcggggtcaggggacttccgtgttcgctttctaagtagattcttaatccatgagtgttctgtgcgtgttgcaagagaaaccatgcactggtgaatggctgtttgcaagttgtacatgtgtagctgctgggctcatctttacaaataccctgcggggcatattctgcactcatcccaggcgtggggattagagctccatgtgcagaacgaggggaggagaggcccctccagtgcagaagtttatctgctatgtgttcctgtttggggcaaattcctctagatgacgttgataaacaatcgtcatcctctggcgtgacctggatgccaacctccacgggattggatgcttttttcatctcgattggtgaaggggaaggtggcttatccacagctttttctaagcagaggctgccattgcattgtttccgtttgtgctcgataaaaataagaatgtcccccaatgggaagttcatctggcactgcccacaggtgaggaggtcatgatccccttctggagctcccaacgggccgtggtctggttcatcatctgtaagaatggcttcaagaggctcgggcgagaattcccgtttgcttaagtgctggggtttgccttgcttgcggcgagacatggtgggctgcggggcgggcggcggcggcggcggcggcggcggcgggcggacgacggctcggttcacatcgggagagccgggttagaaagaaggagactccagagaaaatatcttcatcagtgccttttgacatccaaaataaattagaaataatacaaagatggcgcagggaagatgaattgtgggagagccgtcatggcttttttttaagcaaaaaaaaaa

SEQ ID NO: 62058 - DNA, 1179 bp, Homo sapiens
  misc_feature (1)...(1179): n = a,t,c or g
aagtgtacacaccaagtcctcatgaaatgatcagtcagtggggaggccgcaaccacacaatcaccctacaaggtgcaaggacaactccagggagtctcaagtgcagcctggtggctcagccagattttggcatacaccccaccctaccctgaggcaccagagggggaaggaacgggactagggggcagagagctaaccagcagaaaggggcagggaccgggccttcccaacaaaacctccccaacctggtgcgttggtgcagctgaggctcaggaagcccactcaccacttggtacagccgctcaaatcaatgccagtctgggcctgcgcacagcggatggcggtacgcaccagcacctgcgggtcagcctgggggtcgaggccatccagggaaggagaccattcacccccaaccagcactgcctcctcttctttcctgcccagcaaaaactgcaagaagagatcagggatacaaaacaaaaaactacattacctgggtctcccactgcagggcaaggctgccacccatcaggatgaaggcagccggaagtggggaagtccaccacacagtgaggtctctatctgcaaacatgaaccagccacctcgctctctctgactagtcgtaacagctctgagctgcaccttcctcctgggtgaaatgaggggtgttcggctctgagatgcctcgttttatgcattcaggaacaggagccgaacactcaaaacatgacaggttgtgcacattacccgtgaatgcatctcctcctgctctccagctcttaccttaatctgcttcagaggatgctctggcgtctcccttggctcagccatgtcatccacaaagagcatgcaacaacgatacaattccttccaaccccggggaagagagcagcagtacctgtgcaggaggagacactcagagctgccttcagcctccagaaatcagataagtgagagacgcctgtcagcttaccttcgaactataagcggggtcactgtctgcagtgatggggcttcagcaccagcgttctgggagctggcctcctttttcaggaaggaggaccggggatccggctttggatggatgggaggggaaaaggggntgggntcagggggggaagggttgattaggccaanttcaggttggcacgggacaggaaatttttnaggggggacca

SEQ ID NO: 62059 - DNA, 615 bp, Homo sapiens
ggaattcatgtggtgctctgtgggcagctgggactggcccgccgtaagcacatggattattgtctgaggctgtaatgggaaagtcggttcctgggctgctgtctcatagacatcagcttgcagggaagctgggggctctccgaattgccctgctccggggcccctcctgctgcgtgactcacaggcacattgcagagagaagctgccgctcccagtaagtaatgaaaagagacatgaagaattggtatttcaaatgaccaccatgttgcaaaagtctgacagcaatgcaagcttcctccgtgctgccagagcaggcaacctggacaaagttgtggaatatctgaaggggggcatagacatcaatacctgcaatcagaatggactcaacgctctccatctggctgccaaggaaggccacgtggggctggtgcaggagctgctgggaagagggtcctctgtggattctgccactaagaagggaaataccgctcttcacattgcatctttggctggacaagcagaagttgtcaaagttcttgttaaggaaggaggagttgcagctggggttgtgggggccccttttgggggtggggtagctagacctccttttggggg

SEQ ID NO: 62060 - DNA, 987 bp, Homo sapiens
ttttttttttttgtgtttataacaggttttactttttttcttaaaatggggatgttcttactaaataccattttatttcatttcttcacagatcttctggttcttgatcatctataattatcaagtgtcgtatatagggaacaagtattgatgttcaatatgattcaaactattactgttccatagtcagtggagctttttcaatgtccagaaagaatactttcaatctttatgaacagcctaggattttgcagttgtttctgaaggctcaaattgtcctgcttcaaatttttctttgaattttaagtagtctcttcttttatcaaaatattttatccactgttggggacaacttgattcgaaagagcttcttaacttcttgcattgagaagcatcctctaagttctcatctaaacacttccagtactcatcccgggccccccagcagacctgtctttccttcatagatggggctgccattcctactgcgatgaagctctctgcccgcccacgtccggcttcctttcgatgtcgacgggaggaaactgtcacgcaggccaccaaccggcggtggagggcgcggtgccgagtcctgccactgcagggtcgccccgctggctcaagctctagaagcgtagacctccccagccgcaaaaagcaagtcacgcggcgaaaccgcggactcttttgacccttccgagctaccatttactttccatagaggggcgggacttcctgtttcgcttttatcttgtctcgctcttccgcccagtctcgagtgcagtggtgagaacacggcttactgcagcctcaaaatcctggacccaaaagatcctcccacctcagcctgcctcccaggtagctgggactacaggcgcacaacaccatcgcttcttggattaaaagaaaaggatgaaacgggccccagaaagaggcggtgacgtcccagaacccatggcaggggagttgggaaaataaatatttgta

SEQ ID NO: 62061 - DNA, 1129 bp, Homo sapiens
aagtctgcaaatggacttgaggttttcacattagtataaatgtcaatatgtagtttagggaatttgccttattcctccattcctagcaaaattagatacagaagcagctaattaaatcaggaaaaggaaactgacagtaagtcataggacccattgtcttctctcatgtaaaagtagaagttgtgattcaatctgttctgtaggatttaaaagtataatggcacattgaagtttgacatactgaaattcaggctctgtcaatttcatctctgtaacctttattgtttctgagtcttgagttttctcataagggctcactctccacctgcgcaaggactgcaattcccaggggcctccagggcacccggccgctccagtccagtcgtgcaggcggcgcgctctttctcgctccgctcaagtccaggaaccggttcccgggctcccagcctctcggcagcgcccacgcgcctgggccaaagtccgcgaacggaagccggcggcgaggaggattctgggagttggaggccgaggctgcgacctgcgcaggcgcaaacctgcccctggggtgagggctgtaagtggcgcgattcgcggcagcgccccgatggaacctcctggtcctgtgagggggcccttgcaagattccagctggtatgagccttctgcagagctagtgcagactaggatggctgtatcactaacagcagctgaaactctggcccttcagggtacacagggacaagagaagatgatgatgatgggaccaaaggaagaggaacagtcttgtgagtatgagaccaggctacctgggaaccactctaccagtcaagagatcttccgccaacgcttcaggcatctccgctaccaggagactcctggtccccgggaggccttgagccaactacgagtactctgctgtgagtggctgaggccagagaaacacacgaaggagcagatcctggagttcctggtgctggaacaattcttgaccatcctgcctgaggagctccaatcctgggtgcggggacatcaccctaagagtggagaggaggctgtgactgtgctggaggatttaaagaaaggacttgaaccagagccgcaggtcccaggccctgcacatggacctgca

SEQ ID NO: 62062 - DNA, 1077 bp, Homo sapiens
cgctggcgggaacccaggctttaggtgatgctgtcatctcctggggggccactgaaaggtgctgcctctttgtagctctccttggaaactacatcaggctgcgaatctgaaggaagcaaatgactgttctgtacttaccttctatgcctaagatgcagggcaagactctcgtgcaccagcataagagaatgcacagcattcgggagggaaccaatgccactgcaccctgcaggcagggccacctgagcagggctgaggcacgcacgagggaatctcttcacagcccatcttactgctggcaaagcagcttttccctgtaggtcaggttttcctaaattaggagccgagtctcacagacactttgatcacgaacctttcagtttctctcctaacaatgccatgggcatatgcctgtctatcccatcctttcagcaggaggattcaaaggagcccacacggggctttaccaatgctctcccaccctctcaggaaagctgccatccagtgcccaggcacctaccgaccacagtgggctccaggtccacaaacactgctctgggcacgtgcttgccagctccagtctcactgaagaacgtgttgaaggagtcgtccccgccaccaatgggtttatcacttggcatttggccatcgggctgaattccatgttcaaggcagtacagttcccagcaggcattgccgatctggacacccgcctgccccacgtggatagagatacactcgcgctgtgaacaggaacataaaagtgaacccattcatttcaaggcaacttgaaactatatggcatgcaaaatattctaatttaatatttatatactgcttcagtatctggcgctttcacagtcgatatttcctaggagggttagtgactgatccctttatcgctgtgaaaactaattgctgtaaaccatactagctagtaagctctagaggtagccctagaacctgtttgccactacacaaaacttacgttattttaaaacttggaagccatgtaatgtcaataatcaaccccacattatagcccgtcaccagaattctctgaagaatatgtagcac

SEQ ID NO: 62063 - DNA, 1514 bp, Homo sapiens
ttttttttttttcaggaaatagaaaccacactaggtatttcaaacagaggggatataagttagggactgattgtgcaggttttgcaaggctcagagagcaaaagtggatgttgcagaatctcagagctggatacttgcaggaagctgctaccacccttagggctggagaacccagggaagctaagaggagggtgcaacgaggctggtgttgggactgccaaaggaaacacagaatgacagctccatctctgcagacctcagatttgaccaggcctctggctgcctgggcagcctcattgccaatgggctgaaaggttctgtcactgttcagtggtctgacttctgagttctgtgcacaccctgagctctgctcctctggcctgggccaccagtccttgtctgagtgccccaggtctggttatgacttcaggcctcagcacctggttgtctcttctgcaaagaatgcattctcccccagtccacccagaacacacagcctccatccaggtactggctctgagcaggacagagagcatgcagcaggtgctcagcaatatggaaatgggaccaaacagagggagtctccacagctccccgtccctcacagcagaagccagagccgctgcagtgcccagctggtcttcatcacgtctatgagctctgcaatcgctctgcagtcgcctcaactcctggtctcctctgctccttctcactgcacccgcatctcccatgtttgcactggctgttccctctgcctggaatgctccttgcccagttatcccactgtcttctttgcatctggcacacagtagatgctcaataaatgcctttggtgtcacatgtgcagtgtggtgtgacagggaggggctcgctgggcttcagccccggcactctccacttgacctcagcagctccaggtagagtggggagaactcagcgtctccttctagaacaggttccaggatccaacactgaaatgagggtgaggtggttttagcatcattttatcactcttgatttagtttattaatcatacatgattattgattataattgttgctgggcatcctgaggcctcagaagttcaccctttgccctgaccccatgggggccctgcccccgccttccgggaaggacaaacacgggaagaggtcagtgcccgagccacccccaccgccctccctcggggcctcattgctgcagacgctcaccccagacactcactgcaccggagtgagcgcgaccatcatgtccatgctcgtggtctttctcttgctgtggggtgtcacctggggcccagtgacagaagcagccatattttatgagacgcagcccagcctgtgggcagagtccgaatcactgctgaaacccttggccaatgtgacgctgacgtgccaggcccgcctggagactccagacttccagctgcctaattctgaatatatatatatatatatcttttcaccataacccaagaagaacaagtttttatagcttttatttaaagaggtagg

SEQ ID NO: 62064 - DNA, 599 bp, Homo sapiens
tttcgtgtgcagtacagcctctttccggcaaatcacgcgagatttcgttcacccgggctccacagggtcagtgacgcgcgagcggctcccgcgactgtggctcccgaagctgcttcgggccccagcggtgagggagaagactctcaaccagggtgacttctaggcgtcctcccggagctaccggggacactggcgttattgcccggaacactgagatagggaatgctcgagaaacagaagcaggagtattttatacagaaatcttgtgaaaccactgcccaaccagagcaatgattgttcaaagagtggtattgaattctcgacctggaaaaaatggtaatccagtggcagagaatttccgaatggaagaagtctatttaccagataatattaatgaaggacaagtacaagttagaactctttatctttctgtggatccttacatgcgttgtagaatgaatgaagacactggcactgattatataacaccttggcagctatctcaagtcgttgatggaggaggtattggaattatagaagaaagcaaacacacaaatttgactaaaggcgattttgtgacttctttctattggccctgg

SEQ ID NO: 62065 - DNA, 473 bp, Homo sapiens
cacctgcaccggctgcgaggagcagggagctcctcaaagagctcaggaacggacaggacatggacacagtggtctttgaagacgtggttgtggatttcacgctggaggagtgggccttgctgaatcctgctcagagaaaactctacagagatgtcatgctggagaccttcaagcacctggcctcagtagataatgaggctcagcttaaagccagtgggtctatttctcagcaggatacttctggagaaaaattatccctcaaacagaaaatagaaaagttcacaagaaagaatatatgggcctcccttttaggaaaaaattgggaagaacatagcgttaaagacaagcacaacaccaaggagagacatttgagcagaaatccaagggtggagagaccatgtaaaagcagtaaaggtaataaacgtggaagaaccttcagaaagactcgaaattgtaatcgtcatctgcgcagg

SEQ ID NO: 62066 - DNA, 579 bp, Homo sapiens
cggccttctggggcctcaagctctcagacgccgaacgacaaggagcggcgggagggcggcgcagtgccggcggcggctgccctgggcgcagaggcggacgacgacagtgcggacgggctgtgggagctgccggtggagccggccgagcggaggcctgagtgcacccgctgcagccggcctcagaaagtgtgtttgtgtccatttctcccagcgcaccctctgcatatctctacccacttgtacataattcagcatccagcagaggaaaacaaagtgttgcgtacagttcctctactagcagcatgcctcccccaggacaagtgtaaagtgaagatcggtcgtcgcttcagtgaagaaagagatcctgaactttcaactgtttgccggaagtctggtacattaatattatatccaggggctgaagctgctaatttggaagaatttatattagattctcctgtttatccttctacaatcatcatcattgatggtacatggagccaggctaaggacattttctataagaactccttgttccgacatcccaaacaggtgcaattaaaaactagcatttctagt

SEQ ID NO: 62067 - DNA, 447 bp, Homo sapiens
cttcattctctcatccagctcctcggcctcatcggaacatttccaccaccattactcctttggaaactggtggcccggttccttcaaggggcacaggatgtctttgcctttttatcagaggtgccaccagcactatgatctcagctaccgcaacaaggacgtgcgcagcaccgtgagtcactaccagcgggagaagaaacgctccgccgtctacacccagggctccacggcctacagcagccgctcctccgccgcgcaccgccgggagtccgaggccttccgtcgggcgtccgcctcctcctcccagcagcaggcctcgcagcacgccctgagctctgaagtcagtcggaaggcagcctcagcctacgattatggctcctcccatggacttacagattccagtctgctggtagatgattattcatccaagttgagccccaaaccaaa

SEQ ID NO: 62068 - DNA, 880 bp, Homo sapiens
ggccggacggacagccccacaccgacatgtaaccatggactgcaggaccaaggcaaatccagacagaacctttgacttggtgttgaaagtgaaatgtcatgcctctgaaaatgaagatcctgtggtattgtggaaattcccagaggactttggagaccaggaaatactacagagtgtgccaaagttctgttttccctttgacgttgaaagggtgtctcagaatcaagttggacagcactttacctttgtactgacagacattgaaagtaaacagagatttggattctgcagactgacgtcaggaggcacaatttgtttatgcatccttagttaccttccctggtttgaagtgtattacaagcttctaaatactcttgcagattacttggctaaggaactggaaaatgatttgaatgaaactctcagatcactgtataaccacccagtaccaaaggcaaatactcctgtaaatttgagtgtgcattcctacttcattgcccctgatgtaactggactcccaacaatacccgagagtagaaatcttacagaatattttgttgccgtggatgtgaacaacatgctgcagctgtatgccagtatgctgcatgaaaggcgcatcgtgattatctcgagcaaattaagcactttaactgcctgtatccatggatcagctgctcttctatacccaatgtattggcaacacatatacatcccagtgcttcctccacacctgctggactactgctgtgccccaatgccatacctgattggaatacactccagcctcatagagagagtgaaaaacaaatcattggaagatgttgttatgttaaatgttgatacaaacacattagaatcaccatttagtgacttgaacaag

SEQ ID NO: 62069 - DNA, 1227 bp, Homo sapiens
ctgtggaattcggacgagggcgcccgttgtcacggccccgggcggagctctgctgcgggcgggcgctggacggctgcttcggggaggcgtccaggagctactgcggccgcgacatgaagggaacgcccctgacctggcctgcaacttcagcctttctcaaaatcggggcacggtcatcgtggagcgctggtggaaggtaccgctggccggggagggccggaagccgcgcctgcaccggcgacatcgcgtctataagctggtggaggacacgaagcatcggcccaaagaaaacctggagctcatcctgacgcagtcggtggagaatgttggagtccggggtgacctggtctcagtgaagaaatctttaggccggaatcgactccttcctcagggactggctgtatatgcatcccctgaaaacaagaagctgtttgaagaggagaaattgctgagacaagaaggaaaattagagaagatccagaccaaggcaggtgaggcgacagtgaaatttctaaaaagctgtcgcctggaggtagggatgaagaacaatgtcaaatgggagctgaaccctgaaatagttgcccgccacttctttaagaatcttggtgttgtggttgccccacatacattaaagttaccagcagagcctatcacacggtggggcgagtattggtgtgaggtgacggtaaatgggcttgatactgtgagagtgcctatgtctgtcgtgaactttgagaagcccaagaccaaaagatataagtactggttagcccagcaagctgccaaggctatggcccccaccagcccccagatctaaatctactctccctccaaggcagcaaagcagaatcgggagcagtggagcagaaatgtgcaagcaccctgatctcactcccagctctgaccaaatacagaattttagagaacatctgaagacatcagactgcactgcgtatacatgttgaattcttcatttttgccatctttaactgtcatcactggggcagggaagtcctgttccagaagtaccaggctgtagatttgataagctagatgcagtagaccgaaaccatccaaaacctgtttagcttcttcctccattggagtttattgggacaaacaggagagccagccattgtctccagtacttgcctcattctcatcatccaaactgaacatttgtatcccaagcagaaataaagagaatatgttctttttaaaaaaaaa

SEQ ID NO: 62070 - DNA, 1580 bp, Homo sapiens
ggaatactgggtcgacccacgcgtccggacgaaatggacatgacttgggagaagcgggttgcgttcggcggcggcggcggcggcggcggtggtggttgtggcgaggctgtgcggcagggcgcacgggacctgtcctgcagcggctctctcaggccgtgggtcgtcgctgcagctgccgggaaagaaggaaacgacgactccgggggcgaacttggcacacagggaggaagggaaaggatgcatggtcatggaggctatgattctgattttagtgatgatgaacactgtggagaatccagcaaaaggaaaaaaaggacagttgaagatgacttactgctccaaaaaccatttcagaaagaaaaacatggaaaggtggcccataaacaagttgcagcagaattgctggatagggaagaagcaagaaatagaaggtttcatctcatagctatggatgcttatcaaagacatacaaagttcgtaaatgactatattttatactatggtggcaaaaaagaagacttcaagcgtttgggggaaaatgacaagacagacttggatgttatacgagaaaatcatagattcctatggaatgaggaggacgaaatggacatgacttgggagaagagacttgctaagaaatactatgataaattatttaaggaatactgcatagcagatctcagtaaatataaagaaaataagtttggatttaggtggcgagtagaaaaagaagtaatttcaggaaaaggtcaatttttctgtggaaataaatattgtgataaaaaagaaggcttaaagagttgggaagttaattttggttatattgagcatggtgagaagagaaatgcacttgttaaattaaggttatgccaagaatgttccattaaattaaatttccatcacaggagaaaagaaatcaagtcaaaaaaaagaaaagataaaaccaaaaaagactgtgaagagtcatcacataaaaaatccagattatcttctgcagaagaggcctccaagaaaaaagataaaggacattcatcttcaaagaaatctgaagattctctacttagaaactctgatgaggaagaaagtgcttcagaatctgaactttggaagggtccactaccagagacagatgaaaaatcacaggaagaagaatttgatgagtattttcaggatttgtttctatgagacgagagagagaagcctccgctccttaatgtgaaacttcatgaagttttaaacttcatgcaatttgaaattccatataagtttttatctgcaagttacagcttgtgtggtttgtctttggaaataaaaatccaggttctctcagaatgtcagaggctttggaagttcattagttcaattaaagactttcctgtcctttaaatatcttttcaattgcttatctacaattctgttttatttgtagctcctagaggatagagctggacagattccattgttcctacattttgtaggttttttttcactgccttcattatgtatcttctcttgccttcattattttattttattatttcttctttttctcttttttagagccaccaatactggatttg

SEQ ID NO: 62071 - DNA, 629 bp, Homo sapiens
tttcgtggaaagagtactttcttactacaaggatgggacgataggagcgatatttctagtctaagggaaaacgctggccgagtgtggtggctcacgcctgtaatcccagcacttcgggaggccgaggtgggtggatcacctgaggccgggagtttgagaccagcctgggcaacaagataagtttataccatggatagcacaaaggagaagtgtgacagttaccaagatgatcttctgcttacgatgggacttaatgataataaagcaggaatggaaggattagataaagagaaaattaacaaaattattatggaagccacgaaggggtccagattttatggaaatgagctcaagaaagaaaagcaagtcaaccaacgaattgaaaatatgatgcaacaaaaagctcaaatcaccagccaacagctaataaaagcacaattacaggttgacagatttgcaatggaattagaacaaagccgaaatttgagcaataccatagtgcacattgacatggatgctttctatgcagctgtagaaatgagggacaatccagaattgaaggataaacccattgctgtaggatcaatgagtatgctgtctacttcaaattaccatgcaaggagatttgg

SEQ ID NO: 62072 - DNA, 480 bp, Homo sapiens
  misc_feature (1)...(480): n = a,t,c or g
gatataagaagcgaaangaattcgatgaccttagatcagcgtcgtggaattccgccgccacagcctcttgccctctgacctgcaggtatcaggagatccatagctaagcagactggacacccgggaagctgggaaacgggactgtggatattcagggatgcggccatagaattctctccggaggagtggagctatctggaccctgctcagcagaatctgtatagggacgggatgttagaaaactacagaaacctggtctccctgggtattgctgtctctaagccagacctgatcacctgtctagagcaaaggaatgagccctggaatgtgaagaaacatgagacagtagccagacacccagctgtttcttctcatttcacccaagacctcttgccagagcatggtataaaagattcatttcaaaaagtgatactgagaagatatggaagctatggcattgagaatttacaattaaagaag

SEQ ID NO: 62073 - DNA, 1203 bp, Homo sapiens
gagtctcctacacgcagtcaacacttgccacgagcggctagacttaggacaggcaagttgccctgccatccttctatcgcccccacccctcctttacttaagggcgatggcagagacgtcctcctcccccttctcctcctctttggtgcctccagccaggaggcgggagcgatccacagcagctgacccagctcaggcactgcctctctcacagccctcaagacacaccatgggcccagaggcaggtttgctacacagcagcgacgacgcaggcggcggccccagcgactcgcaactgcctccctgaccacagcggccaccgcccaacacccccgagaagccatcgccaccaccggcaggagaacctagggtccataaagccatcttcgcgatcgactaaagctacgtcaacaactatggcgggcgacgggcggcgggcagaggcggtgcgggaaggatggggtgtgtacgtcacccccagggcccccatccgagagggaaggggccggctcgcccctcaaaatggcggcagcagcgatgcgcctgcgtacagaactcctccgtcgcgccagggccggcgggaagtgaggttctcggacgagccgccagaagtgtacggcgacttcgagcccctggtggccaaagaaaggtccccggtgggaaaacgaacccggctagaagagttccggtccgattctgcgaaagaggaagtgagagaaagcgcgtactaccttcggtctaggcagcggaggcagccgcgaccccaggaaaccgaggaaatgaagacgcgaaggactacccgccttcagcagcagcactcagagcagcctccgctacagccgtctcctgttacgaccaggagagggctgcgggactctcattcctctgaagaggatgaagcatcttcccaaactgatttaagccaaacgatctcaaagaaaactgtcaggagcatacaagaggctccagcagtgagtgaagatcttgtaatcaggttacgtcgaccccctctaagatacccaagatatgaagccaccagtgtccaacagaaggtcaatttctctgaagaaggagaaactgaagaagatgatcaagacagctctcacagcagtgtcactactgttaaggccagatccagggattctgatgaatctggagataaaaccaccagatcatctagtcaatatatagaatcattttggc

SEQ ID NO: 62074 - DNA, 435 bp, Homo sapiens
  misc_feature (1)...(435): n = a,t,c or g
gcacgcgcctataatgccagctactgaggaggctgaggcaggagaattgcttgaacccgggaggcagagcttgcagtgagctgagattgtgccactgcactccagcctgggcgacaaagcaagactttgtctcaaaacaaacaaaaaacccacatacacactanaaagatgggtgggattacaggaaggcagatgcagaccctgaagcctgcgatggagctgattttgtatttccagcattaacaagttcctctcatgttcttccatttgctcacagacctcccacagcccagtgtgccaggacgtgctgaaattcatcagtcagtggtgtggagggctccccagcaccagcttttcctttcagtagttggtagagctgaggaagagttagggcctctccctcattaaagttttataaataattgaaaaaaaaaa

SEQ ID NO: 62075 - DNA, 1616 bp, Homo sapiens
aaagtataggtcttaaagctatggaacttgatgggggccaaagaatgtactatttttaagtaatgtggtattgtaccacaaagtagatctaaataagctttatgctgtatttgaactaattggggcatgttattgggaggaggttggggggatttttggttatgttaaatgtttgatgtttaaattgttgcatgttgaattcaaactttttaacaagtccttgatgtttcaatttgaaagtgaccaatggggctgaggctgtgtccactgaggctaagatgactgcctttcctgattggccttggcttttccatacattgtgtgacccttgccctatgaccctttggctgaccttaccggaagccatgacgacagcagccttttgccattagacgcagggtgatggtgaggattccaagggttagacaaaactggttaatctgaactaggtgactgttaccttgcgtgttttgtggccaaaccaccaccaaaaacctcacactgtgatgtaagtacttagtgtaaaactagtaaacatttttgtaaaatgtagaaatgcatgtaatcagttaagttttatattttacaatgttctgtaaaataaaacttagcgaggtaaatcgagtaaaggagcagtcactctctaacagattgtaggagaggtttagttggatttagtctatttgacttgcccttaatttaattttatggcaaatcacaaatgtgtcgaaggtttagcaatataatagcaaagtcctactccagtaaataaaagttgatatgtttgtactaactttcaaagacattatgcgtttttatcattacaaggcatctaattgttcccttcatgtgataaaggtggtggaggtggatacagcagtcggagaacatctggcagagacaaatacggaccacctgttcgtacagaatacaggcttattgtagaaaatctttctagtcggtgcagttggcaagatttaaaggattttatgcgacaagcaggtgaagtaacctatgcggatgcccacaaggaacgaacaaatgagggtgtaattgagtttcgctcctactctgacatgaagcgtgctttggacaaactggatggcacagaaataaatggcagaaatattaggcttattgaagataagccacgcacaagccataggcgatcttactctggaagcagatccaggtctcgatctagaagacggtcacgaagtaggagtcgcaggagcagccgcagtagatctcgaagtatctcaaaaagtcgctcccgttccaggtcgcggagcaaaggtcgatcacgttctcgatcaaaaggcaggaaatctagatcaaagagcaaatctaagcccaagtctgatcggggctcccattcacattctcgaagcagatctaaggatgagtatgagaaatctcgaagcaggtctcggtcccgatcccccaaagaaaatggaaagggtgatataaagtcaaaatccagatcaaggagccagtcccgttccaattcgccgctacctgttccaccctcaaaggcccgttctgtgtcccctccaccaaaaagagctacttcaagatcccgttctagatctcgctcaaagtcaagatcaaggtcc

SEQ ID NO: 62076 - DNA, 675 bp, Homo sapiens
ggaattcaagatgatgacctgagctgagggttcaggaagctcggctggcattggccagcttgagttgttgggggcgatgttctgggcaagggaacagcttgaacaaaggcctagaggtgtggacaacttggcttagtccagaagccacagccccagcacttaaaggcctggagatgctgtggtaaagaagggggcttaggtacagttgcccctcgaagccccctgcctgtctctgctgtcctgcagggaccacagtggagggaaccgtgacctcagccggcggcaccgggactgtcgggtgtacgggagccctcaggacggcatcccctacctcacccatcccctgtgtcatcaagatgtggtcagcgtgggacggcttcagatccgggccctggctacacctggccacacacaaggccatctggtctacctactggatggggagccctacaagggtccctcctgcctcttctcaggggacctgctcttcctctctggctgtggtgagtttccccgaaagagagaggagctgggagaggagggagagacagaagtcagggcagccacagtcccatggagagcactgaagccttagttttagcacagatgttgccgtggcagttacttccatctgtgttactcagattggttttaatccttgagacttcccttggg

SEQ ID NO: 62077 - DNA, 898 bp, Homo sapiens
cgacgaaccggaagagggtgaaatgctttcggtaggcactccacggctgtgaagatggcggcggctgcgtggcttcaggtgttgcctgtcattcttctgcttctgggagctcacccgtcaccactgtcgtttttcagtgcgggaccggcaaccgtagctgctgccgaccggtccaaatggcacattccgataccgtcggggaaaaattattttagttttggaaagatcctcttcagaaataccactatcttcctgaagtttgatggagaaccttgtgacctgtctttgaatataacctggtatctgaaaagcgctgattgttacaatgaaatctataacttcaaggcagaagaagtagagttgtatttggaaaaacttaaggaaaaaagaggcttgtctgggaaatatcaaacatcatcaaaattgttccagaactgcagtgaactctttaaaacacagaccttttctggagattttatgcatcgactgcctcttttaggagaaaaacaggaggctaaggagaatggaacaaaccttacctttattggagacaaaaccgcaatgcatgaaccattgcaaacttggcaagatgcaccatacatttttattgtacatattggcatttcatcctcaaaggaatcatcaaaagaaaattcactgagtaatctttttaccatgactgttgaagtgaagggtccctatgaatacctcacacttgaagactatcccttgatgatttttttcatggtgatgtgtattgtatatgtcctgtttggtgttctgtggctggcatggtctgcctgctactggagagatctcctgagaattcagttttggattggtgctgtcatcttcctgggaatgcttgagaaagctgtcttctatgcgggatttcaag

SEQ ID NO: 62078 - DNA, 2160 bp, Homo sapiens
  misc_feature (1)...(2160): n = a,t,c or g
catcttgcatcagcctgtggatgtatgcctaccaccgggctccttcaccagcaaagtggaaaaagaagcgtttcacaacaaattcttctttttgggttggggaaacgcagtggattatagctctgttttcttctttccaaaactgtgcacccctggatgaaacctccatcaagggagacctacaagttgcctggggttcagtgctctagaaagttccaaggtttgtggcttgaattattctaaagaagctgaaataattgaagagaagcagaggccagctgtttttgaggatcctgctccacagagaatgctctgcacccgttgatactccagttccaacaccatcttctgagatgatcctgattcccagaatgctcttggtgctgttcctgctgctgcctatcttgagttctgcaaaagctcaggttaatccagctatatgccgctatcctctgggcatgtcaggaggccagattccagatgaggacatcacagcttccagtcagtggtcagagtccacagctgccaaatatggaaggctggactcagaagaaggggatggagcctggtgccctgagattccagtggaacctgatgacctgaaggagtttctgcagattgacttgcacaccctccattttatcactctggtggggacccaggggcgccatgcaggaggtcatggcatcgagtttgcccccatgtacaagatcaattacagtcgggatggcactcgctggatctcttggcggaaccgtcatgggaaacaggtgctggatggaaatagtaacccctatgacattttcctaaaggacttggagccgcccattgtagccagatttgtccggttcattccagtcaccgaccactccatgaatgtgtgtatgagagtggagctttacggctgtgtctggctagatggcttggtgtcttacaatgctccagctgggcagcagtttgtactccctggaggttccatcatttatctgaatgattctgtctatgatggagctgttggatacagcatgacagaagggctaggccaattgaccgatggtgtgtctggcctggacgatttcacccagacccatgaataccacgtgtggcccggctatgactatgtgggctggcggaacgagagtgccaccaatggctacattgagatcatgtttgaatttgaccgcatcaggaatttcactaccatgaaggtccactgcaacaacatgtttgctaaaggtgtgaagatctttaaggaggtacagtgctacttccgctctgaagccagtgagtgggaacctaatgccatttccttcccccttgtcctggatgacgtcaaccccagtgctcggtttgtcacggtgcctctccaccaccgaatggccagtgccatcaagtgtcaataccattttgcagatacctggatgatgttcagtgagatcaccttccaatcagatgctgcaatgtacaacaactctgaagccctgcccacctctcctatggcacccacaacctatgatccaatgcttaaagttgatgacagcaacactcggatcctgattggctgcttggtggccatcatctttatcctcctggccatcattgtcatcatcctctggaggcagttctggcagaaaatgctggagaaggcttctcggaggatgctggatgatgaaatgacagtcagcctttccctgccaagtgattctagcatgttcaacaataaccgctcctcatcacctagtgaacaagggtccaactcgacttacgatcgcatctttccccttcgccctgactaccaggagccatccaggctgatacgaaaactcccagaatttgctccaggggaggaggagtcaggctgcagcggtgttgtgaagccagtccagcccagtggccctgagggggtgccccactatgcagaggctgacatagtgaacctccaaggagtgacaggaggcaacacatactcagtgcctgccgtcaccatggacctgctctcagggaaaagatgtggctgtgggagggagtttcccccagggaaactccttaacttttccaaaggaggaagtttggggagtaagggacattttggggggaggtttcntcttttgttgaagttggaagggattgggaaaattttcaaaggacaaagnttttttg

SEQ ID NO: 62079 - DNA, 504 bp, Homo sapiens
  misc_feature (1)...(504): n = a,t,c or g
agcaggagnncnngntttcgaaacccatcgaganccgtttgcagngngcnggaattcgaggctcagtacggtgtgtggagctggagcaccgtgaggaagaagcgaggttctttttaagagttcagctgcgagatatcaaacaaagaattactctgtacaaagccagaacacatatatcaaagtaatcctgaagtatcagaacaaaataataggctgtaacagaggaggaaatgattttgaatagcctctctctgtgttaccataataagctaatcctggccccaatggttcgggtagggactcttccaatgaggctgctggccctggattatggagcggacattgtttactgtgaggagctgatcgacctcaagatgattcagtgcaagagagttgttaatgaggtgctcagcacagtggactttgtcgcccctgatgatcgagttgtcttccgcacctgtgaaagagagcagaacagggtggtcttccagatggggacttcag

SEQ ID NO: 62080 - DNA, 894 bp, Homo sapiens
ctcactctgttgcccaggcgtggtggcgggcgcctgtaatcccagctactcaggaggctgcgtgcagtagaatcgcttgaacccgggagacagaggaggcagtgagctgagatcgtgccactgcattccaccctgggcgacaagagcgagactccgtctccagaaaaaagaatgaactggacacggagatcgtccacgacagcatgtgtaatctgtaagattccttcctctttacacatgtggtaggacagctgtagctgagctcccaccacaggaccacaaagcttccagacctgagtgctggcactgcacgtggcgtgcaccagcgaagagaacttgaaacaagaacagcagaacatcaatactagacaagccacacagattccagagttcctttcagtctttatttgcagcaaactaccactttatatggcaggtttgtgtgtctgtacacgcacatacacacacatatccttaagctcgagacagggtgcggctttacagaccaaaaagtatggaagcttggttttaactggtgttagagatcagatggagaggaagtgcagcggtgctcacctggccgctcggttcttcagggagacagcgctgctggtgccgctgtcggcacccacagcctcaccatcccccagggtgcatgctgtcgtggccaggcgcaaactacggcgggacatccgtggagaatcaaatacagggtccaatttgtgctccgtctcaaaatccagagcatctgaagaatagctggaactgagcgcatacgtgtagcccgtgttctccggcacacactggggaggactgtacatgtgaagccgagaaaaatccatgttcaccacttcaaaccatactgcctcgcgccgccgcctcaacctcgtgccg

SEQ ID NO: 62081 - DNA, 410 bp, Homo sapiens
  misc_feature (1)...(410): n = a,t,c or g
tttctgcaggactgtaaactggattcctggaacctttgatattcctggctgtgtatagtgcctgttggtggactgtactgatactcaactagagtgtgaagggactggattcctgcccctgagacacaatgcaagctgtagtgcccttgaacaagatgacagccatctcaccagaacctcaaactctggcctcgactgaacaaaatgaggtcccaagagtggttacttctggggaacaagaagctattttaagaggaaatgctgctgatgcagagtctttcagacagaggtttaggtggttttgttactcagaagtagctggacccaggaaagctctgagtcaactctgggagctctgcaatcagtggctgagaccagacattcacacgaaagaancagattttagagct

SEQ ID NO: 62082 - DNA, 828 bp, Homo sapiens
  misc_feature (1)...(828): n = a,t,c or g
ttttttttttttatagaaaaataagctttatttcaaagcaatctgaaaacagcagtcagggggaccacatttacaaactgataggaaggagcacacagttacatgtccatttagcaaggtatcaagtcaggaatctcaccaattcctgcccaacacctactgagtttcctcttcaggttgaaactaaaaagtagacttgaacatcccagtgatgtctttgttatccaaacatgctccaagttcaggaaagaggacacctgggctcaacttattgagggatttgcttaattatttaaaaaatatttacatgagaatacagctaagttagtagctttcttcacattttcacgttttgaaagagccacagaggtttcattcatgttttaaccagttgagttggtaaagaccctgtctccattttgtaagagatggattacattcaattactcctcacgacagccaaatggaagattattctattgcttttgaaagattattccattgcttttgaagtgctggttggactggcatctgcaatggtagccaaataaatgagatttctatgtaacacatgctggtactgcacgcactcgttcccgcggcccttgttctgatactccacaatacagcggatcagctggtcattctcctcaaggagccgctggatagtctcttgattgacttccgccttgcccctcagccagtccggtacgaaggccaccgacatcccgaggaacctccggaaccacgaccgccaagcaactcgacccacgataggtggggcctacgctctcgaagttgattggatntcccgnctgcgcctgggct

SEQ ID NO: 62083 - DNA, 1524 bp, Homo sapiens
ttttttttttttgctgatcatggagacttttattattgagacctccctatactttggacacttcaaacttaagaccctcagtacttttggctaacctgggttgcaggcaccctcatccaaggtgtaaaggtcctaaggggcctgcagaggtttcaggaacatctcagctgctatccaaggagccagtgcttagaataggggctcggctgaagcagttggctgagaggcttctgtcttctcccttcctgtcactatttgccacactcttcccccatgcagcttctgcaggctcaggtgagcaggtccagcgcagaaacaggccttgccacagccgcaggctctggggctccacagatggccaagggattgaggaggtagagtgggttctggagtctttgttgctcttttggctggttgagcccagaccacagggagtgcatctgagtcctcccttcacacggcattttcctggatccacttccactccaccagttcctggaatccagccatggtcttgctcaaggggtccaggatgagttgggccagtgaagtcacaagcagggtgctgtctgtgcctctccatgccctggactgccaggcaggtggtgctcagtgcctgctttacatgttacagtcagcggcagccgtccagccgactcagccagttgtccatgctttgctccgagtccccacaggcctccaccaggcgcatgaagctctcctgcaggggacgccctctgaagttggtgtagtaagagaggggcacctcctctgcgctgctgctcatctcaggggagcctgattgcccattctctgctgatctctgccatgtctgagccggccactgtggcagcccctgtgctcagtgctctccagggaccagtgcaaccagccaggttaagcggccttggtctctgtgcctccgccagtcacgcgggcttgtttcgcggcctgggccgagagcgtgtccatgatgaagccccgcgcccaaggacgagcccccgccagcgcagttcgcagcagctcctggtccctgtcgcagcgccgcttctggggaccagttaggggctggctggagcgtagcagaacctgcggaccggactcagttctggaagtgacgcctcagccttaggggtcctctaagccaggtctgcacagcgacaggctggagtgcaacgaccagggcgaactcccgaggcttcggaccagtctggggatgttgtggccaaagtggtttgggacctgcttctcgaaggagttgacgctacgcaacagcagcagcctcaggtccggagaggacgcgggccctggcgacaggagcaggtggtggacggtgactcccaccgtcccgcgaagcgggggcgcctccgggccccgtaaaaactctgcttgggctcagcccgtatggttcagctccgaggactccattctaacagtccaaaacccccggcccggcggaaggccaaaatatcgaaagatggcggcggtggcgagagatggcgcaaggtttcgcaatttccgaac

SEQ ID NO: 62084 - DNA, 576 bp, Homo sapiens
  misc_feature (1)...(576): n = a,t,c or g
cccggcgggcgccggcgcgccccccccccatcccacgtctcgtcgcgcgcgcgtccgctgggggcgggcggctggcagctgtggcgccgacatggctgcgctggtggagccgctggggctggagcgggacgtgtcccgggcggttgagctcctcgagcggctccagcgcagcggggagctgccgccgcagaagctgcaggccctccagcgagttctgcagagccgcttctgctccgctatccgagaggtgtatgagcagctttatgacacgctggacatcaccggcagcgccgagatccgagcccatgccacagccaaggtgggccccgcaccccattgctcctggtgtctatttaactgcctagtcgaactcaatatctccttcatgccagtcatttctgtttcctccctcatgatttttgctaaatctatgtgccaccttactattagtaaataatcgcacatttttaacttaaatgtcatactaaggcatctttagcaactgcaaatggaaacagtatggcatggttggtagaaaataaccttaacatctgtacagtgcaaaccangatactc

SEQ ID NO: 62085 - DNA, 884 bp, Homo sapiens
ggggaggagcgtgcacccctcctggccttggtgcgcgccgcccgctaaggtactttggaagggacgcgcgggccagacgccgcaggacggccgcgatggcgctgttggccggcgggctctccagagggctgggctcccacccggccgccgcaggccgggacgcggtcgtcttcgtgtggcttctgcttagcacctggtgcacagctcctgccagggccatccaggtgaccgtgtccaacccctaccacgtggtgatcctcttccagcctgtgaccctgccctgtacctaccagatgacctcgacccccacgcaacccatcgtcatctggaagtacaagtctttctgccgggaccgcatcgccgatgccttctccccggccagcgtcgacaaccagctcaatgcccagctggcagccgggaacccaggctacaacccctacgtcgagtgccaggacagcgtgcgcaccgtcagggtcgtggccaccaagcagggcaacgctgtgaccctgggagattactaccagggccggaggattaccatcaccggaaatgctgacctgacctttgaccagacggcgtggggggacagtggtgtgtattactgctccgtggtctcagcccaggacctccaggggaacaatgaggcctacgcagagctcatcgtccttgactggctcttcgtggttgtggtatgcctggctgccttcctcatcttcctcctcctgggcatctgctggtgccagtgctgcccgcacacttgctgctgctacgtcaggtgcccctgctgcccagacaagtgctgctgccccgaggccctgtatgccgccggcaaagcagccacctcaggtgttcccagcatttatgcccccagttgctgatctcta

SEQ ID NO: 62086 - DNA, 783 bp, Homo sapiens
tttcgtagaagagccgcgcttgcagcgtctgggagaatctttcggtctccgcgagaggtgcttcattccacgaaaaaagtataattcaagctcagatttgtgttgaaaccagcctcaagtttcacctatcctcactgatccgtggacttctgtatgatcagggtgctgtcctgagagcgctgcgggataaaggaggagcgtcctgcttcccggctgccctgttgctgtcggagtcacaggatggcggctgtcgtcctgcccccaactgccgctctgtcttccctgttcccagcctctcagcgagaaggacacacagagggcggagagctggttaatgagctcctgaaaagctggctaaagggcttggtaaccttcgaggatgtggccgtggagttcacccaggaggagtgggcgttgctggaccctgcccaaaggacactgtacagggatgtgatgctggagaactgcaggaacctggcctcactagggtgtcgtgttaataaacccagtctgatatcccagttggaacaagacaagaaggtggtgacagaggaaagaggaattctaccaagcacctgtccagatttggagactctacttaaagccaaatggttaactcctaagaagaatgttttcagaaaagaacagtctaaaggtgtaaaaacggaaagaagtcatcgtggagtgaaactcaatgaatgtaatcagtgttttaaagtcttcagcacgaaatctaacctaactcagcacaagagaattcatactggagaaaaaccctatgac

SEQ ID NO: 62087 - DNA, 1135 bp, Homo sapiens
cggcgccttcgcgaaacactatgctaatggcatggtgccgcggtcctgtcttgctgtgcctgcggcaggggctcggaaccaattcattcctgcacggcctggggcaggagcccttcgagggagctcggtcactgtgttgcaggtcctcgcctagagacctgcgagatggagaaagagagcacgaggcggcacaaaggaaagccccaggagcagagtcttgcccatctctccctctgagcatctcggacattgggactggatgtctttcgtcactggaaaacctcagactgccgacgctgcgggaagagtcatcacctcgagagctcgaggactcgagcggagaccagggccggtgcggtcccacacaccagggatccgaggatccttcgatgctctcgcaggcccagtccgctaccgaggtcgaagagcgtcacgtctccccttcttgttcaacttccagagagagaccctttcaggctggggagctgattttagctgagactggggagggagaaacaaaatttaagaaattatttaggttgaacaacttcggactcttaaatagtaactggggggcagtcccgttcggcaagatcgtggggaagttccccggccagatactgaggagttccttcggtaagcagtacatgctgaggaggccagccttggaagactatgtagtattgatgaaaagagggactgccataacattcccaaaggatattaatatgattctctcaatgatggatatcaacccaggtgatactgttttggaagctggctcaggctctggtggaatgagcttatttttatccaaagcagttggatcacaaggacgagtcataagttttgaggtacgaaaagaccaccatgatctggctaagaagaattacaaacactggcgtgattcatggaaattaagtcatgtagaagagtggccagacaatgtggattttattcataaggacatttcaggagcaaccgaagacataaaatctttaacatttgacgcagtagctttggatatgttaaatcctcatgttactttgcctgttttttacccacatcttaagcatggtggtgtatgtcctgtatatgtagtaaacatcacacaggttattgaacttttagatgg

SEQ ID NO: 62088 - DNA, 1829 bp, Homo sapiens
ccctggctattaagtttctgcagctgcatactagccagcaagtgaggggcggggtgcaggttgaaggatgggggtctagtgggaggggtggttgtaggagagcctattggagatcccgagtatttagtgggagcccctctggccttggggaaaaaaaaatgatttttttctttaatagtaaaataatatacgtcttggaaaatccagcatacaaaatacagaaaatataattgagcacttttatgagcatatcgatcattgaatcgcgagtctgcatcgcctatctctccgcgtctcttgcgtgcgtgtaggtatataaatggtgtataggcttgtgggtgtgcatgcatagacagtccttcttgggtactcataagggggctcagaccctcaggtgcccctgagtcttaaccccaccccttcttcatccgtcctgttcctgaagacgaccatgaaggtgactcttcattgagagcctctggaggctgggagcttttagagtaaggctttgcaatgtaaccgtgaggtagctatgatcatccttatttccagatgtgggaactaggcttcccagaggctgatgatatgaccaaggccacacagctggcaaacagtgattccaatggtctggaggtccctaggcctctgttctctcaacctggggctttcagtttcctcaagtctgattatctgccctcttcaaggtgctgctcagagggtctggggctcaatgatgaaaactgggatgggtcccaagggcaggtggagtagttacatccaccagtccatagactctttggggcaagccctgacgatgaccatacagtggggcagccccttacacaggatcttctccgcctcctgaccctcccaccccagcccctgcagctcaaggactctgagcttgggcatagtgaggcaggaggagaggatttcagtgggggagggcatttctggggtgacgaggggaccctgcaggcacagactctccagggccggcattccctccagcacagccaggccaggggcagagaggcccctcacggtcagccggatcttgcgcacatctcggaggtggcggctgatggccagcagggtgctgtcggcagacagggtgcagcccagcacctcaagcctctgcagatagctgagctcctgcaggccagcatccagccctgtctcggtcacacggtaggtaccacccagcaccagcgagcgcaaggcccggaagcgcgtcaggccctgcaggtgctcgtcacggaaggcggggacgcggtccagcacgatgcattcaagcaggggcagcacggtggggtcctgctgcttgtggagccaggccatggagatctcgcagctgtgcagctccagggtcctcaaggtgctgggcaggctggtgatgggcaccatgctcaggtcggccacgtgcaggcagaggcgcttcaggttggggcacttctggcccagggctctcaacagagcaggggacaactggggggcctgggagccagagaacaggtagccacccatccgcagggaatggagccgggatgccatgtaccttcgaaggaggtgccacatgactttaggtcgcatcgtgtagagcgtcaggtcgacatgtcgccacagccaccggtcgtccaccagcctcttccagcggtgacagaccctggagatgcggatccggtcccgtaccgggaggtaagagaagatctcgagcaggaccgagtccggcagttcgaccaaagtcgccatgatcccgccgacacgcacttccgcttccggttaaagagacccgaggggtcctgggggcgccgaggcggctgacaggg

SEQ ID NO: 62089 - DNA, 541 bp, Homo sapiens
gagaatgttcttttggccactgtgaagcctcaggaaggggctcggattgctcaaggacccatgggagagaggaggctttgactgggctgcctgcctgtgaggtctctggactagaggtccaacgcagtccagctgacaaggatggaatacgccatgaagtcccttagccttctctaccccaagtccctctccaggcatgtgtcagtgcgtacctctgtggtgacccagcagctgctgtcggagcccagccccaaggcccccagggcccggccctgccgcgtaagcacggcggatcgaagcgtgaggaagggcatcatggcttacagtcttgaggacctcctcctcaaggtccgggacactctgatgctggcagacaagcccttcttcctggtgctggaggaagatggcacaactgtagagacagaagagtacttccaagccctggcaggggatacagtgttcatggtcctccagaaggggcagaaatggcagcccccatcagaacaggggacaaggcacccactgtccctctcccataagg

SEQ ID NO: 62090 - DNA, 496 bp, Homo sapiens
ccaattggatccgatggcctactagtccagcgtggtggaattccgccggcctcaggctccgtgcgcgcgcgctatcttgtgtacttccagtacgtgggcaccgactttaacggggtcgcggccgtcaggggcactcagcgcgccgtcggggtccagaactacctggaggaggccgccgagcggctgaattccgtggagccggtcaggttcaccatctccagccgcacggacgccggggtccacgccctgagcaacgcggcgcacctggacgtccagcgccgctcaggccggccgcccttcccgcccgaggtcctggccgaggccctcaacacacacctgcggcacccggccatcagggtcctgcgggccttccgagtgcccagcgacttccacgctcgtcacgcagccacgtcccggacctacctgtaccgcctggccactggttgtcaccggcgtgatgaactgccggtgtttgaacgcaacctatgctggacta

SEQ ID NO: 62091 - DNA, 371 bp, Homo sapiens
agagctctgaatgtctcaccatggcctggatccctctcctgctccccctcctcattctctgcacagtctctgtggcctcctatgagctggcacagccatcctcagtgtcagtgtctccgggacagacagccaagatcacctgctcaggcgatgtcctggcaaaaaagtatgctcggtggttccagcagaaaccgggccaggcccctgtgctggtgatttataaagacactgaacggccctcagggatccctgagcgattctccggctccacctcagggaccacagtcaccttgaccatcagcggggcccaggttgaggatgaggctgactatttctgttattctgcgactgacaactttctttgggtgttc

SEQ ID NO: 62092 - DNA, 485 bp, Homo sapiens
tacactatgcagtgtggtggaattcgatggacaaagtgtgtgctgtttttggaggctcccgaggcattggcagagctgtggcccagttaatggcccggaaaggctaccgactggcggtcattgccagaaacctggaaggggccaaagccgccgccggtgacctcggcgagggcttcccattatgttgcccgtgctggaccccaactcctgatttactggctctagagatcttctcgcctcagtctcccaaggacctgggactatagacgccaggagatcatttggcatttagctgtgatgttgctaaagaacatgatgttcaaaatacatttgaagagatggagaaacatttaggtcgagtaaatttcttggtaaatgcagctggtattaacagggatggtcttttagtaagaacaaaaactgaagatatggtatctcagcttcatactaacctcttgggttccatgctgacctgtaaagctgcc

SEQ ID NO: 62093 - DNA, 989 bp, Homo sapiens
cccactgatgtccctagtccgtgtggtggaattcgtggcagccagcagtgcccagaagaccccctcccgcctggaaaactactacatggtatgcaaggcagatgagaaatttaatcagctggtccattttcttcgcaatcataagcaggagaaacacctggtcttcttcaggtactcctctggtctctgtggtagaggcatcagggattcagccagaatgtgcagcacctgtgcctgtgtggaatactatgggaaggctctggaagtgctggtgaagggcgtgaagattatgtgcattcacggaaagatgaaatataaacgcaataagatcttcatggagttccgcaaattgcaaagtgggattttagtgtgcactgatgtgatggcccggggaattgatattcctgaagtcaactgggttttgcagtatgaccctcccagcaatgcaagtgccttcgtgcatcgctgcggtcgcacagctcgcattggccacgggggcagcgctctggtgttcctcctgcccatggaagagtcatacatcaatttccttgcaattaaccaaaaatgccccctgcaggagatgaagccccagagaaacacagcggaccttctgccaaaactcaagtccatggccctggctgacagagctgtgtttgaaaagggcatgaaagcttttgtgtcatatgtccaagcttatgcaaagcatgaatgcaacctgattttcagattaaaggatcttgattttgccagccttgctcgaggttttgccctgctgaggatgcccaagatgccagaattgagagggaagcagtttccagattttgtgcccgtggacgttaataccgacacgattccatttaaagataaaatcagagaaaagcagaggcagaaactcctggagcaacaaagaagagagaaaacagaaaatgaagggagaagaaaattcataaaaaataaagcttggtcaaagcagaaggccaaaaaaaaaa

SEQ ID NO: 62094 - DNA, 717 bp, Homo sapiens
agctctccgggccggcgtgggagcccgcgctccaaagcccggtggggggaggggcgctcacgcaaccgccactgtctggagcgggctcgcctctgcggcagccctcaccgcccgggctttactgaagcggagtctagcatgtgcggctgctccacagcggtgtgggtggcggcggctcctctgcagcagcctcggcagtaggggtcagggtggccaagcccaccgtggagctcatctgagagttgtaaggtacgggactgcctcggtctttgggacgccccgtctggtagcatcccagatccagcacgttccttccggccctgcaccccggcccggtgcctcacaccccgctaccccaagcatccagactctaaggcagcccctgcatctcagtcctgacatcgctgtccctggagcatcctccgctggagctggagcttgacagagccttacacaggttatctctagacctgacaacaacccaagcaaggcaaggactattctctcggtctgcagacgctggctcagatagctggagcaacttcccaaggtcccacagccagtaaggaaagacccagacctcccaagctcccttcctttattggctgcctgtggactaccaggctgtgaagcttcatggaggtatcgatatcctagtctccaatgctgctgtcaaccctttctttggaagcctaatggatgtcaccgaggaggtgt

SEQ ID NO: 62095 - DNA, 608 bp, Homo sapiens
tttcgttgaacgagcatgaagatttgaaattgctccgattggaaggaagcccaggttaggtttgggcacctccaaacgcacccgttttaaagccacctggactgaggcgtcgagctttcagctccaccaaacgctcacctggcctggcagcgagcggcggaagagcccgggagcccctcacagagcgcaccgagccgggcggagagctgagccgcaggcacccgcgtctccaggatgataggcgacattgcaacaaatctctacacccagcagctcagggggctccaagcagagcagcaagttcgaggatccgggcgtggagccgagtgaggccgcagcccagcgggcctcgggcgaaaaatcttggaaaatgtataccagtcatgaagatattgggtatgattttgaagatggccccaaagacaaaaagacactgaagccccacccaaacattgatggcggatgggcttggatgatggtgctctcctctttctttgtgcacatcctcatcatgggctcccagatggccctgggtgtcctcaacgtggaatggctggaagaattccaccagagccgcggcctgaccgcctgggtcagctccctcagcc

SEQ ID NO: 62096 - DNA, 623 bp, Homo sapiens
tttcgtgaatgagtgaagcactttaagtggccaagagcatgaaacccggccggaggaggcttaccccgttctcccctgtatcgactgcgtagagcccagtgtgggcaaagtcctagagcccggggaagttgcccgggcggggcagcctcggctgaagcatttcctgtcagccctatctggaaggggcagagcccaggacagggctccatgtccacaggacggcgaggagcgaagaccatggggactgagtacacagatgaagacacagaagcatagagaggataagtaatcactagcaagtggaagaaccgggattcagatccagaacaggctgactccagagtcactggctgtcatgtagtttcctcaactactgcctcagctctacaatcccagagtaaagctcttctccaaatgaagagccaggaagaggtagaggtggcaggaattaaactttgtaaagccatgtccctgggttcagtgactttcacagatgtggccatagacttttcccaagatgaatgggagtggctgaatcttgctcagagaagtttgtacaagaaggtgatgttagaaaactacaggaacctagtttcagtgggtctttgcatttctaaaccaga

SEQ ID NO: 62097 - DNA, 712 bp, Homo sapiens
  misc_feature (1)...(712): n = a,t,c or g
tgtctcttgcgtgcgtgggccggaggttagtgtgcggggcccgccgggcggttgaaaagtccgagagaatcaggatggaggccgtggcgacggcgacggcggcgaaggaacccgataagggctgcatagagcctggacctgggcactggggtgagctgagccggacaccagtcccatctaaaccccaggacaaagtggaagcagctgaggcaacaccagtggccctggacagtgacacctccggggctgaaaatgcagcagtgagtgctatgctgcacgctgtagccgccagccgcctgcctgtttgcagccagcagcagggtgaacccgacttgacagagcatgagaaagtggccatcctggcccagctgtaccacgagaagccactggtgttcctggagcgcttccgcacaggcctccgtgaggagcatctggcctgctttggccacgtgcgtggcgaccaccgtgcagacttctactgtgctgaggtggcccggcagggcactgcccggccccgcaccctgcgtacccgcctgcgtaaccggcgctatgctgccctgcgagagctgatccaagggggcgagtacttcagtgatgagcagatgcggttccgggcccccctgctatatgagcagtacatcgggcagtatctcacccaggaggagctcagtgcccgcaccccaacctcctgccnccgtcgacccgagaattc

SEQ ID NO: 62098 - DNA, 495 bp, Homo sapiens
  misc_feature (1)...(495): n = a,t,c or g
gggcgaattgaaagccgtcgccaactgaagctatcgcaataccggccgaccataatttcaggatggcgccttgggctccagcgtctccccaacccctccatgccatgggtccccacgcagctgaggctggagtttggagtttgacccgcttggaggctctctcagcagcgggcatataggaggaagggtcactgctgtctccggaagcccttggctgcaaagagagaggatcccgggtatctccctccttacaaccaccgccacctcctagtgccttagaagccactgacagcccccagggcaggtgagccctgcatctggaataaggatccagaggtctcgttcaggaccatggagagcggcaccagcagccctcagcctccacagttagatcccctggatgcgtttccccagaagggcttggagcctggggacatcgcggngctagttctgtacttcctctttgtcctggctggtggactatggtccacagtg

SEQ ID NO: 62099 - DNA, 913 bp, Homo sapiens
cggcatgagggagatgtggtccgcgtcgagcttctcacgcctacctcgggaagcgctggaaactcttccagggccctccaggtgggccagggcctccgaacagcccagaagtccgaccacggagccttcgtgccgtgccccgcccccggcgtgcactcggcggggaccgccttttctcctctaggctcgcttcgctgccccccagcggtggtgcggcccggccttgggacggactccgagaaccccgagccgggccgaaagtgcggggtcctgaccgcgccgcagacggggagccctcgctcggtcagaggaagaagagggttaaacctaccgagaacgttcgctgccgcttcctaaagtgacgggcttgtggaattttccgtttccggagctggaccccggtgtcccgagtgtcctccgctctggacgtgctcgtgagctcaggagctggcatctaggaaacggggagttcttcactcgcagcgcagtcggccgcgccagaagaggcgagggagaatccggacggggcggggcggcgggggagcgggacattcgcgtcccggggagcccccaggtcacccctggattgcgaggtggctccgcctgagcagcccttcctggtgtggtcggggcagctgcccgcccggaaaatggtcaggctctagccctggggaggaagaagcctttgccaagagcaaccgtctacaagccccaaaacctgcgagtgtcggaaatgtggactgaccacagcctgcctccccggcttcattcaccaccaaggcagcccctctggtgacaagccttaccgttgtccgggttatggcagaagcttccgatgtggctctgatctggttaagcaccactgggtacacaccggtgaaaagccgtactcctgccccgagtgtgaccatcg

SEQ ID NO: 62100 - DNA, 708 bp, Homo sapiens
  misc_feature (1)...(708): n = a,t,c or g
acgatggagggagacgtgctggacacactggaggcgctggggtataaaggaccattgttagaagagcaagcccttacaaaggcggcagagggtggattatcttcacctgaattttcagagctctgtatttggttaggctctcaaataaaatcattatgcaacttggaagaaagtatcacgtctgctggaagagatgatctagagagcttccagcttgagataagtggctttttaaaagaaatggcatgtccatattctgtactcatatcaggagatattaaagatcgtttaaaaaagaaggaggactgtttgaaacttctattatttttaagtacagaacttcaagcttcacagatattacagaacaagaaacataaaaattctcaattagataaaaatagtgaagtttatcaggaagttcaagctatgtttgatacacttggtatacccaagtcaacaacttctgacattccgcatatgctaaaccaagtggaatcaaaggtgaaagatattctctcaaaggtccagaaaaatcatgtgggaaaaccactgctgaaaatggatttaaattcagaacaggcggaacaactggaaagaatcaatgatgctctttcctgtgaatatgagtgccgccgacgaatgttaatgaaacgattagatgtgactgtacagtcctttggatggtctgatagagcanaggtaaaaaca

SEQ ID NO: 62101 - DNA, 703 bp, Homo sapiens
cggccgccggtgagtcggctggagcgcatctggtcctccgcgcggaaagcgctgcttttgcctggccgccctagccgctggctcatccaagtggccttcgccgctctcttgcgtcccaaccagagcgctggccacctcgccgcccagctcacgccgcgcccgcgctcccaggctccggccttaaagatggagatgacagaaatgactggtgtgtcgctgaaacgtggggcactggttgtcgaagataatgacagtggagtcccagttgaagagacaaaaaaacagaagctgtcggaatgcagtctaaccaaaggtcaagatgggctacagaatgactttctgtccatcagtgaagacgtgcctcggcctcctgacactgtcagtactgggaaaggtggaaagaattctgaggctcagttggaagatgaggaagaagaggaggaagatggactttcagaggagtgcgaggaggaggaatcagagagttttgcagacatgatgaagcatggactcactgaggctgacgtaggcatcaccaagtttgtgagttctcatcaagggttctcgggaatcttaaaagaaagatactccgacttcgttgttcatgaaataggaaaagatggacggatcagccatttgaatgacttgtccattccagtggatgaggaggacccttcagaagacatatttacagttttgacag

SEQ ID NO: 62102 - DNA, 1036 bp, Homo sapiens
agggaggggaaaaaggtgtctagctcctttctgcttaaaaaagcacagggagatcgcgggcagctttgcagtcgctgccttctcgcgcctgaccatgcacccctgcatcttcctgctgggccacaggcgagcgctttatttctggagctgagggctaaaacttttttgacttttcttctcctcaacatctgaatcatgccatgtgcccagaggagctggcttgcaaacctttccgtggtggctcagctccttaactttggggcgctttgctatgggagacagcctcagccaggcccggttcgcttcccggacaggaggcaagagcattttatcaagggcctgccagaataccacgtggtgggtccagtccgagtagatgccagtgggcattttttgtcatatggcttgcactatcccatcacgagcagcaggaggaagagagatttggatggctcagaggactgggtgtactacagaatttttcacgaggagaaggacctgttttttaacttgacggtcaatcaaggatttctttccaatagctacatcatggagaagagatatgggaacctctcccatgttaagatgatggcttcctctgcccccctctgccatctcagtggcacggttctacagcagggcaccagagttgggacggcagccctcagtgcctgccatggactgactggatttttccaactaccacatggagactttttcattgaacccgtgaagaagcatccactggttgagggagggtaccacccgcacatcgtttacaggaggcagaaagttccagaaaccaaggagccaacctgtggattaaagggtattgtgactcacatgtcctcctgggttgaagaatctgttttgttcttttggtagttttattaaaacatgacctattcttactcaagtctcttatctcctctgtattcttttttttttaatatcttcatgacattcaaatctcttctgtattctcttgccagaaagtgtacattctttttgcttgtataaaccctttcacttgtca

SEQ ID NO: 62103 - DNA, 501 bp, Homo sapiens
ctgtcggtctgttcagttaccacgtgaaccgccgacggagacccgtagtgggggaggcggcggcagcgttaagtgagaaaggaaaaaagacaacgaggaaaaaggaggtgtccgggtagggcaacgcggcgacacccgaggcctggtggtggcggcggatcgagatattcaaggctgaagcagctacggaacggcagcggcggcggtcggacaaactgactgaccgagccgggtggtggcgggagcagcgggagcagccggaacgatgccggccgtgagcctcccgcccaaggagaatgcgctcttcaagcggatcttgaggtgttatgaacataaacagtatagaaatggattgaaattctgtaaacaaatactttctaatcccaaatttgcagagcatggagaaaccttggctatgaaaggattaacattgaactgtttggggaaaaaggaagaagcttatgaattggctcgtagaggtttgagaaatgacttgaagag

SEQ ID NO: 62104 - DNA, 650 bp, Homo sapiens
gccgatttgcctgttctcacgccccaccctcagacctagccggagcaaagtttcacttatagaagggagaggagcgaacatggcagcgcgttggcggttttggtgtgtctctgtgaccatggtggtggcgctgctcatcgtttgcgacgttccctcagcctctgcccaaagaaagaaggagatggtgttatctgaaaaggttagtcagctgatggaatggactaacaaaagacctgtaataagaatgaatggagacaagttccgtcgccttgtgaaagccccaccgagaaattactccgttatcgtcatgttcactgctctccaactgcatagacagtgtgtcgtttgcaagtatgaactccaactacgctttaaaattaaataactcatataacgttaaccatttctcaatcccagaagggccaagttagtgcagtaggtacttaaataatgtgtataccttactcaggatgtctatggtagcaatactactgctcttttatagtcaattcttgattatccgtatcagtgggggaagcatggataaataattgtggtagccatcataaaagtaacttaaagatcaaacagtcatcttataaattagtatcaacttggcggggcatgggggctcatgcctgtaatccccg

SEQ ID NO: 62105 - DNA, 393 bp, Homo sapiens
tattgagatgggccgtcgtcctgctcgttgctatcgttactgtaagaacaagccttacatcaagtcccgcttctgccgtggagtgcccgatgccaagattcgcatcttcgatatcggtgataagaccgctagcgtcgatacttatcccttcgtggctcaccttctgtccgatgagcgtgagcagctgtcttcggaggctctggaggctggacgtattgctgccaacaagtacttggtgaagtacggaggcaaggactcgttccacatgagagtgcgtgctcaccccttccatgtgactcgtattaacaagatgctttcgtgcgccggtgctgatagactgcagactggtatgcgtcacgctttcggaaagcccaacggtctggtggctcgtgt

SEQ ID NO: 62106 - DNA, 899 bp, Homo sapiens
ccgtcaccactggcctgtcccaggaactcatcgcccgccacgcatgaggtcagcgtgcggctctgtggcacggtcctctccccatggcaaggattgggatcatctttcatgtctgcagacagcatgggcgaggctgactcgccattgctgtgagctttgtatgccgtcacgtgcacaaggacgtttgcgtcagctgcttctgtggtttgaattaagacctcagcttggcttggatgggggcatttctaaggcgagcgctgtcttgatcctgaatgttttctcattgaatcgcaggaagctcttcgtgggcggtcttgactggagcacgacccaagagactctgcgcagctacttttcccaatatggagaagtcgtagattgtgttatcatgaaagataaaaccaccaaccagtctcgaggctttgggtttgtcaaatttaaagacccaaactgtgtggggacggtgctggccagcagaccgcacacgctagatggccgaaacatcgaccccaagccatgcacaccccgggggatgcagccggagagaacacggccgaaggaaggatggcagaaaggacccaggagcgataacagtaaatcaaataagatatttgtcggtggaattcctcacaattgtggtgagacagagctcagggaatacttcaagaagttcggagtggtcacggaggtagtcatgatctatgacgccgagaagcagaggccccgaggttttggatttattactttcgaggacgaacaatcagtggaccaggctgtcaacatgcattttcacgacatcatgggcaaaaaagtggaagttaaacgagctgagcctcgggacagcaagagccaagcgccgggacagccaggtgccagccagtgggggatgccggttgtgt

SEQ ID NO: 62107 - DNA, 1134 bp, Homo sapiens
tttcgtggagtgcagtggggtgattttggctcactgtagcctctgcctcccaggttcaagcgatacttgtgccttagcctcctgagtagctgagattacaggcgtgcactaccatgcccggctaatttttgtatttttagtagagacaggttttcaccatattggccaggctggtctcgaactcctggcctcaagtgagctgcctgcctcggccttctaaagtgctgggattacaggagagggctgaacccccctcatcgtgtcaagtcaatctccatgacaactttcactgagcctgaagtagtattcctgcaatcccgtggaaatgaggtttgccggaagatttggttgggtctgtttgatgctcggacatctttagtaccagattccagggatcctcagaaagtgaaggagtttctccaggaaaaatatgagaagaagagatggtatgtccccccagaccaagtcaaggggcccacttataccaaaggcagtgcctccacccctgtgcagggctccatcccagaagggaagccccttcggacacttctgggtgatcctgcaccgtctctctcagttgctgcctccacctcgagccagcccgtcagtcagtctcacgctcggacatcccaggcccggagcactcagccacctccccactcctctgtcaaaaaagccagtactgacctgctggctgacatcggtggagacccctttgctgcaccccagatggcaccagcttttgctgcattccctgcctttgggggccagacaccttcccaaggaggctttgccaactttgatgcctttagcagtggccccagctcttctgtgtttggaagcctccctccagctggtcaagcctcgttccaggcccagccaactcctgcaggtaaactctgccccactggcttcctttctcttccaaccgtgtccatttgttcatgtctataaatcaccattcatatcctcactatcctaaagaactgctcaaagcagcaaagcacaaagagaagcagctccaggagaggatgagcgtgtctgacacattcttgtcagggagagggggctctactgttctgctttttcatgaaaggaaaatgactaaaattgcagcaggagctgtgtgggttt

SEQ ID NO: 62108 - DNA, 697 bp, Homo sapiens
tcgacgtttcgtggaggccgccgcgacgctcaccggggggcgctgtgaagccagctccgggcggacagagctggagaccatggccaaaatggaggtgaaaacctcacttctggacaatatgattggagttggggatatggttcttttagaacctctcaatgaggagaccttcatcaacaacctcaagaagcgctttgaccacagtgaaatatacacacacattggaagtgtggttatatctgttaacccataccggtctttacccatttattcaccagagaaagtggaagaatacaggaacagaaatttttatgaactgagccctcacatctttgccctttcggatgaagcatacagatccctacgagatcaagataaggaccaatgtattctcattactggggaaagtggagcaggaaaaacagaggccagtaagcttgtcatgtcctatgtggcagctgtttgtggaaaaggagcagaagttaatcaagttaaagaacagcttttacagtccaacccggtcctggaagcttttggaaatgccaaaactgtaaggaatgacaactcctctagatttggcaaatatatggatattgaatttgactttaaaggcgatccactaggaggagtaataagtaactatcttttagagaaatctcgggttggtaaacagcccagaggtgaaagaaacttccct

SEQ ID NO: 62109 - DNA, 426 bp, Homo sapiens
tttcgtccggcgatggcggctgcgccggccttgaagcactggcgcaccacgctggagcgggtggagaagttcgtgtcgccgctctactttaccgactgtaacctccgcggcaggctttttggggccagctgccctgtggctgtgctctccagcttcctgacgccggagagacttccctaccaggaggcagtccagcgggacttccgccccgcgcaggtcggcgacagcttcggacccacatggtggacctgctggttccgggtggagctgaccatcccagaggcatgggtgggccaggaagttcacctttgctgggaaagtgatggagaaggtctggtgtggcgtgatggagaacctgtccagggtttaaccaaagagggtgagaagaccagctatgtcctgactgacaggctgggggaaagagac

SEQ ID NO: 62110 - DNA, 1346 bp, Homo sapiens
aggcatcgcaagaccaccggaccggaattccgggtcgacgatttcgtccggccgggacaggaagaggctggggaccgcggcgaaggtggtgagtgctcttgggcgccttctcccaacgtccctgccagactcgcctccgggctgattctccagttggtttcctggactccagagtagctgtccggcctggccccggaggtgcaaagtaagaaaattgaagtcaaagaccatgggagatacagcaaaaccttatttcgtgaagcgcactaaagaccgggggactatggatgatgatgacttcagaaggggtcacccccaacaagattatttaataatagatgaccatgctaaaggccatggcagtaaaatggaaaagggccttcaaaaaaagaagataacaccagggaactatgggaatacccccagaaaaggaccatgtgctgtttccagcaatccatatgcatttaaaaacccaatctacagtcaacccgcttggatgaatgacagccacaaagatcagagtaagagatggctgtctgatgaacatactggtaattcagacaactggagagaattcaaacctggacctagaattcctgttataaaccgacaaagaaaagactcctttcaagaaaatgaagatggttataggtggcaagacacaagaggctgcagaactgtaagacgactgtttcataaagacctaacaagcctaaaaaccacgtcagaaatggaagcaggaagtcctgaaaacaagaagcagaggtccagacctaggaagccacggaagactagaaatgaggaaaatgagcaggatggagacttggaaggccctgtgatcgatgagtctgtactttcaacgaaggagctgctaggcttacagcaggctgaggagagactgaagagagactgcattgacaggctaaaaaggcgaccacgaaactaccctacagcaaagtacacctgcagactctgtgatgttttaattgaatccattgcatttgcccataagcatatcaaggaaaagaggcacaagaaaaacattaaggagaagcaagaggaagagttgctcactacgttacccccaccaacaccctcccagataaatgcagttggcattgccattgacaaagtggtacaggaatttggcttacacaatgagaacttggaacagaggctggaaattaaacgtatcatggaaaatgtgttccaacacaagttaccaggtatttttctagatttgtttttctatttaactacctaaaagtacctcattcatttctcctaccaatagtaattttcatcaaataaaaatttatttaccatgtcatgaaaaaaaaaaaaaa

SEQ ID NO: 62111 - DNA, 1431 bp, Homo sapiens
cgacgatttcgtgcgcccccgagcgggccgccggggcgctgcgagactggagaagttggcgaggaggcctggagaacccaggagtttccaagctgtgctgccacccgagctctggatccacctggctgtggtggcctgtggcaatcggctggaggagacgctggtcatgctcaaatcagctgtgctttttagccacaggaagatccaattccacatcttcactgaagactctctgaagcccgagtttgataagcagttacgccagcggcctgactcatatacaaagaagtttgagcacagaatctaccccatcacattttctgttggaaaccctcaggagtggaagaaattgttcaaaccctgtgctgcccagagactctttcttccggtgattttaaaggatgtggactcacttctctacgtggacaccgatgtcctctttctgagacctgttgatgacatctggaagcttctgaggctgtttaattccacccagcttgcagccatggcccctgagcacgaaatccccaagattggctggtacagccgctttgctaggcatcctttctatggctctgcaggagttaattcaggagtcatgttaatgaatttaactcggataagaagtacccagttcaagaacagcatgattccaacaggcctggcttgggaggacatgttgtaccctctgtaccagaagtacaagaatgccatcacgtggggagaccaggatttattaaatattattttttatttcaacccagagtgtctctatgtattcccctgccagtggaactaccgtcccgatcactgcatgtacggaagcaactgcagagaggctgagcatgaaggtgtgtcttctgcatggaaaccgaggcgtctaccatgacgataagcaaccaacgttcagagcactctatgaagcaatacgggattttccctttcaagacaatctctttcaatccatgtattacccccttcagctgaagtttttggagactgtgcacactttatgtggacgaatcccgcaagtttttctgaagcaaattgagaaaacaatgaaaagggcttatgagaaacacgtcatcatccatgttggccccaaccagatgcactgaatattttgtcttgttgcaagtcaattaggtgtcttgtgaccaaggaaatactaatctctaagctgcctgggtctttttgtgtgaatatttaatggtgctccatgactgttgagttttaaaaacctcgttaaattttgccaaatcagttgcccccaaaagggaatatgcttttccttatttttttttctaaaatgctatttatctctaaggaaaaaaaaaaaagactattactcatttaacattgtttaagcaggttgagctagctgtgaaaatagcttttgtgagccttctaattcctaaacgtctgagacca

SEQ ID NO: 62112 - DNA, 1097 bp, Homo sapiens
agcggccgctcgcgcgcagccccgcacctccgcccctgcctctgcctcctgggccatgccctgctgtttacatgccggtgaggtccccggccgctccgaacccctccgagccccggctccccgagggtgaagcccgccggcccgcgaactggactggtggatctctcagacctggggccccggactccgatctccgccgtctccgccaccatcagggcgggatccggctctggtgttttgaggagggggtgtggtgtagggaaaggaatcccgtccctctccaccttttttcgccttcggggcttcagactcagggaactcgctcatggctttcttgatgaagaagaagaaattcaaattccaaactactttcaccctggaggagctgactgcggttcccttcgtgaacggggtcctcttctgcaaggtccggctgctggatggaggggattttgtcagcttgtcgtcaagggaggaggtacaggagaactgtgtgcggtggcgaaagaggttcaccttcgtgtgtaagatgagtgctaacccggccaccggcctgctggacccctgtgtcttccgtgtgtctgtgcgcaaggagctgaaaggcgggaaggcttattccaagctgggcttcgctgacttgaacctggccgagtttgcgggctcgggctccacggtgcgctgctgcctgctcgagggatatgacacgaagaacactcgccaggacaactccatccttaaggtcaccattggtatgttcctgctctctggagatccctgcttcaagacgccaccatcgactgccaagtccatctccatcccaggccaggattcctccctgcagctgacgtgtaagggtggtgggaccagcagtgggggcagcagcaccaactccctgactgggtcccggccccccaaggctcggcccactattctcagctcagggctgccagaggaacccgaccagaacctgtccagccctgaggaggtgttccactctggccactcccgcaactccagctatgccagccagcagtccaagatctccggctacagcacagagcactcacgctcctccagcctctcagacactgacgcac

SEQ ID NO: 62113 - DNA, 451 bp, Homo sapiens
tttcgtgtgcctgccaaggcgcctgctcagcgactgatgcacagactgctgcagaggctgccggttttcccaacttctagagacggctttgctcattaccaggcatccttcccatgtaggcatcgagaagaaggctgagggaccctcgcaccagatttccatcccggagaccgatacgagtgcgtccattcctgttgccagctcctgcgccctccggactaacctcaaaaaccagctggtttgtaaatatttgaatcacattatgggattgctagacagactttcagtcttgcttggcctgaagaagaaggaggttcatgttttgtgccttgggctagataatagtggcaaaacgacgatcattaacaaacttaaaccttcaaatgctcaatctcaaaatatccttccaacaataggattcagcatagagaaattcaaatcatccagtttg

SEQ ID NO: 62114 - DNA, 424 bp, Homo sapiens
tttcgtggcagcagtagcgggagcagcagcgtggacgcggctggcgctggcgccatgaacccgctgtaaggcgcaggctgtgcagcacggggtgcgggggaggaggaggaggacgccgcggtgaagttctccgccatgaacctgaggggcctcttccaggacttcaacccgagtaaattcctcatctatgcctgtctgctgctgttctctgtgctgctggcccttcgtttggatggcatcatacagtggagttactgggctgtctttgctccaatatggctgtggaagttaatggtcattgttggagcctcagttggaactggagtctgggcacgaaatcctcaatatcgagcagaaggagaaacgtgtgtggagtttaaagccatgttgattgcagtgggcatccacttgctcttgttgatgt

SEQ ID NO: 62115 - DNA, 494 bp, Homo sapiens
acgtccgcatttgtgcgccggtgcagcaggcagtgttaacatcctggcatttccgcagctgagcggcgacccgggcggcggcggcggtcgaggagctcccatggcagggacgaggcggagggaaggcgaaaggggggcgaggagttaagccagagcctccgcggggcgggtttccgagggaggcacagagggaaacggctctcgcagcccgaggagggtcaggcgcggagcttgtcgcccctcccgcgcattctgtccagcccgggctccggagatgcatctgcatcaggtcctcaccggggctgtcaaccctggagacaactgctactccgtgggcagcgtcggggatgtccctttcacggcatacggatcaggctgtgatattgttattttggcaaatgactttgaatgtgtacagatcattcctggtgctaagcatggaaacatccaagtcagctgtgtggagtgttctaaccaacaaggaagaattgcag

SEQ ID NO: 62116 - DNA, 1537 bp, Homo sapiens
ttttttttttttgagggccatgttcctgtttatttaccaacttgatgatacctgggggagcctttgggactgtttgcccaagagccccctttacaagagtactgcctgctcgtcaccaccatgtgccctgccctatgccttggggcctggctctgctgttcctggtcaagcccagcccccaccctagggctccatcagcctcagctcctgggtggggtgggggttcttctggcacgagtttggggttaggaaccctccatgttcaacaggggccctcaccgctttgaggggtctcgggcctcacattgacttcctggggaggctgcatcccagcagcagtgctttgcagcccgagggtccagcagccccaggtgggcacctgagggacaggctccctctatcaagacgacagcgctgtgggccaaagctgttgacccacaatgttgccagaggaggtgggcatgtggggttttgccttttcttttggaaggtttcttttcctttttttttttaagagaaaggaaattacaaactctcttgacgctgcagccagccgtggcactgccctgccgccctggctggtgtccagtacttagaacccagggcaggtgctgccggccgcctggggggtgctgggtgggggcgcgtcccaaggcctgggagctcctgtcattgtcactggtcggtcgctgaggctggaggccacaggagcaggatcagctgtttcctcacttacgcaggcaagtacacctgcttggacaagagactggatggcttttcattgacatggtagagaggaaatggatcaaatccaccaatgaaatcaaagctgtcctcttcctccgtaaacacgctgaccacctggcagccacagacaaagcccagaagcgcgatcaggatctgcaggcaactgtgtagggcctccacatagctgggctccagggcacagccagcacctgacaccaggtcctggccatggggggccccgaggcccactgctggcacctcctcatgcagacagcctggccagcgctcacgccaccaggagcgatgccgggagaggctgaaggtcagtagctcgctgtcctgtaagaggccaccgacttccaggtagaagcagatgatgaagacgttccaggtgacccagacggctgcccacagcgtgtacaccatgacgtagcgcagccggtactggatggtgccgaagagtcccaggatgacgatgatgatgtggacaaagttggccaggatgggcgcccactggtagcccaggaagtcaaacacctgcctctccagggcggcgactgaaagataccaactgttccaaggcctgggatggtccttgggcccccagcctgttgcaggacctcaggttatctccgcggccccagcgagcctcccaggaaagcgccggaagctccttccttcctgcaggaaggacacgatgcctccgccgtccctaggtccgcccgcaagcctgtgcccctaagccgagcacaggacacccaagctgcacagccacggactccgagggttt

SEQ ID NO: 62117 - DNA, 524 bp, Homo sapiens
tttcgtcgcacagccgcggccggggcgcgcggcgcggttcggaaaatcctgtttacacagactgcacaccgcctggggaataatgcagtaaaggaagtgagccggctcggcctgactgctccaacttcctgctctcacacacaccagaggggaaaaaaaaagaggagcgagagaaagaaaaaaagggggaaaaatcaggatctcattacaagagccacagaccgtctgcagacgcctgtcagcatggaaagtcgggggctttcgcccgggtcctcctagaaattccccccgaagaagactcccccacatctgggtatggagagtgcaatcacgctgtggcagttcctgttgcagttgctgctggatcaaaaacatgagcatttgatctgctggacctcgaacgatggtgaattcaagctcctcaaagcaaaaaaagtggccaagttgtggggactccgaaaaaacaaaacaaatatgaactatgataagctgagcagagccctgcgattactatttatgacaag

SEQ ID NO: 62118 - DNA, 472 bp, Homo sapiens
cttcccgggtcgacgatttcgtggcggcggcgacagagcgagcgcggcgcggggccaccatgggggcccagctcagcacgttgggccatatggtgctcttcccagtctggttcctgtacagtctgctcatgaagctgttccagcgctccacgccagccatcaccctcgagagcccggacatcaagtacccgctgcggctcatcgaccgggaggtgagtgccggccgccgccgctgcctcgtcagcatcacagcattgcccagcacctactctgtgctcagggcatggtcctgctctgaagtagatactgttgtccacccattttacagatggagaaagcaaggtgatgtctcttgctaaggccaccaggaagtagcagaggaatttaaaccctggtctctctgtccacagagccccttctctgaaccacactcactgcctcatgcaaggtcagaatggaaggaacccctcac

SEQ ID NO: 62119 - DNA, 468 bp, Homo sapiens
tttcgtagtcagaggcgcggcaaggaccagagctccgcgcggcgaaatggtgagatgctgcccaccgcgccctaaccccacggttccccgccacgacctccggaaggtcagagttcacatccagcggcctcgcagtagaggtggcggcaaggggactggtggtcagcccccgaggctggaggagcctggcctggggggcctgagcaccctgagtcggagagcccgcttcaggttgcacttcccccagctggccctgaggcggaggctggggcagctgagctgcatgtccagacccgctctgaaactgcgctcctggcccttgaccgtcctctactacctcctgcccttcggcgccctcagaccgctcagccgggtgggatggaggcccgtaagcagggtggctttgtacaagtcagtgccaacgcgcttgctgtcacgggcctggggtcgcctcaatcaggtggagct

SEQ ID NO: 62120 - DNA, 412 bp, Homo sapiens
tttcgtgccccttagcgggtgggggaagctggtaggcacgggcggctccgcagtgaccggactcgggggagcagataatcaccagaatgggagtgaatgacttgtggcaaattttggagcctgttaagcaacacatccccttgcgtaatcttggtgggaaaaccattgcagttgatctgagtctctgggtgtgtgaggcacagacagtcaaaaaaatgatgggcagcgtcatgaagccccacctcaggaacttattttttcgtatctcatatttaacacaaatggatgtaaaactggtatttgttatggaaggggaaccaccaaagctgaaagctgatgtcataagcaagaggaatcagactcggtatgggtcttctggaaaatcgtggtctcagaaaacagggagatcact

SEQ ID NO: 62121 - DNA, 493 bp, Homo sapiens
cggtccgaacctcccgggtcgacgatttcgtctttgcgagagtagcgcgggagctgagaagttgcagggttgagttggtcccggcaagtccttgagcagtttgttcctctgtcttcccgcttcctggtgccccgactgcgtccccacgaacgccccgtccttaccgccggctgctgtggagtgcctcgctgtctcccaggtccccgagttcctggtttcagagaagatgaccgaagaagtggatttcctgggacaggactctgatgggggtagtgaggaagtggtcctaactcctgcagagctcattgaaagattggagcaggcctggatgaatgaaaagtttgcccctgagctgctggagagcaagcctgagattgtagaatgtgtcatggaacagctggagcacatggaagaaaatctcaggagagccaaaagggaggacctgaaggtcagcatccaccaaatggagatggagaggatccgctacgtcctc

SEQ ID NO: 62122 - DNA, 771 bp, Homo sapiens
tttcgtctgaggagctgacccgcgcctaccagggctgggcggaggcggggccgggcttcaggacagaggccaatcgctgccctccgggcccccagcgccggctttgggcagaggcagccagggcgccggaagaggcctggaaatccacgcggcttcccaaagacggcgcctctgttctgcgggttcgtgacgaggatttatttccacccactgcgcctgggcgcaggtctgcgggtccgcgcccactgcgtgcggcgccacggaccatgtcggtgactgatcaggcttttgtcacactggccacagatgacatctactgccagggcgccctggtcctggggcagtcactgaggagacacaggctgacgaggaagctggtggtgttgatcactcctcaggtgtccagcctgctcagtctctccaaaaggtgcaagatatcatccagccacttggactgagagctcatcccaatccagttcctgatcagatggggccctgccactcgttccagccaggtgacctggtgttcgttaaaaagttccagaaagaaggactcctgcttagaaaagacctcatactgtcatccttaccaccccaatggctctaaaagtagaaaggaatgcttacattcatgacaccccctagtacaaagcatgtttaactgtaatctatgactaactaccctaattactggattggcagaaccctttttctccttctcttgtttagtcttccaaccattatatattaaaattagtttcttaaatttgt

SEQ ID NO: 62123 - DNA, 580 bp, Homo sapiens
tttcgtgaactagctcagctccgagctcgcggaaccacgcccccgggagactctggcccggccagcgcgggccaggtcttcagtcctatatcgccctgccttgggaaaaggtgcaggggcctctcgccgcctcgtcgggcccttcctctctacctgcctctccaacccctctcggccccgagccacccggcagcgggggtgggtgtgcagaggtgcggcgtccagaacccggctcctgcagaggctctgggtggcagcagccctgttaccgcttagatggcgcgcaggacagagccccccgacgggggctggggatgggtggtggtgctctcagcgttcttccagtcggcgcttgtgtttggggtgctccgctcctttggggtcttcttcgtggagtttgtggcggcgtttgaggagcaggcagcgcgcgtctcctggatcgcctccataggaatcgcggtgcagcagtttgggagcccggtaggcagtgccctgagcacgaagttcgggcccaggcccgtggtgatgactggaggcatcttggctgcgctggggatgctgctcgcctctaaaaaaaaaa

SEQ ID NO: 62124 - DNA, 662 bp, Homo sapiens
tttcgtctcgtggcggtcattttggcctctgtcctgtttgtccagcccgccagtttctgcagtggaggtcgcgactgagggacgggacagagaagtcgcgaaagtgggccagaggttctgcgacaccacctcgggtgagctgcgccaggcccgggatagggactgttgtgttcgaatgcccgccccggtcggccgccgctccccgcctagtccacggagctcaatggcggcagtcgcgctgagggactcggctcagggtatgacctttgaggatgtggccatttatttctcccaagaagagtgggagctccttgatgagtctcagaggttcctgtactgcgatgtgatgctggagaactttgcacatgtaacatccctggatcaagccaccaatatctgagagagaaatgctggcttcaggagagctcaagtcagaggatcccagcagggattttatacccttctggggtaacacagttgagccagagtgcctacctaatcacgtatgccaaccagaaaccatcagcagtcaaacttgccctccatattgtcatgggatcttccagatgttaaacaataataataaagctcactgcatttaaatgtcaaaaaaaaaaaaaggggggggccctttaaaaagaaccaattttaaggcccggggg

SEQ ID NO: 62125 - DNA, 918 bp, Homo sapiens
tcccgggtcgacgatttcgtcgggcgcggacgcggaacccggcgcggcggcggcacgatggtcatggcgtatttcgtcgagaatttttggggggaaaaaaatagtggctttgatgtcctctaccataatatgaaacatggacagatatcaacaaaagaactagcagattttgtaagggaacgagctaccatagaggaggcatactccaggtcaatgacaaaactagcaaaatctgcaagcaattattcacaacttggaacatttgcaccagtatgggatgtattcaaaacatctacagagaaattagcaaattgtcacttggatcttgttagaaaattacaagaattaataaaggaagttcagaagtatggagaagaacaagtaaagtctcataaaaagactaaagaagaagttgcaggaactctggaagctgtccaaaccattcagagcataactcaggccctccagaaatccaaggaaaattacaatgccaagtgtgtagaacaggagcgtttgaaaaaggaaggagctacacaaagagaaatagaaaaggcagctgttaaatctaagaaagctacagatacctataaactctatgtggaaaaatatgcattagcaaaagctgatttcgaacagaaaatgacagaaacagctcagaaatttcaagatattgaagaaactcatctcattcacataaaggaaattataggatccttgtcaaatgctataaaggaaattcatttgcagataggccaggtccatgaagaatttataaataacatggctaatactacagttgaaagtttgatacaaaaatttgctgagtcaaaaggcactgggaaggaaagacctggcctcattgaatttgaagaatgtgacactgctagtgcagttgaaggtataaaaccaaaaaaaaaa

SEQ ID NO: 62126 - DNA, 856 bp, Homo sapiens
tttcgtgcccgccaccccggaccccggtgtctggcttcccccgagccgggaccccgcgatggccaagcgcagctcgctgtacatccgcatcgtggaggggaagaaccttcccgccaaggacatcactggcagcagcgacccctactgcatcgtgaaggtggacaatgagcccatcatcaggacagccacagtgtggaagaccctgtgccccttctggggtgaggagtaccaagtgcacctgccgcccaccttccacgctgtggctttctacgtcatggatgaggatgccctcagccgggacgacgttatcggaaaggtctgccttacaagggacaccatagcctctcaccctaagggtaagttctcccttccctcccacactggtctgcccagtccctggcctccctcccactcggagacctcccctctaggctccgtctggtctcctgctcagggaaagccatttctactctccccagaagccggggccacgttctgtactcctggcctctgttctgcagcatgttcccaagcctggttgttactgcctcttccctagggtgaagaggggctgctatgggtggaatctgaggcctctgctggcagaagaaggggcctccttacactctattgctgaagcatagggaccccttctccaaatcaggccagctccttctgtaacccatggggtcgcctccatctgggccctagtactactgtgtcctaagtctgaagggttggcctagagccagtccaggctggagatccctttcaattatttctgggatgcagacattggtttgtgttattggttttacaatttttatatagtttttttaaaaaaaaaggccgggcc

SEQ ID NO: 62127 - DNA, 786 bp, Homo sapiens
  misc_feature (1)...(786): n = a,t,c or g
gaagtcaaagttaaggcagttaaggaccagtttcaagacctgcattaccagattttgctgacattgatcctgaagatttaaaggtttggcaaacacctcttttaaaagagagcatgctagcactaaaacgtctttgagagaagtatcacgaaatgaggtagctattttcctgtgttttgctgaaggtctagaataatcaaccaggttcatttcctgagtcaattcagaaaggattattactcctattatgcagtgttccacagtaccctggagaaacttcttcacatcagcaataatttctctgaagacaaattggtctttctgaacctcaaaccaccccaacttagtgattttagcaatgacttgaataagagcttggatgacaaagggagccagcttgggctgtgatgccacgtaattcagaatgtagtttctgatgtccatcctctgctcaacaggtaaaggactgactcggctgacaagttttgaaagacatgttgctgcaaggagctgagcataggatgttgttccttgttctaataaaagttgacacttgctgagacattctggactgtcaataagttccaagagtgctttctcagcctctattctttgtgtaagatcagtccctatgtagagatgagtacataacacttccaattcagccaaactctggaagtgcagcgccatcttcccaggaggcggcgccggccagccggccggtcggcacacgaaatcgnnnnccggnaattccggnccggtncgtgcaagcgtacgctatgcgag

SEQ ID NO: 62128 - DNA, 531 bp, Homo sapiens
ctcgacgatttcgtggaatttcgagtggtgttggagcgccggaggctagtgggtggctgacccccagcatcctcgagagcgaccatggactccctggccgagtctcggtggcctccgggcctggcagtcatgaagacaatagatgatttgctgcggtgtggaatttgcttcgagtatttcaacattgcaatgataatacctcagtgttcacataactactgctctctctgtataagaaaatttctgtcctataaaactcagtgtccaacttgctgtgtgactgtcacagagccggatctgaaaaataaccgcatattagatgaactggtaaaaagcttgaattttgcacggaatcatctgctgcagtttgctttagagtcaccagccaaatctcctgcttcttcctcttcaaagaatcttgctgtcaaagtatatactcctgtagcctccagacagtctttaaagcaagggagcaggttaatggataatttcttgatcagagaaatgagtggttctacatcagagttgttg

SEQ ID NO: 62129 - DNA, 349 bp, Homo sapiens
accatgagtcaataccctgtagtcacgctgttgcgacgagcgggagccgggccagatcgcgaggtcactcgtggagttccgggtacctcctgcaaggccgtccaccgagcctcgagtcccgcccatggggctacattctgagcccgtcgcgcacagacgcgccacatagtgccaccaaccccccacacccctctctgaactggtagcagtttcccaggatctccaggctgtttcttccatccttccatgcctccacatatgctttcctcttacttccctgttgtgcctggctcctctgccatcacctgaagacccccacgccgagccctatgcagtctcaaaaaaaaaa

SEQ ID NO: 62130 - DNA, 943 bp, Homo sapiens
tttcgtctgcgtaaaggagcatgagagcgtgggagttttgcagtggccgtggcgttcttcgtcgcgtctcggtcgggcgtcgctttctgcagctcctgtcagggagcgcgaggcctgttattaaccgcggagcgctttgtcacgaagtccctgtggcgtcttgaagaaggcattccccacccgccaaatggcgtccatgcccccgacgcccgaggcccagggaccaatactctttgaggatctggctgtgtatttttctcaagaggagtgcgtgactctgcaccctgcccagaggtccctcagcaaagatggtacaaaagagtctttggaggatgcggctttgatggacatccttcaaagttgagccctttttttccgctgtgagtctctacacatgtctgacactctcatgtcccacggattacagaaagacattccttgcaggagaacatggcttcccagtgatgtgggaaagatggactctgatctccagggtagaagtggcaaccagagtaagccagttcgttgaagcaaatgatggctgcagtgaagagtaccgaggcacacccatcctcaaacaaggatcccacacagggccagaaatcagccctccagggtaacagccctgactccgaggcctcccgtcagcgcttcaggcagttttgctaccaggaggtaactggcccacatgaagcttttagcaaactctgggaactctgttgtcagtggctgaggccgaagacccactcaaaagaggaaatcctggagctgctggttttggagcagtttctgactatcttgccagaggacatccagacctgggtgagggagcagcatccagaaaacggcgaggaagctgtggctctggttgaggatgtacagagagctccagaaaaggccctcacgaacacgaatcgccagccacgccaccttttctactgcg

SEQ ID NO: 62131 - DNA, 806 bp, Homo sapiens
  misc_feature (1)...(806): n = a,t,c or g
acgtcgagattcgtcgtggactcctccccacactgcagcgctcgccgcgcgcgcccatcgatcaggccccctccctctgccgcctcggcgcagactgctaagctcagcaagccttgcggcaaaggcacttcggagccgagttggggcagcggaggagcggggacttctcgcccccaggggaacgggcgcccctgcgaaaccgtcgccagccacgcgtccttgccgtccgacgccccctcacattggagaccccggatctctcccgcctccttcgggtcgctctccgctgtttcctctgccaccatgaggaacattttcaagaggaaccaggagcctattgtggctcctgccaccaccaccgccacgatgcccattggacccgtggacaactccactgagagtgggggtgctggggagagccaggaggacatgtttgccaaactgaaggagaagttattcaatgagataaacaagattcccttaccaccctgggcactgatcgccattgctgtggttgctgggctcctgcttctcacctgctgcttctgcatctgcaagaaatgctgctgcnnnnnnnnnnnnnnnnnnnnnnnnnnnggcaaaggcatgaagaatgccatgaacatgaaggacatgaaagggggtcagctcccacaggatgacgacgacgcaaagacaggcctgactgagggggaaggtgaaggggaggaggagaaagagccagagaacctgggcaaactgcagttttccctggactatgattttcaggctaatcagcttactgtgggcgttctgcaggctgctga

SEQ ID NO: 62132 - DNA, 594 bp, Homo sapiens
tttcgtgggcttctgaggcgtctaccttcccagtcctaggactgatctccaggaccagcactcttctcccagcccttagggtcctgctcggccaaggccttccctgccatgcgacctgtcagtgtctggcagtggagcccctgggggctgctgctgtgcctgctgtgcagttcgtgcttggggtctccgtccccttccacgggccctgagaagaaggccgggagccaggggcttcggttccggctggctggcttccccaggaagccctacgagggccgcgtggagatacagcgagctggtgaatggggcaccatctgcgatgatgacttcacgctgcaggctgcccacatcctctgccgggagctgggcttcacagaggccacaggctggacccacagtgccaaatatggccctggaacaggccgcatctggctggacaacttgagctgcagtgggaccgagcagagtgtgactgaatgtgcctcccggggctgggggaacagtgactgtacgcacgatgaggatgctggggtcatctgcaaagaccagcgcctccctggcttctcggactccaatgtcattgaggtagagcat

SEQ ID NO: 62133 - DNA, 521 bp, Homo sapiens
  misc_feature (1)...(521): n = a,t,c or g
tttcgtgcgccctccaacctgctgctgccgccgccgcgccccccaggctctgtcagctacccgcgctctgagcccggggccagattcccatggaagcgccgcgatgttcgccccccggctgctggatttgcagaagacgaaatacgcgaggttcatgaaccaccgagtccctgcccacaagaggtaccagcccacagagtatgaacatgcggccaactgtgccacccatgctttctggatcatccccagcatcctgggcagctccaacctctacttcctgtcggacgatgactgggagaccatctctgcctggatctacggcctcggcctctgcggcctcttcgtggtgtccactgtgtttcacaccatctcctggaagaagagccacctcagatggggattctgagggccaaggggtcttggctggacagaggagcccagccctgctaacctgtaggcaggcacgatcagtccagggcacggctctgngggcactggcccttccatgctgtgaggggctg

SEQ ID NO: 62134 - DNA, 552 bp, Homo sapiens
ccggtcgacgatttcgtggagcatctcaggaaaggggtccccggactctggggctctcagcacctgcggtcgcaaaccaacctcatgccctgactttaccaggcgtcgggactctgacttaaccggggaatgagggacttggtctggcggcagatcacaatgaggacctagggcatctgtctgctgacgccccctggcctgcagtgaccatggccccccgcaagaggagccaccatggcctgggcttcctgtgctgcttcgggggcagtgacatccccgaaatcaacctccgggacaaccaccctctgcagttcatggagttctccagccccatcccgaacgcagaggagctcaacatccgctttgcagagctggtggatgaattggatctcactgacaaaaaccgagaggctatgttcgctctgccccctgagaagaaatggcagatctactgcagcaagaagaaggagcaggaggaccccaacaagctggcaaccagctggcctgactattgcatcgaccgcatcaattccatggctgcgatgcagagtg

SEQ ID NO: 62135 - DNA, 534 bp, Homo sapiens
tttcgtggcgaacgaggccccacctctgccgggagcgggacgagcgcgcaggcgcagtctccccaggttgtagacgctgcggcccggcccggcgggtaaataacagatgcgggtgaaagatccaactaaagctttacctgagaaagccaaaagaagtaaaaggcctactgtacctcatgatgaagactcttcagatgatattgctgtaggtttaacttgccaacatgtaagtcatgctatcagcgtgaatcatgtaaagagagcaatagctgagaatctgtggtcagtttgctcagaatgtttaaaagaaagaagattctatgatgggcagctagtacttacttctgatatttggttgtgcctcaagtgtggcttccagggatgtggtaaaaactcagaaagccaacattcattgaagcactttaagagttccagaacagagccccattgtattataattaatctgagcacatggattatatggtggtatgaatgggatgaaaaaattttcacccctttgaataaaaaaggttg

SEQ ID NO: 62136 - DNA, 1290 bp, Homo sapiens
ttgcgtcggggcccctggccctaaactctgggactggcgggcggtcaggcggcacagggggaatcccgggggcctaaggaggttgtcccagtttttgtcagcatctccaccccgaggtggtttgaactttgagccttttgtagtcctgatgaataatttcattttcctcaagtttatgacactcggaacgtcaagaactggaggtttgtgcaatttgagaccggtcggcactgtgcagagatcagagtactaagagacagagattaaaatggcttccagaggaaagacagagacaagcaaattaaagcagaatttagaagaacagttggatagactcatgcaacaattacaagatctggaggaatgcagagaggaacttgatacagatgaatatgaagaaaccaaaaaggaaactctggagcaactaagtgaatttaatgattcactaaagaaaattatgtctggaaatatgactttggtagatgaactaagtggaatgcagctggctattcaggcagctatcagccaggcctttaaaaccccagaggtcatcagattgtttgcaaagaaacaaccaggtcagcttcggacaaggttagcagagatggatagagatctgatggtaggaaagctggaaagagacctgtacactcaacagaaagtggagatactaacagctcttaggaaacttggagagaagctgactgcagatgatgaggccttcttgtcagcaaatgcaggtgctatactcagccagtttgagaaagtctctacagaccttggacggcccccaagttacatgaactacctgctagactcacaccccagcaaaaatattgatgtccccagcaagattagcttcctgttaaagatccaggacctgtgaatacatgcgtaactgcaagaatggaagcaaaggatgaacccaagttaaagcccagcacaagaatatgatgtaagcgcttttgggaaatgcagagattttcttttctcttcaaataataaattacatctaaaaattaatgagagtataggccgggtgtggtggcttaatgcctgtaatcccagcactttcggagtctggggcaggtggatcacctgaggtcaggagtttgagaccagcctggccaacatggtgaaaccccgtctctactaaaaatacaaaaattagctggacatagtggcacatgcctgtattcccagctacttggggagctgaggcaggagaatcgcttcaacctgggatgcagaggttgcagtgagccgagatcacaccattgcactccagtt

SEQ ID NO: 62137 - DNA, 763 bp, Homo sapiens
  misc_feature (1)...(763): n = a,t,c or g
tcccgggtcgacgatttcgtgagaaggctgactggctggactcattgagctgaagaatttccagtgacatttgtaaatgacgccgctcgattccaggctccaagcggcccctgccgccgccgccgccgccgggccgaaggtgccgccgagcagtctccagcgcaggcttccttaccgggcgaccacaatgtccgagtttctcctcgccttactcactctctcgggattattgccgattgccagggtgctgaccgtgggagccgaccgagatcagcagttgtgtgatcctggtgaatttctttgccacgatcacgtgacttgtgtctcccagagctggctgtgtgatggggaccctgactgccctgatgattcagacgagtctttagatacctgtcccgaggaggtagaaatcaagtgccccttgaatcacattgcttgccttggtaccaacaaatgtgttcatttatcccagctgtgcaatggtgtcttggactgcccagatgggtatgacgaaggagtacattgtcagggtgagtccatttgtggaacaatgcaactgaaatattaaattttacatagtaatgaaagttcaaagaaaacctataacctgccttttctttcaactacaagcatatcagttattaagaaagcatgaattttactgccagacattttaatatgcatttcaaagctgcaagtattatgtttgagcaaaaaaacaccattagacnnnnnnnnnnnnnnnnnnnnnnnnnnnngtatt

SEQ ID NO: 62138 - DNA, 899 bp, Homo sapiens
tttcgtcggagccgccgccactcgtctctgcccagctgctgccctccccaggaggcctccatggcttcacctacctccaccaacccagcgcatgcccactttgagagcttcctgcaggcccagctgtgccaggacgtgctgagcagcttccaggagctgtgtggggccctggggctggaacccggtggggggctgccccagtaccacaagatcaaggaccagctcaactactggagcgccaagtcactgtggaccaagctggacaagcgagcaggccagcctgtctaccagcagggccgggcctgcaccagcaccaagtgcctggtggtgggtgctggaccttgcgggctgcgggtcgctgtggagctggcgctgctgggggcccgagtggtgctggtggaaaagcgcaccaagttctctcgccacaacgtgctccacctctggcccttcaccatccacgacctgcgggcactcggtgctaagaagttctacgggcgcttctgcaccggcaccctggaccacatcagcatcaggcagctccagctgcttctgctgaaggtagcattgctgctgggggtggaaattcactggggtgtcactttcactggcctccagccccctcctaggaaggggagtggctggcgtgcccagctccaacccaacccccctgcccagctggccaactatgaatttgacgtccttatctcggctgcaggaggtaaattcgtccctgaaggcttcaaagttcgagaaatgcgaggcaaactggccattggcatcacagccaactttgtgaatggacgcaccgtggaggagacacaggtgccggagatcagtggtgtagccaggatctacaaccagagcttcttccagagccttctcaaagccacaggtcaggg

SEQ ID NO: 62139 - DNA, 875 bp, Homo sapiens
ccgcccttgaaccgatagatagccgtaccgcgccgcaattcccgggtcgacgatttcgtggcagagacccatacctttggcgctgagtcgattccaggaatgtgcggtcgatgagagggcggccttagcattaggagtgcgtcggctgcaccctggcggatggaccttgggaaggaggggaggggaccatcggggtcggcggggagctacgggttcccctcttccaagacgggtgccaagtgatgagtatcaggtgtctatggtgagatttggggaggatcccagaccttaacagccctttggttgaaacctctcacaatgtggcagtggcaataaaaggggtagcagagcttcctgccctcaccgaggtgccgagtgcctgctgccttgggccgccttgaacctccagggtttccagctcctcctccttcaccccagtgccactgccatgatggatgtgagtgaacttggggagtctgcccgctacctccgccagggctaccaggagatgacgaaggtgcacactatcccatgggacgggaagaagcgagtctgggtgcctgatgaacaggacgcctacgtggaggccgaggtcaagtcggaggctaccgggggcagagtcaccgtggagaccaaagaccagaaggtgctgatggtgcgtgaagccgagctgcagcccatgaacccgcctcgcttcgacttactggaggacatggccatgatgacgcacctgaacgaggcctctgtgctgcacaacctgcgccagcgctatgcccgctggatgatctatacctactcaggcctcttctgtgtcaccatcaacccctacaaatggctcccagtctatacggcctccgtagtggctgcttacaagg

SEQ ID NO: 62140 - DNA, 732 bp, Homo sapiens
tttcgtcgcgcctgccgcccgttgcccaggcaaccgtcgtgccgcgtcttcctgaggtagctcctgtcagcccactgatcccaccacccgctccctactgccccgcggtcttcgcgtgagctcggagactgagggacaacaaaaatggcggaggggagccagtcggcgcctgaggcaggcaatgatatgggaaatgatgatgccattggagggaatgtgagcaaatatatagtgcttccaactggctattgtggacagcccaagaaaggacatcttatctttgatgcttgctttgaaagtggtaacctgggccgggtggaccaggtctctgagtttgagtatgatctgttcattaggccggacacctgtaatccacgcttccgagtctggttcaactttactgttgaaaatgtgaaagaatcacagagggtcattttcaacattgttaacttcagtaaaaccaagagtctctatagagatgggatggcccctatggtgaaatctaccagcagaccaaaatggcaaaggctgccacccaaaaatgtttactactaccgctgcccggaccataggaagaactatgtgatgtcctttgccttttgttttgaccgagaagaagatatttaccagtttgcttactgctacccatatacatacactcgcttccaacattaccttgacagcctgcaaaagagaaacatggattacttctttcgggagcagctgggccag

SEQ ID NO: 62141 - DNA, 764 bp, Homo sapiens
tttcgtggttgcgctgggctccgggagcgccgatggcgtgactggccccgcgcggagcagcgacagtaaggctgtgtggggggagctgggacctaagccgcgcgcacacccctttctctgcgtctggtggaggtgcacagaggcttttgagtcaggcccaagcgcagccaggtgacctccccgcggcctttcaagcctgagctcggtggacagctccctctcccgtgagtcccgctgtcctgtacgcgcccggacgagccccgggctgcgcaccccgctaggagctgcccggccagcccgcttctctgcccggagccatgaatctcagtagcgccagtagcacggaggaaaaggcagtgacgaccgtgctctggggctgcgagctcagtcaggagaggcggacttggaccttcagaccccagctggaggggaagcagagctgcaggctgttgcttcatacgatttgcttgggggagaaagccaaagaggagatgcatcgcgtggagatcctgcccccagcaaaccaggaggacaagaagatgcagccggtcaccattgcctcactccaggcctcagtcctccccatggtctccatggtaggagtgcagctttctcccccagttactttccagctccgggctggctcaggacccgtgttcctcagtggccaggaacgttatgaagcatcagacctaacctgggaggaggaggaggaagaagaaggggaggaggaggaagaggaagaggaagatgatgaggatgag

SEQ ID NO: 62142 - DNA, 694 bp, Homo sapiens
atttctgtcctagacagaggaggcaggagccccaggggcgggctaatcgcctgggctggggatgcctgggcagatgcagaggaagctggaaaggtggcagtgcacctgggtcgctggagctgccgccgttcctaggagaccaaggagcagcaagcctgcgggggagggggagcaagtgggttgctgcttttagcagctgaaagggctgcagggagctctgggtaagacattttctgttgctgctgcttttgcggtagaagctgctgcgagtaagtcagaggaaggaggattgagaagggaggaggcttcacttgcagccatgctgaatcactgttgctgatcagatttcccactggtctgctgggagaatcaagaacagaactaggatccccgagtgcatacacagttcagcagctaccaccctggctgggcctcacacaatggagggtgaaagtgtcaagctgagctcccagactctgatacaggctggggatgatgagaagaaccagaggacgatcactgtcaaccctgcccacatggggaaagcattcaaggttatgaatgaactgcggagtaaacagctgttgtgtgacgtgatgattgtggcagaagatgtcgagatagaagcccaccgtgtggtcctggcagcctgcagcccctacttctgtgcgatgttcacaggtgacatgtctga

SEQ ID NO: 62143 - DNA, 539 bp, Homo sapiens
tttcgtccaggcggctggcggaggaggagagacggaggaggccgagaccggagcgccgctcgccgcagacttacttccccggctcagcagggaaaggttcctagaaggtgagcgcggacggtatgcaaagttgtgaatccagtggtgacagtgcggatgaccctctcagtcgcggcctacggagaaggggacagcctcgtgtggaggtgatcggcgccggcttggctggcctggctgcagccaaagcacttcttgagcagggtttcacggatgtcactgtgcttgaggcttccagccacatcggaggccgtgtgcagagtgtgaaacttggacacgccacctttgagctgggagccacctggatccatggctcccatgggaaccctatctatcatctaacagaagccaacggcctcctggaagagacaaccgatggggaacgcagcgtgggccgcatcatcctctattccaagaaaggcgtggcctgctaccttaccaaccacggccgcaggatccccaaggacgtggttgaggaattc

SEQ ID NO: 62144 - DNA, 1164 bp, Homo sapiens
ttcaaaacagaatctttctcggcacttgtagcctgaatggaatttcaaatgaaataataaattaataaagtaagtttcatagactatacatttactagttcacaatataaatgacagtttcattaccttcaagcctgatggtttctcagaagacactgtcctagatttttctccatccttgttttctctggctatactcaaaacagaatcttcctcatcacttgtagccttcaaggttggtggtttctgagaagacactgtcctagttttttctccatccttttttcctctggctatattcaaaacagaatctttctcatcacttgtagccttcaagcctggtggtttctcagaagacactgtcctagatttttctccatccttgttttctctggctatacccaaaacagaatcttcctcgtcacttgtacccttcaaggctggtggtttctgagaagacactttcctagatatttctccatcctttttttctctggttatattcgaaaaagaatccttctcatcacttgtggcctccaaggatggttttttccgagaagacactctcttagttttttctccatacttttttcctctggctatattcaaaacagaatctttctcatcacttgaagccttcaagcctggtggtttctcagaagacactgtcctagatttttctccatccttgttttctctggctatacccaaaacagaatcttccttgacacttgtagccttcaaggctggtggtttctgagaagacaacttcacatctcttcagtggaagagtcctgaattgatcaccttggacacctgtttgctgatacctgtcctagatatttctccatcctttttttctctggttatattcgaaaaagaatctttctcagcacttgtggccttcaaggctggttttttctgagaagacactgtcccagatttttctccatcctttatttctgtggctatattagaaacagaaccttcctcgtcagttgtagccttcaaggcttgttgtttctgagaagacactgtcccacattgtagtccatcctttatttctgtagctgtattcaaagcagaatctgtcttgtcacttgcagtctttgaggctggttgtttctgagaagacactgttccagatttcccaccgcccattat

SEQ ID NO: 62145 - DNA, 573 bp, Homo sapiens
cggacgcgtgggtgctttgagaggtgctacaaagccagaaaattttgtaattttttaaaaaaacttagttattccatttatactttttacaattttgtggtttctgtcctattgaaagttgttcaaaatgagaatggatgttgattatgatttttttcaggatacttctagaattactggctcccataaaacagaacagcggaatgctgatctcacagatgagacttcacgactttttgtaaagaaaacaatagtagtgggcaatgtgtccaagtatatacctccggataagagggaagaaaatgaccagtcaactcataagtggatggtatatgtccgagggtcccgtagagaacccagcattaatcattttgtcaagaaggtttggttcttccttcatcctagctataaaccaaatgaccttgtggaagttaggtaagcacgcttgaggtatttaacctaaattgaaatgcagacttatttttgaagtggaagaaaagtgatttaacttcaaaacatttcctggaaatgcagtagtaattgagaattggctcttagtcaaaatgtagttgg

SEQ ID NO: 62146 - DNA, 709 bp, Homo sapiens
tggggctgaggcggcgccggcggagccctgcagcggctgtgagcaggctacgcaacaggttcgcgggcggcggcctgacgaccaagccagctgcagtggcggcgagggcgggcagagcagggtctccccgcgcctgcccgcgcccaggctgccggtgctgagggacgcggagtcgcgctgtgacgtgcgggaggcgcggcgagggcgccagatggctgagagctagcaaggaaaactcaggaccatgatggctcagtttcccacagctatgaatggagggccaaacatgtgggctattacctctgaagaacgtactaagcatgacaggcagtttgataacctcaaaccttcaggaggttacataacaggtgatcaagcacgtaattttttcctacaatcaggtctgccggcccctgttttagctgaaatatgggctttatcagacctaaacaaggatgggaagatggatcagcaagagttctccatagctatgaaactcatcaaactgaagcttcaaggccaacagttgcctgtggttctccctcctattatgaagcaaccccctatgttttctccattaatttctgctcgttttggaatgggaagcatgcccaatctgtccattcctcagccattgcctccagctgcacctataacatcattgtcttctgcgacttcagggaccaaccttcctcccttaatgatgccg

SEQ ID NO: 62147 - DNA, 1028 bp, Homo sapiens
gcggtggaattcctgaggcggcggtagcatggagggggagagtacgtcggcggtgctctcgggctttgtgctcggcgcactcgctttccagcacctcaacacggactcggacacggaaggttttcttcttggggaagtaaaaggtgaagccaagaacagcattactgattcccaaatggatgatgttgaagttgtttatacaattgacattcagaaatatattccatgctatcagctttttagcttttataattcttcaggcgaagtaaatgagcaagcactgaagaaaatattatcaaatgtcaaaaagaatgtggtaggttggtacaaattccgtcgtcattcagatcagatcatgacgtttagagagaggctgcttcacaaaaacttgcaggagcatttttcaaaccaagaccttgtttttctgctattaacaccaagtataataacagaaagctgctctactcatcgactggaacattccttatataaacctcaaaaaggactttttcacagggtacctttagtggttgccaatctgggcatgtctgaacaactgggttataaaactgtatcaggttcctgtatgtccactggttttagccgagcagtacaaacacacagctctaaattttttgaagaagatggatccttaaaggaggtacataagataaatgaaatgtatgcttcattacaagaggaattaaagctctactccttttctgaatgtcatcttcatccaggatccaggctgaaggagcagcccttatttgggacatgtcctcatggcataaggcaaagagcaagaaagctagtggattacaggcgtgagccaccgcagctggcccatgagttaatatttcagtttatttctgtatattttcagcgaactaactggcatgataaaagctgtataaatgagaagttacatgtgaaaaagcattttacaacctataaggcttatttataacctacaagtgcttgttactgacatcctccagaaaataaataaaatttatataaaaggc

SEQ ID NO: 62148 - DNA, 478 bp, Homo sapiens
gattgagaccctattcgagaccatagtccatgtggtggaattctgatgtctcaactccggcctctaggaacttgaatgaggacaggagggtcagagggagagcctaggaggctgagccaaggagcgtggagaggagagacagggtgaaggtggcggctggctttctggaagcaggtggcctttggtgcggtcagcattcgtgccagccccctcttctctgatcctctccatgtgtctctctcctggaatcccagaagctgcccctgactccccattaactgcctctgcccctaccccctaggtgatgcttctgggagacacaggcgtcggcaaaacatgtttcctgatccaattcaaagacggggccttcctgtccggaaccttcatagccaccgtcggcatagacttcagggtgaggtggctgcaggcacttgcttccagcagagagccagggctgtggctcaggcatgggggggtt

SEQ ID NO: 62149 - DNA, 481 bp, Homo sapiens
ctcagccctgtggagaaacagctggcgctgaggaacgccctgcgctactttcccccggatgtccaggagctgctggccccagagtttgcccaggagctgcaactgtacggacacatctacatgtaccggttttgccccgacattgaaatgagggcctacccgattgagcagtacccctgccagacgaaagtggctgccgccatcatgcacatgattatgaacaacctggatcctgccgtggcccagtttccccaggagctggtgacctatggaggaaatgggcaggtgttcagcaactgggctcagttctggctgaccatgttctacttgtcgaagatgacagaggagcagactttggtcatgtacagtgggcacccacttggcctctttcccagcagccgcagtgccccacggctcgtcatcaccaatgggatggtcattcccaactactcctcccggacggagtatgagaagctctttg

SEQ ID NO: 62150 - DNA, 437 bp, Homo sapiens
tacggctgcgagaagacgacagaaggggtctgcgcaagcgcgaccgaccgagcagctccgaggagtccgcccggaaacaaacattccccagggcaatgtcacgacttggtcttcccgaggagccagtcagaaacagtttgctagatgatgctaaggcccgcttaagaaagtatgatattggaggcaaatattctcacttgccatataacaaatactccgtccttttgccattggtggctaaagaaggaaaactccatttgttgttcaccgtccggtcagagaagctaagaagggcccctggagaagtttgcttccctggaggtaagcgtgaccctacagacatggatgatgcagccacagctctccgggaagcccaggaggaagtgggtctccgtcctcaccaagtggaagttgtctgctgcctggtgccatgtctt

SEQ ID NO: 62151 - DNA, 896 bp, Homo sapiens
atttgtctggactgattacttggtagaaagccccggagcgctgggtcagcatcatccgtgactgactgaaaaggcgcgagaggagtcttccccgctgcacagaggcgtggctgaggctcggcggcgcccagggtacccaggcccggcccggaataaggacatcctctctggccccgctccgctcacggagtcagatggcggcggccgagctgacggccccggcccagggcattgtgacctttgaggacgtggctgtttacttctcctggaaggaatggggtcttcttgatgaggctcagaaatgcctgtaccacgatgtgatgctggagaacttgacacttacaacctccctgggtggttctggagcaggggatgaggaggcaccttatcagcagagcacttctccacagcgggtgtcacaggttaggattcctaaggcccttccttctccccagaagaccaacccctgtgagatatgtggcccagtcttgagacagattttgcacttggttgaacaccaaggaacacaccatggtcagaaactgtatacagacggggcatgtaggaaacaattacaatttactgcataccttcatcagcaccagaagcagcatgttggacagaaacacttcagaagcaatgggggcagagacatgtttttgagcagctgcacatttgaagtatctgggaagcccttcacttgcaaggaggttgggaaggatttcctggtgagatcaagatttcttcagcaacaggctgctcacaccagaaagaagtcaaacagaaccaagagtgcagtggcctttcacagtgtaaaaaatcattacaactggggagaatgtgtgaaagctttcagctacaaacatgtacgtgttcagcaccagggagattgtatt

SEQ ID NO: 62152 - DNA, 520 bp, Homo sapiens
ggaattcggtttcggtgagctctcagagccgatttctagcgtccgtgccggggacaggtgtccagaggtcggctgctgcagacatggcggcctccaccgcggccgggaagcagcggattcccaaagtggccaaggtgaaaaacaaagccccggctgaggtacagataactgctgaacaactcttaagagaggctaaagaaagagaacttgagcttcttccacctccacctcaacagaagatcacagatgaagaagaattaaatgattataaactaaggaaaaggaagacttttgaagataatataagaaaaaacaggactgtgattagtaactggataaaatacgcacaatgggaagaaagcctaaaggagattcaaagggctcgatccatatacgagcgtgctttagatgtagactaccgaaatattacactctggctgaaatacgcagaaatggaaatgaagaatcgccaagtcaaccatgctcgaaatatctgggaccgggccataacaacgctgcc

SEQ ID NO: 62153 - DNA, 555 bp, Homo sapiens
tcgaaaggactgctctttgggtgagttgaacttcttccattatagatagaattgatggctgagaaactcagcctctatcatgtggaacagctctgacgccaacttctcctgctaccatgagtctgtgctgggctatcgttatgttgcagttagctggggggtggtggtggctgtgacaggcaccgtgggcaatgtgctcaccctactggccttggccatccagcccaagctccgtacccgattcaacctgctcatagccaacctcacactggctgatctcctctactgcacgctccttcagcccttctctgtggacacctacctccacctgcactggcgcaccggtgccaccttctgcagggtatttgggctcctcctttttgcctccaattctgtctccatcctgaccctctgcctcatcgcactgggacgctacctcctcattccccaccctaagctttttccccaagttttcagtgccaaggggatagtgctggcactggtgagcacctgggttgtgggcgtggccagctttgctcccctctggcctattta

SEQ ID NO: 62154 - DNA, 379 bp, Homo sapiens
cgactagcgattgcaggaggccctgaggatgaggtacacgtgctccatgtactccgtgatccgctgcaagaagctcataggctcgttgaaggcgattggcatcgtgatcttggacagctcctggaaagatggggaagactcgctggttactgctgccttcctgacaccgctgggctgcccgatgcccctgctctgagcatcccttcatggagccgcagcctctggggttgaaccggatcttcaaaccccccatgggtgagccactccctgccccatcggccctgccctgtgagcctcagctgccatcagacctgacacacaatctgtgctgagcctgcacctgcccgggcggccgctcgagccctatagtgagtaagcc

SEQ ID NO: 62155 - DNA, 740 bp, Homo sapiens
ggaactcgcagatgaaggtggactgcttccgcaagctgggctattcatgcacggagatccacatcgtcctgtaaaagctgggcgtccaggcagacaccgacacggtgctgggtgagctggtgaaacacgggacagccaccgagcgggagcgccagacctcaccggacccctgccctcagctacctctagtcccgcgggggggtggcacccctaaggctcccaacctggagccttcactcccagaagaggaaaaggagggcagcgacctgagaccagaggtcatcgatgggagcaacgaggacatgagccatgggagcaaggaggtcttctcctgccggggcatcctgctggcagtgaactggtttctggagcggggccacacagacatcacagtgtttgtgccatcctggaggaaggagcagcctcggcccgacgtgcccatcacaggtgagtggtgcctctggaggtgggatggtcttactgccccagcagccctggttctccccaagagagaccctctgggagtgacctacaacttctagaactaaagcagggaccagcatttcttttctcagttttttctgtccttagcaacctgctctgaatggtggtcattggaggtcaccttgtccagtcttctgcctcagatctggagcccctccctcatcctactggtgggcaggtcgctctttcaacatccccagtggcagaagcgcagtatcacatagtggttaagcctg

SEQ ID NO: 62156 - DNA, 959 bp, Homo sapiens
caccagtgtccgctgcaaaggtatcccccggggacctgtgaggccagccatcccaccaccactgtcgtcagtgtatgcctggggtggtgggctgggcacccccctgcggctgccaatgctcaacacagaggtggtccaggtggcagctgggcgcacgcaaaaagccggcgtcacgcgctctgggcgtctcatcctgtgggaggccccacccctaggtgcaggcggaggcagtctccttcctggggcagtggagcagccacagccccagttcatctcgcgtttcctggagggccagtcgggtgtgaccatcaagcacgtggcctgtggggacttcttcactgcctgcctgactgacagaggcatcatcatgacattcggcagcggcagcaatgggtgcctaggccatggcagcctcactgacatcagccagcccaccattgtggaggctttgctgggctatgaaatggtgcaggtggcctgtggggcctctcacgtgctggccctgtccactgagcgagaactatttgcctggggccgtggagacagcggcagactggggctaggcaccagggagtcccacagctgcccccagcaggtgcccatgcccccaggacaggaagctcagcgagttgtatgtggtatcgattcctccatgatcctcactgtgcctggccaagccctagcctgtgggagcaacaggttcaacaagctgggcctggaccacctctccctgggggaggagcctgtcccccaccagcaagtggaggaggccctgagcttcacactactaggctctgcacccctggaccaggagcctctgctgagtatagacctgggcactgctcactcagctgctgtgactgcctcgggtgattgctacacttttggcagcaatcagcacggacagttgggcaccaatactcgccgaggcagtcgggcaccctgtaaggtccaaggcg

SEQ ID NO: 62157 - DNA, 411 bp, Homo sapiens
cgcatgttggtcagtcgtgttttaaagagtacagtgcggggaggctgagaggggcgcatgcaacaacaacttttggaaggatggaagagaagaggcgaaaatactccatcagcagtgacaactctgacaccactgacagtcatgcgacatctacatccgcatcaagatgctccaaactgcccagcagcaccaagtcgggctggccccgacagaacgaaaagaagccctccgaggttttccggacagacttgatcacagccatgaagatcccggactcataccagctcagcccggatgactactacatcctggcagacccatggcgacaggaatgggagaaaggtgtgcaggtgcctgccggggcagaggccatcccagagcccggggtgaggatccccccaccactggaag

SEQ ID NO: 62158 - DNA, 585 bp, Homo sapiens
cttctacccccggagctcagctgatcttcccttccagactacgaggtgtgaatttcaaacttccgtaatggagttagcccacagtttattgctaaatgaagaagctttggctcaaatcaccgaagcaaaaagaccagttttcatctttgaatggttgcgatttcttgataaagtcttggttgctgccaacaaggtatggtattgctcttttttcccagttgcattaacgtgaagagattatgtggtcatgattcttaagaaaacacatgttatgttttggaaggtttatgggtcacttatggaacttgagagtattacacgaatgggaaatttagtggcaaaactcaaacctcgtttaaatccagctcattgcctatcttctttatgtttgtacctgggcagctcattgtaactggagaaaaacatggctatatgactggtgtcactttaaatttatcatcgtcacccgttgcaagtgatctctctatgctgcctaacaatcccagtgtcttcacttatctctttgaggagtcaataataggctcttttttttttaatctgttttttcttcctgcatagccttgt

SEQ ID NO: 62159 - DNA, 741 bp, Homo sapiens
aaaaagttgagtaaatcatgtcggagttactggacctttcttttctgtctgaggaggaaaaggatttgattctcagtgttctacagcgagatgaagaggtccggaaagcatatgagaaaaggattaggcgactaaagaatgagttactggagataaaaaggaaaggggccaagaggggcagccaacactacagtgatcggacctgtgcccggtgccaggagagcctgggccgtttgagtcccaaaaccaatacttgtcggggttgtaatcacctggtgtgtcgggactgccgcatacaggaaagcaatggtacctggaggtgcaaggtgtgcgccaaggaaatagagttgaagaaagcaactggggactggttttatgaccagaaagtgaatcgctttgcttaccgcacaggtagtgagataatcaggatgtccctgcgccacaaacctgcagtgagtaaaagagagacagtgggacagtccctccttcatcagacacagatgggtgacatctggccaggaagaaagatcattcaggagcggcagaaggagcccagtgtgctatttgaagtgccaaagctgaaaagtggaaagagtgcattggaagctgagagtgagagtctggatagcttcacagctgactcggatagcacctccaggagagactctctggataaatctggcctctttccagaatggaagaagatgtctgctcccaaatctcaagtagaaaaggaaactc

SEQ ID NO: 62160 - DNA, 834 bp, Homo sapiens
  misc_feature (1)...(834): n = a,t,c or g
gctgttggtatgggggccatcatcccgccccatctgcaaggccttcctggtgctaatggatcatcagtttctcaagtcagtgggggcagtgctgaaggaataagcaattctgtgtggggactgtccccaggtaaccctgccacaggaaatagcaattctgggttcagtcaggggaatggagacactgtgaactcagcattaagtgctaaacaaaatggatccagcagtgctgtgcaaaaggaaggaagtggaggaaatgcttgggattcaggacctcctgctggtcctggaatactcgcctggggaaggggcagtggcaacaatggcgttggtaatatccattcaggagcttggggccaccccagccgaagcacctctaacggtgtgaatggggaatggggaaagcccccaaaccagcattccaacagtgacatcaatgggaaaggatcaacagggtgggagagtcctagtgtcaccagccagaaccctaccgtacagcctggtggtgaacacatgaactcctgggccaaagcggcatcttctggaactacagcaagtgaaggaagtagtgatggttctggcaaccacaatgaaggaagcactgggagggaaggaacgggagaaggccgaaggcgagataaagggattatagaccaagggcacatccagttgccaaggaatgatcttgacccaagagttctgtctaatactggttggggacagactcctgtaaagcaaaacactgcctgggaatntgaagaatcccctaggtctgaaagganaaatgacaatgggacagaggcctgggttgtgcagctactcangcttcanact

SEQ ID NO: 62161 - DNA, 1090 bp, Homo sapiens
aacggtcgacgatttcgtacggggaggagagaagggggcggaaagagggcggaaagtgaaaggcgccgagggccgctctgtctcccgtctgactcggttctcgactgctccgggccgccgatgtattgtgggatcgcggagccgtccctaagacgctgggatccgcagaggagcccacttgagagcgcctcctgtcgtctgtaaggttgccttgccatccctcggcaccccaacttcccccgcccccccatcgcctcctcctccatcctccagttcaaaatggcgacggcggcggcagcggcggcggtgatggctcctccgggctgcccgggttcgtgccccaacttcgccgtagtctgctccttcttggagcgctacgggccgctgctagacctgcctgagttgccgttccctgagctggagcgggtgctgcaggcgccgccgccggacgtcggcaacggagaagtaccaaaagaattggtggagctccatttgaagctgatgaggaaaattggcaaatctgttactgcagacagatgggaaaaatatttgatcaagatatgccaagagtttaacagtacctgggcatgggagatggagaagaagggctatcttgaaatgagtgttgaatgcaaactagcactcttaaagtacctctgtgagtgtcagtttgatgacaatctcaaattcaagaatattattaatgaggaggatgccgatactatgcgtctccagccaattggtcgagacaaagatggcctcatgtactggtaccaattggatcaagatcacaatgtcagaatgtacatagaagaacaagatgatcaagatggctcttcatggaaatgcattgtcagaaatcgaaacgagttggctgagactcttgcactcctgaaagcacaaattgatcctgtactattgaaaaactctagccaacaagacaactcttctcgggaaagtcccagcttagaggatgaggagactaaaaaagaggaagaaacacctaaacaagaggaacagaaagaaagtgaaaagatgaaaagtgaggagcagcctatggatttagaaaaccgttctacagccaatgttc

SEQ ID NO: 62162 - DNA, 993 bp, Homo sapiens
aacaattgcaaagctaatatttaagtttcaattcatgaaaacattctggaaataagagatgactccaatctacatgttgaaaaggctcattgtgtactgggaaaattgatccagaatggtcagttccaagtcatgtcctagtaaaacagttggactttcaaaatgatgaagaaaaattcctctgggcttccagacagaaaggagaggttagcaacagacttctaaacagcaacatacaaagcaaaacagccatggaacaacatgtttaaagtctacgaaagtataagccaaagattttataactatgactcattcttaaagaaaaaccatgataaatcctactatattaataaaaaagtatttaaatagtgaaaaatgccacgagcaaagtcaaaaggcaagcgacaaagcggggaaaaatatttggacttatatcacaaagagctaacctcctggatgaaaacaccttcgtaaaattccaggatatccatcaaatattgagaagaaagaatatcaggagcaaagtgttctaagttgctgctcagaacgtaaagatgcgaaccccaaatcagtggtttgttcattcttcatgcaagagcaatgcactaaaggagagaagcaagctgtggtgatcagtgactttggtgaaagctaagaaggttcaaacaaatttgcaaatgatatacaacttctaagcattccatattggaagaagagatttctacacatgaaaaaaatgcctttgtttagtaaatcacacaaaaatccagcagaaattgtgaaaatcctgaaagacaatttggccattttggaaaagcaagacaaaaagacagacaaggcttcagaagaagtgtctaaatcactgcaagcaatgaaagaaattctgtgtggtacaaacgagaaagaacccccgacagaagcagtggctcagctagcacaagaactctacagcagtggcctgctagtgacactgatagctgacctgcagctgat

SEQ ID NO: 62163 - DNA, 808 bp, Homo sapiens
ggcgcacgctactctgtcgccgccgtcagaccggaattgccggtgccgccgccaccgctgtctgtgcgcccacctctgctgctaccatggggatcttagagaagatctcggagatcgagaaggagatcgctcggacacagaagaacaaggccactgagtatcatctgggcctgctgaaagctaagctcgccaagtatcgggcccagctcctggaaccgtccaaatcggcctcatccaaaggagagggctttgatgtcatgaagtcgggtgatgcccgtgtggcgctgattggatttccctctgtgggtaagtccacattcttgagtctgatgacctccacggccagcgaggcagcgtcctatgagttcaccactctgacgtgtattcctggggtcattgaatacaaaggtgccaacatccagctcctggaccttcctggaatcattgaaggcgcagcccaaggaaaaggccgtggccggcaggtgatcgctgtggcgcgcacggctgacgtcatcatcatgatgctggatgccaccaagggagaggtgcagaggtccgcagggtggggcatggggcaggctcacatgtctggggagggccaatgtgtccctgagctcgtactaggcggcctgtgggtgtttggctctctcacacgtgagagtagtggtaggacttgtcacagactaaacccaacaccacccagcctatggcgtcttctcctcaaggcttgtgtccagccagcacagaggtatcttgggactgggggccgaggggcttggcctggccctgcttcctgttcagaggcacc

SEQ ID NO: 62164 - DNA, 594 bp, Homo sapiens
cacagctgctcggcgcctgcagctccggctcgggggctggaaccgaagcgggggcggcgggagcgcggagaccacagcccccggggagaggcggagggggtccctggcctgggcggagaggctgagctgagtgcgcgtgagaaagagggctgcaccgctgctcggcgcggactctgccagccccagcttcagccccggctcaggtcgccgcagcccgggagcctccccgcttgcgccccaaggcacgcgcggcacagccatgaacaccaacgatgccaaggagtatctggcccggagggaaatccctcagctttttgagagccttttgaatggactgatgtgttctaagcccgaagatccagtagaatacttggaaagttgtttacaaaaagtaaaggaactgggtggctgtgacaaggtgaaatgggatacatttgtaagccaggaaaagaagaccttacctccactaaatggaggacagtcacggagatcctttctaagaaatgaaagtgacacggatctctctgagactgcggagttgattgaggagtatgaggtttttgattctatcagacctcgaccaactatcattat

SEQ ID NO: 62165 - DNA, 461 bp, Homo sapiens
aggggccaagatggcggcgcgccggggacggagagacggagtcgcgccgcccccgagtgggggccccggtccggaccctggcgggggagcccgcggcagtggttggggaagtcgaagccaagcgccgtatgggactttgggcgctgtgagcggcggcgagcaggtgctgctgcatgaggaggcgggtgattctggctttgtcagtctctctcggctgggcccatctctgagggacaaggacctggaaatggaggagctaatgctgcaggatgagacactgctggggaccatgcagagctacatggatgcctcccttatctccctcattgaggattttgggagccttggagaggttgaaatgtctcttccagatccctcttgggacttctccccaccctctttcttagagacctcttcccccaagcttcctagctggagacccccaagatcaagaccacgct

SEQ ID NO: 62166 - DNA, 918 bp, Homo sapiens
gcagcttggagatgtcgtcggatggggaacccctgagccgcatggactcggaggacagcataagcagtactataatggatgtagacagcacaatttccagtgggcgttcaactccagcaatgatgaatggacaaggaagcactacttcttcaagcaaaaatattgcctataattgttgttgggaccagtgccaggcttgcttcaactctagcccagatctggcagatcacatccgttccatacatgtagatggtcagcgaggaggggtatttgtttgcttatggaaaggttgtaaagtatataacactccatctaccagtcaaagttggttacaaaggcatatgctgacacacagtggagacaaacctttcaagtgtgttgttggtggctgcaatgccagctttgcttctcagggagggctagctcgtcatgtacccacacacttcagtcagcagaactcctcaaaagtttctagccagccaaaggccaaagaagaatctccttctaaagctggaatgaacaaaaggaggaaattaaagaacaaaagacgacgctcattagcacggccacatgatttcttcgatgcacaaacactggatgcgataagacatcgagccatatgctttaacctctcagctcatatagaaagtttagggaagggacacagtgttgtttttcatagtactgtaagtattcttttattttttcaaattaaatataaaactttgcaaaaaaatatttccacaatcatttctaaatctctcaaaatctaagaaagtacaatttaacagaaatcacaaaaccttttgttttatcagtatttaaaacattgtattattggttataaagcacacatttcttataattttacatgtttgtgattaaactgaatatgttagcctttagtttgagttactt

SEQ ID NO: 62167 - DNA, 688 bp, Homo sapiens
cttttcttagcaattttatgagatgggtactaacatcagcttcacattaccggcgagaaaacaggcaaagaggttaggttattgcctaaagtcacacagctagtaagtggcaagaccagggtttgaagcagagcagcgctgatccactaccacatccctcctgggctggaacccaggcctctccagccctagtgatcatgaggctgcctgttgggcataaacagcgaaccagtttctccctgctttgttaggaaagagagccactcttcatgatgttatcactaacaaggcctgtgtggactccgcaggttcctacttcagtctctggaagatttggacacaagtttaaggaaactgaactcccgcctgtttgtagtccggggacagccagccgacgtgttcccaaggctgttcaaggaatggggagtgacccgcttgacctttgaatatgactctgaaccctttgggaaagaacgggatgcagccatcatgaagatggccaaggaggctggtgtggaagtagtgacggagaattctcataccctctatgacctggacaggatcattgagctgaatgggcagaagccaccccttacatacaagcgctttcaggccatcatcagccgcatggagctgcccaagaagccagtgggcttggtgaccagccagcagatggagagctgcaggg

SEQ ID NO: 62168 - DNA, 958 bp, Homo sapiens
ggcacggaaacaggaagccccgccgactgcctcctggccgcgcctggagcgcgcgccctgcggctggtcctcaataaatagccgaggaggcgctcccctccctccctcccgccggcgccgtcggcccggaccatcgagtcagtcctccagcgtcccagagagggcgcggaagtgccccagggccggcgcgggttcttccggccgtgcggtccgcgcttttgtcccgctggcggccgggtttccgcggcgccgccacagccagtgtgaatagagaccccggaggcgcgtcctagccctcatctggggaagcgcacctgcatacagacgggtgcaccggggaggaggcgatctgccgcgtgttcctgcaagcagaaaaggagttaactagtgtcacatttgaagacgagcactgaggatgaggaaccaactgaagaatatgaaaatgttggaaatgcagcatctaagtggccaaaagtggaggatcctatgcctgaatctaaggttggtgacacatgtgtttgggatagcaaggtagagaatcaacagaaaaagcctgtggaaaacaggatgaaggaggacaaaagcagcatcagggaagcaatcagcaaagccaagagtacagcaaatataaagacagaacaggaaggtgaggcatctgagaagagcttgcatctgagcccacagcatatcacacaccagactatgcctataggacagagaggcagtgagcaaggcaaacgtgtggagaacattaatggaacctcctaccctagtctacagcagaaaaccaatgctgttaagaaattacataaatgtgatgaatgtgggaaatccttcacatataattcccgccttgttcaacataaaattatgcacactggggaaaagcgctatgaatgtgatgactgtggagggactttccggagcagctcgacccaggaattccgagccggtagca

SEQ ID NO: 62169 - DNA, 391 bp, Homo sapiens
acaaacagagaactggttttgacagtgtttctagagtgctttttattattttcctgacagttgcgttccaccatgattactttctccttcagcgaataggctaaatgaatatgaaacagaaaagcgtgtatcagcaaaccaaagcacttctgtgcaagaattttcttaagaaatggaggatgaaaagagagagcttattggaatggggcctctcaatacttctaggactgtgtattgctctgttttccagttccatgagaaatgtccagtttcctggaatggctcctcagaatctgggaagggtagataaatttaatagctcttctttaatggttgtgtatacaccaatatctaatttaacccagcagataatgaataaaacagcacttgc

SEQ ID NO: 62170 - DNA, 719 bp, Homo sapiens
cgagctgctgttgcagttccttatgtttgaacaccttatcaatgtgctcttccctcagtgcgtactgttcgatgagcttctttagcttctcccccagctcaatgttttcctgtcggagtttggcgttgtggatgtcatgctgctccagctgggcttgaatttcatttaaggtaatctggaaatgtgcagttgcttctttacgtcgttcttcttcctctcgtgcctgctgcatattttcctcctttaacgtcttattgtgacgctgaagttctctgcaaagagattctagcttgcttcttgccaagatagccttgctatgttcactctgcaagtgaactttctctttcacaatctgggcttgcttcttctgcaggatcttcatttgcttctgaacactcctgctctcctccagaagatcagcatatttcttacagagagctgccagcttctcctctggggttgaaagggtgtttagggcttgcatcagtaataaaacttcttttcctaaagttttttctttgttcctgttgcactctgaatcttgctgaccatcagggggatctgttcgagcttctcccccagggatttcctctcttgattcttgcgtgcagtatgctgggctcaccaaattcctgttctctgttataaagtcactgccttcatcctcttccaatgaatgcttgttacttgtgccaccacaatttgagccttgatgttga

SEQ ID NO: 62171 - DNA, 397 bp, Homo sapiens
  misc_feature (1)...(397): n = a,t,c or g
ggacctatgttctgacagcgagaaggcgcgaggagagtcgttttctcagctgcacagccggggcctgacggtcgccggcggtggtgacagctttgctcttgtcttcgcccggatcgtccaccgctcccggcccgctccgcccagagtccgatggcggcggcactgagggccccgacccaggtttttgtagcctttgaggatgtggccatttacttctcccaggaggagtgggagctccttgatgagatgcagaggctcctgtaccgcgatgtgatgctggagaactttgcagttatggcatccctaggtattattgagtgttttcaagaatgaaaagannnnnnnnnnnnnnnnnnnnnnnnnnnnnnnnnnnnnnnnnnnnnnnnnnnnnnnnnnn

SEQ ID NO: 62172 - DNA, 551 bp, Homo sapiens
cccacgcgtccgccttgctggagcattcactaggcgaggcgctccatcggactcactagccgcactcatgaatcggcaccatctgcaggatcactttctggaaatagacaagaagaactgctgtgtgttccgagatgacttcattgtcaaggtgttgccgccggtgttggggctggagtttatcttcgggcttctgggcaatggccttgccctgtggattttctgtttccacctcaagtcctggaaatccagccggattttcctgttcaacctggcagtggctgactttctactgatcatctgcctgcccttcctgatggacaactatgtgaggcgttgggactggaagtttggggacatcccttgccggctgatgctcttcatgttggctatgaaccgccagggcagcatcatcttcctcacggtggtggcggtagacaggtatttccgggtggtccatccccaccacgccctgaacaagatctccaatcggacagcagccatcatctcttgccttctgtggggcatcactattggcctgacagtccacc

SEQ ID NO: 62173 - DNA, 2158 bp, Homo sapiens
ttagccgtggggctgtcctcgccactggaccccaaacccctcagcccgggcgggcgcgaacacacaatcagagccgctggcgtcccggctgagaggacggggccccggcagaaagaccccgggccccctcagcccgagcgcgtcgccgagccggtccccaggttctccctccggaaccaacctgcgcacccgcggcggggccgggggcgccaggacccagacggaccgagggccggaagtgacgccagctggcccgcttgaggcgtagggggtggcgctctccgttcggcggcgctcccatggcgcacattaccattaaccagtacctgcagcaggtgtacgaagccatcgacagcagagatggagcatcttgtgcagagttggtgtcttttaaacatcctcatgttgcaaacccacgacttcaaatggcctctccagaggagaagtgtcaacaagtcttggaacccccttatgatgaaatgtttgcagctcatttaaggtgcacttatgcagtggggaatcatgacttcatagaggcatacaagtgccagaccgtgatagtccaatcattcttgcgagcattccaggcccacaaagaagaaaactgggctctgcctgtcatgtatgcagtagcgcttgaccttcgagtgtttgccaataatgcagatcaacagttggtaaagaaaggaaaaagcaaagttggggacatgttggaaaaagcagcagagttactgatgagctgtttccgggtctgtgccagcgacacccgtgctggtatagaggactctaagaagtggggcatgctgtttctggtgaaccagctgtttaaaatctacttcaagatcaacaaactccatttatgtaaacccctaattagagcaattgacagctcaaacctgaaagacgattacagcactgcacagagagtaacatacaaatactacgttggacgcaaggctatgtttgacagcgattttaagcaagctgaggagtacctgtcatttgcctttgagcattgtcaccgttctagtcagaagaacaaaaggatgattctgatctatttgcttccagtaaaaatgctattgggtcacatgcccactgtggagctcctgaaaaagtatcacctgatgcagtttgcggaagtaaccagagctgtgagcgagggcaacctgctgctgctgcacgaggcgctggcgaagcacgaggccttcttcattcgctgcggaatcttcctcatcctggagaagctgaagatcatcacctacaggaacctctttaagaaagtgtatttgttactgaaaacacaccagctgtctctggatgcttttctggttgccttgaagttcatgcaggtggaggacgtggacattgacgaagttcagtgtattctggctaacttgatatacatgggacacgtcaaaggctacatatcgcatcagcatcagaagctggtggtcagcaagcagaacccatttcctcccctgtccacggtgtgttgaaagtacacggagccccgaggacgggtgagcagttgtttctttccactttggttgtgctgatgagaccggtccggtactgcaacaaggctccctgaagccggaactcttggaggcgcttttcccagggatgctgaggctgagattttcagcacacccgagttaatctccttcatttgtaactaatttcagcctgatgaaaacctggaattcctttttcacagactcggctggttctggagtctttgtgagacttctttgaaggaggctttgcgtgaaggctgctcggctcacttttcctaagtgtggttcctgaaggctgtctttgtaactttttgtagttctttgtgtaaaaagcgtattctgaatttatacacatggcatgttcttcattatatcttccaggatacatctatttttatatattaaatttgaatgtgttatcaaaatgcttggttaacttaaggcacctttttaaaagcagaatttaatttgatttaaattttccagattttatagcttgcctgtatggatgctcctcaatttatgatggggttacatcccaataaacttattttatttgcctttgctttgttggttaaaaaaaaatttcttttaaaaaaccatcttaaattgaaaatacatttaatacacctgctact

SEQ ID NO: 62174 - DNA, 1326 bp, Homo sapiens
  misc_feature (1)...(1326): n = a,t,c or g
atgggaatccccaacttagctcaggtatcctgtaacgcagaagctctgtgaaatgagcagaagtccttaaaagggcctgccggttttcccgcaatcttttacagggtgagcagcgctgtatccactgataacccagctgcttaggaactgagtaaagccggctccaaacttctcagctgttgacaggcttgacttgctgagaacactggttaaatatagcacccgcgagctcagctcctcaacatagccattgctctgacagtgttgtgaagggagcagaagaggagaaacctaatctccgaacccaacaacacctagcaacagtagaaaaaacttttaaacaaaagtctgggtgggagatatacaacaacttccaatttctgctgatcgggatttcagggagaagaagctgctttccctcctctctactctgtttcctgcatgacttcagctattggctggtcctgggaaagaaagtgggaaaagctttttcctctgtattcttttgggctggatagtttttgagaactcgaatctgtcttgggctgtgagacaagccactgggttcttcaaaggataaactacctacatagaggacatacctttggttaaaggagctgccgtcaggtgggaatgagatctcgaaaccaaggtggtgaaagtgcatctgatgggcatatctcctgtcccaagccctccatcatcggcaatgctggtgaaaaaagtctctcagaagatgcaaaaaagaagaagaaatcaaataggaaggaggatgatgtcatggcctcaggaactgtcaaacgacacctaaaaacatctggagaatgtgaacgaaaaactaagaaatccctggagttatccaaagaagacctcatccaactactcagtataatggaaggggagttgcaggccagagaagatgtgatccacatgctgaagacagagaaaaccaagcctgaggttctggaggctcattacgggtctgcggagccagagaaagtgctgcgggtcctgcaccgagatgccattcttgcccaggagaaatccataggagaagatgtctatgagaaaccgatttcagagctggacagacttgaggaaaaacagaaagaaacctaccggcgcatgctagagcagctgttgctggccgagaagtgtcataggcgcaccgtatacgagttagagaacgagaagcataaacacactgactacatgaacaagagcgacgacttcaccaacctgctggagcaggagcgggagaggttaaaaaagctccttgaacaagaaaaggcttatcaagcccgcaaagaanaggaaaatgctaat

SEQ ID NO: 62175 - DNA, 970 bp, Homo sapiens
cccacgcgtccggaataacgacctgccttacgctttgcggctgtcgtcggagaggcatctgggttcggactggggccgccatggggaaagtgaatgtggccaagttgcgttacatgagccgagatgacttcagggtcttgaccgcggttgaaatgggcatgaagaaccatgaaattgttcccggcagtttgattgcttctatagccagccttaaacatggtggctgtaataaagttttaagagaattagtgaaacataaactcatagcttgggagcgtaccaaaactgtccagggctatcggttgacaaatgcaggatatgattacctagctttgaaaacactttcttctaggcaagtagttgagtctgttggaaaccagatgggtgttggcaaagaatcagatatttacattgttgcaaatgaagaaggacaacaatttgcattaaagcttcacagactaggaagaacctcgtttcgaaatttgaaaaacaaacgcgattatcataaacataggcacaatgtgtcatggctatatttatctcgtctctctgccatgaaggaatttgcctatatgaaggcattgtatgagaggaaatttccagttccaaagccaattgattacaatcgtcatgcagtggtcatggaactcataaatggttatccactatgtcagatacaccatgttgaagatcctgcatcagtatatgatgaagctatggaactaattgtcaaacttgcaaatcatgggctgattcatggagattttaatgaatttaatctcattttggatgaaagtgaccatatcaccatgattgattttccacagatggtttcaacttctcatcccaatgctgagtggtattttgacagagatgttaaatgcattatagatttctttatgaaacgtttcagctacgaagtgagctttttccaacttttaaggatatcaggagagagacactctcgatg

SEQ ID NO: 62176 - DNA, 524 bp, Homo sapiens
atccccacagggtaatgggtgtcccgatgtcacgggggactctgtgatccgtgttcccctgaccctcctagtgcacaacttggccgggctcactgggctcctgcaccactgcctgtcaggtccgctgccagccccaagccccccaccagccatgagctcctccagaaaggaccacctcggcgccagcagctcagagcccctcccggtcatcattgtgggtaacggcccctctggtatctgcctgtcctacctgctctccggctacacaccctacacgaagccagatgccatccacccacaccccctgctgcagaggaagctcaccgaggccccgggggtctccatcctggaccaggacctggactacctgtccgaaggcctcgaaggccgatcccaaagccccgtggccctgctctttgatgcccttctacgcccagacacagactttgggggaaacatgaagtcggtcctcacctggaagcaccggaaggagcacgccatcccccacgtggttctgggccgga

SEQ ID NO: 62177 - DNA, 784 bp, Homo sapiens
ggcttaaggttcttggactctgcatggttccctttagcctgtcttcgggcctgccacaattaaatgaccgcaagaaagaagtctatgctaagccccataatgaacgtttcaagcaagaaggatgagaattttagatctggaagtgtccgcgggacaggatcttgtcaagacctgatggggaagttctagagtgctgccaggttgccagatttctaagaaggagtttgaagaggagaaaaggatttttgcatgtttagaaatcaaggttcaggagaatcttgacagtgaatgtgtctcattacattgaataacagctacaggatgttcgagagctgttctggcttttctggattctgtgcttcaccaatagaggaatcccatggagcattaattagttcttgcaattccagaaccatgactgatgggttggtgacattcagggatgtggccatagaattctctcaggaggagtggaaatgcctggaccctgctcagaggactctatacagagacgtgatgctggagaattataggaacctggtctccctggaaaggagaatcacttgaacccaggaggaggaggttgtggtgagccgagattgcgccattgccctccagcctgggcaataacagtgaaaatctgtctcaaaaagaaaagaaaagaaaaaaagatatatactcccctaagaaaagaaaaaaagctatatactcccctcacaaactggggacctcaagatctccaccctaaaatagttattttgaatttccccctggcaatgtaaac

SEQ ID NO: 62178 - DNA, 1493 bp, Homo sapiens
aatagagatcgtagtccatgtcgaggaactcacaaggtgaaagcccatctctactaaaaatacaaaaattagctgggcatgttggtgggagcctgtagtcccaactactctggaggctgaggcaggagaatggcttgaacctgggaggcggaggttgcagtgagccaagatagggcaccactgcactccagcctgggcgacagagtgatactctgtctcaaaagagagagagagagaatagccgccaccattattccccctagtgaccccactgaactctactgaaaaccttgcctcatcctcctgcccacgcctggccaaccccactgggaacagtcatctgcagggacaagcacaaattccaccctctgtgctttccagatggatgatgacaccactctgtttgtttaagaacccgtcttttgattctctcataattcctcacactgcttctgcagaatttgtttctaactcaagagggaagaaacaggaagatttctggcttttctttagttgccttaaggtcagcttttcagctgtggcactgaaggggcttcctgggaagcacccaagaaaatgacatgggtttaccagacaagatgtcctgtccaccactggcaaagacagggagtagctatttctcctatgctgtgcctcaatcttctcacccggggaaatggtgcttcccttcctactttatggagcacttatgaatatctaactagaagtgaatataaaagctctttgaactataacacatgataagctactcattgtttcagagattaccccagttttataagagatgaatctaaaatttattagcaaaacttttcctccttcaaaattacaaaattatgattttaaatactcaattactttgaaaacctctgggtgtgttttcttcttttttactaataggcatcatctcactgaatcaatgatccctgaatgaaaaactatatgttattgttataggaatgaaaatgtttactcagaaaggtattctttagtcagtctgatagacacacattccttagcaagttttattatgcatatgtttatattctatttggtaatttttataactgttttgctatatttacctttaccattcaaaatctgctttatgtttggaccagtagaaaaagtgacatttctcttattattttgagcacgttgaagaagctgtgtgggctgtggaagtcttaaaagaatcagatagacccgtggcagttaccatgtgcataggcccagagggagacatgcatgatataacccccggagaatgtgctgtgaggctggtgaaggcaggtaatttggacccataccgtgatacacagctcagttgttgcttacgaaatttaacaaagtgtgcttgatattgtgagagcagtttggaaatagaagaatgaactccaatcagttttcttatctgtaaattgtgggaggtggaggggaatggctaacctctaaggtaccttccaactatt

SEQ ID NO: 62179 - DNA, 885 bp, Homo sapiens
agccatggcgactcccgacgtgagtgtgcacatggaggaggtggtggttgtgacaactccggacactgcagtggacggcagtggtgtggagggggtgaagaccgtgttggtgacgaccaacttggcccctcacgggggcgacctgacggaagataacatggagacagaaaatgcagcggcggcagctgccgcggccttcacagcctcctcccagctcaaggaagccgtgttagtgaagatggctgaagagggggagaacctggaagctgagattgtgtaccccatcacctgtggagacagcagagccaacctcatctggaggaagtttgtgtgtcccggcatcaatgtgaaatgtgttcaggtgagcacaggctgcattcagggcccaggagagaggcctcatggcgtctgtgactgctttgggggtgcagctgtgccaagtgcatcctgaggcagggtctccagggctggggagagtgaaggaggtgcgggaagaaccttcaggaagaggaattcgctgtggccacagtgcactgtggcagggaggctggggaggccctcccgctgtgtggaggaggctgcccctcctggacaaggagctttacccagcagatccagtgagagctgctccaaaaaggctgcctctttggtaaggattaggatgagtgggaaaggtcttctctttctgacaatactgataggtcaggtgcccaggctcacctgtggtggaacagccgaaaatgccagtgaagacatttccataaagcatcttacagatgctgcctcacacgggctaagaaagaggaagtgctgaggcctggggacctaatggtgacagaattgagaggcagatggggtgccaagcccagcttttgccctgagagc

SEQ ID NO: 62180 - DNA, 522 bp, Homo sapiens
ccgccaatttgaacgccctaggtttgcccgcctgcaggaattcggcacgaggaaatacataaagttttcctcttctgccttggatatttataatgggtatcgggaagtctaaaataaattcctgccctctttctctctcttggggtaaaaggcacagtgtggatacaagtccaggatatcatgagtcagattccaagaagtctgaagatctatccttgtgtaatgttgctgagcacagcaatacaacagaggggccaacaggaaagcaggagggagctcagagcgtggaagagatgtttgaagaagaagctgaagaagaggtgttcctcaaatttgtgatattgcatgcagaagatgacacagatgaagccctcagagtccagaatctgctacaagatgactttggtatcaaacccggaataatctttgctgagatgccatgtggcagacagcatttacagaatttagatgatgctgtaaatgggtctgcatggacaatcttattactgactggaaactttt

SEQ ID NO: 62181 - DNA, 854 bp, Homo sapiens
tcccgccgctgccatggcggcagctccgccgctttccaaggccgagtatctgaagcgttacttgtccggggcagatgccggcgtcgaccggggatctgagtccggtcgcaagcgtcgcaaaaagcggccgaagcctggcggggccggcggcaagggaatgcggattgtggatgatgatgtgagctggacagctatctccacaaccaaactagaaaaggaggaagaggaagatgatggagatttgcctgtggtggcagagtttgtggatgagcggccagaagaggtaaagcagatggaggcctttcgttccagtgccaaatggaagcttctgggaggccacaacgaagacctaccctcaaacagacattttcgtcacgataccccggattcatctcctaggagggtccgtcatggtaccccagatccatctcctaggaaggaccgtcatgacaccctggatccatctcctaggagggcccgtcatgacaccccagatccttctcccctcagaggggctcgtcatgactcagacacatctcctcccaggaggatccgtcatgactcctcagacacttcacccccaaggagggcccgtcatgattctccagatccttctcccccaaggaggcctcagcataattcttcaggtgcatctcctaggagagtccgtcatgattcaccagatccctctcctcctaggcgagcccgtcatggttcctcagatatctcttcccccagaagggtccataacaactcccctgacacatctaggaggactcttggctcttcagacacacagcaactcagaagggcccgtcatgactcccctgatttggctcctaatgtcacttatt

SEQ ID NO: 62182 - DNA, 2468 bp, Homo sapiens
gaatcgacgcacgcgtgcgcagcgctgccagcgtggaaggagctgcggggcgcgggaggaggaagtagagcccgggaccgccaggccaccaccggccgcctcagccatggacgcgtccctggagaagatagcagaccccacgttagctgaaatgggaaaaaacttgaaggaggcagtgaagatgctggaggacagtcagagaagaacagaagaggaaaatggaaagaagctcatatccggagatattccaggcccactccagggcagtgggcaagatatggtgagcatcctccagttagttcagaatctcatgcatggagatgaagatgaggagccccagagccccagaatccaaaatattggagaacaaggtcatatggctttgttgggacatagtctgggagcttatatttcaactctggacaaagagaagctgagaaaacttacaactaggatactttcagataccaccttatggctatgcagaattttcagatatgaaaatgggtgtgcttatttccacgaagaggaaagagaaggacttgcaaagatatgtaggcttgccattcattctcgatatgaagacttcgtagtggatggcttcaatgtgttatataacaagaagcctgtcatatatcttagtgctgctgctagacctggcctgggccaatacctttgtaatcagctcggcttgcccttcccctgcttgtgccgtgtaccctgtaacactgtgtttggatcccagcatcagatggatgttgccttcctggagaaactgattaaagatgatatagagcgaggaagactgcccctgttgcttgtcgcaaatgcaggaacggcagcagtaggacacacagacaagattgggagattgaaagaactctgtgagcagtatggcatatggcttcatgtggagggtgtgaatctggcaacattggctctgggttatgtctcctcatcagtgctggctgcagccaaatgtgatagcatgacgatgactcctggcccgtggctgggtttgccagctgttcctgcggtgacactgtataaacacgatgaccctgccttgactttagttgctggtcttacatcaaataagcccacagacaaactccgtgccctgcctctgtggttatctttacaatacttgggacttgatgggtttgtggagaggatcaagcatgcctgtcaactgagtcaacggttgcaggaaagtttgaagaaagtgaattacatcaaaatcttggtggaagatgagctcagctccccagtggtggtgttcagatttttccaggaattaccaggctcagatccggtgtttaaagccgtcccagtgcccaacatgacaccttcaggagtcggccgggagaggcactcgtgtgacgcgctgaatcgctggctgggagaacagctgaagcagctggtgcctgcaagcggcctcacagtcatggatctggaagctgagggcacgtgtttgcggttcagccctttgatgaccgcagcaggtaaaccaggcttggtggacatcccttgcttttgttctggggctgctgggtagattagcttgcccttatgatactccattctcctagagttattagcagctctttttggaggggcattttcttttcttttgggctaaatttaggtagattagcattcccatgtaacttaccagaatcagaatgagaattcagaagtcacctgaattggccgggcatggtggctcacacctgtaatcccagcaccttgggaggccaaggcaggcagatcatctgaggtcaggagttcgagaccagcctggccaacatagtgaaatcccgcccctactaaaaatacaaaaaattagccaggcaccctgtccacagcccccacacagactcgaggggcccccatctcctgttctgaacccaacagggtggtcccactgtgggaccacaaccaggtatgactgtgtgagaagcaggctcactaccaggctaccagggagcacaggggagcaggcgccaccttgaggcataaacccagagaaacaagacctccaagacggccaggcactggggcacacgccggtaacacagcaccgtgggagctgagacggaaggatcgcctgagcccaggattttgaaaccaccctgggcaacacagtgagaccccgtatctacaaaaaaatacacattagccaggcatggcggcatgcgcctggggtcccaagtactcgggaggtagaggagagaaaaatcacttgagcccagagaggtcaaggctacagggagctgagatcgcatcactgtactccagctggggtgaaacggcgagactctacctcaaaaataaataaatacatacataattaataaataaaacatcaaagaccagccgacctaactccatctaaaatacacaacttctacgcaaaatataaataaaattagaaaacaaactacaatctcagaaaagcactagca

SEQ ID NO: 62183 - DNA, 1885 bp, Homo sapiens
  misc_feature (1)...(1885): n = a,t,c or g
tttcgtcccgccccgcgtgctggccgcggtaaaagtggtagcagcggaggcgagcggagggtttcccgcggcggagtctcactctgctgcctaggctgagtgcagtggtgtgatcgaggcgcactgcagccttgacctcctgggctcaagcgatcctcacctcggcctaccgagtagctgggactacaggcacgcgccactacactcggatttctgacagtcagacttgtccacaagaactcaactggcaaggctgcttttctgtgctaaaactggggagctagtgggcaccatgaagatcttctgcagtcgggccaatccgaccacggggtctgtggagtggctggaggaggatgaacactatgattaccaccaggagattgcaaggtcatcttatgcagatatgctacatgacaaagacagaaatgtaaaatactaccaaggtatccgggctgccgtgagcagggtgaaggacagaggacagaaggccttggttctcgacattggcactggcacgggactcttgtcaatgatggcggtcacagcaggtgccgacttctgctatgccatcgaggttttcaagcctatggctgatgctgctgtgaagattgtggagaaaaatggctttagtgataagattaaggttatcaacaagcattccaccgaggtgactgtaggtccagagggtgacatgccatgccgtgccaacatcctggtcacagagttgtttgacacagagctgatcggggagggggcgctgccctcctatgagcacgcacacaggcatctcgtggaggaaaattgtgaggccgtgccccacagagccaccgtctatgcacagctggtggagtccgggaggatgtggtcgtggaacaagctatttcccatccacgtgcagaccagcctcggagagcaggtcatcgtccctcccgttgacgtggagagctgccccggcgcaccctctgtctgtgacattcagctgaaccaggtgtcaccagccgactttacagtcctcagcgatgtgctgcccatgttcagcatagacttcagcaagcaagtcagtagctcagcagcctgccatagcaggcggtttgaacctctgacatctggccgagctcaggtggttctctcgtggtgggacattgaaatggaccctgaggggaagatcaagtgcaccatggcccccttctgggcacactcagacccagaggagatgcagtggcgggaccactggatgcagtgtgtgtacttcctgccacaagaggagcctgtggtgcagggctcagcgctctatctggtagcccaccacgatgactactgcgtatggtacagcctgcagaggaccagccctgaaaagaatgagagagtccgccagatgcgccccgtgtgtgactgccaggctcacctgctctggaaccggcctcggtttggagagatcaatgaccaggacagaactgatcgatacgtccaggctctgaggaccgtgctgaagccagacagcgtgtgcctgtgtgtcagcgatggcagcctgctctccgtgctggcccatcacctgggggtggagcaggtgtttacagtcgagagttcagcagcttctcacaaactgttgagaaaaatcttcaaggctaaccacttggaagataaaattaacatcatagagaaacggccggaattattaacaaatgaggacctacagggcagaaaggtctctctcctcctgggcgagccgttcttcactaccagcctgctgccgtggcacaacctctacttctggtacgtgcggaccgctgtggaccagcacctggggccaggtgccatggtgatgccccangcagcctcgctgcacgctgtggttgtggagttcaaggacctgtggcggatccgg

SEQ ID NO: 62184 - DNA, 606 bp, Homo sapiens
cgctccgcccgcccggccgtcccgtagccccgagccccgagccccccgcgccgggcccgggcggcagcggcggcggcggcggcggcggcgcgcccggccccctcccccggcgccggccacgggaggcggtgatgcgggcgcgggcggcctcggctgcgccgagagcggagacacaggctcaagatggcagattccgactgaggctgggggggccgagctcgcgcgccgctttcccgtccccgttgccatgaaccgcggacaccccggccccgatggcccccgtgtacgaaggtatggcctcacatgtgcaagttttctcccctcacacccttcaatcaagtgccttctgtagtgtgaagaaactgaaaatagagccgagttccaactgggacatgactgggtacggctcccacagcaaagtgtatagccagagcaagaacatccccctgtcgcagccagccaccacaaccgtcagcacctccttgccggtcccaaacccaagcctaccttacgagcagaccatcgtcttcccaggaagcaccgggcacatcgtggtcacctcagcaagcagcacttctgtcacccggcaagtcctcggcggaccac

SEQ ID NO: 62185 - DNA, 497 bp, Homo sapiens
ccggaattccgggtcgacgatttcgtgggtaatcccgggagcagcccggagaccagcatgaagaacatggagaaggaactgctgtgcccagtgtgtcaagagatgtacaagcagccactggtgctgccctgtacccacaacgtgtgccaggcctgtgcccgagaggtcttgggccagcagggctacataggacatggtggggaccccagctccgagcccacctctcctgcctccaccccttccacccgcagcccccgcctctcccgcagaactctccccaagccagaccgcctggaccggctgcttaagtcaggtgggactggggcctgtagggtggggatgggaacgctgagctattcatcaggaagatggaagaagtccatcactggtcagaggcatctgtctgtctttctggggggtggagatactgcttacgcaggctctaatgagagctgagctctggcacaatgaaaatctaatttaattaaacaggcttc

SEQ ID NO: 62186 - DNA, 807 bp, Homo sapiens
catcgattcgaattcggcacgagcctgccttctcgggccagtccagatcataccctgctgggcaaaggaggaagagccagaggatccagacgccttggaggacttggaacacctgtaacaggacaaggagttctgctcaggcacgtggccacagaaaactacttaggaagcctgtggtgagaacaacaacagtgcctgagaatcccacggctctggggaagtgagccccgaggatgaggctgctcgcctggctgattttcctggctaactggggaggtgccagggctgaaccagggaagttctggcacatcgctgacctgcaccttgaccctgactacaaggtatccaaagaccccttccaggtgtgcccatcagctggatcccagccagtgcccgacgcaggcccctggggtgactacctctgtgattctccctgggccctcatcaactcctccatctatgccatgaaggagattgagccagagccagacttcattctctggactggtgatgacacgcctcatgtgcccgatgagaaactgggagaggcagctgtactggaaattgtggaacgcctgaccaagctcatcagagaggtctttccagatactaaagtctatgctgctttgggaaatcatgattttcaccccaaaaaccagttcccagctggaagtaacaacatctacaatcagatagcagaactatggaaaccctggcttagtaatgagtccatcgctctcttcaaaaaaggtgccttctactgtgagaagctgccgggtcccagcggggctgggcgaattgtggtcc

SEQ ID NO: 62187 - DNA, 420 bp, Homo sapiens
tttcgtgtgggagcagggcgagacgggccattttcactctgtggtcaaaggaaatgactggtctgactcggtctgggagcggggcacccagggtctaaggataactctggggccatgacagccatgagtctcacagaggaccccgagacttctgtgctgcgagtaaccggacttgttctgagacctttgccctagaggatggccaaggggctcctggtgacctatgccctctgggctgtggggggccctgctgggctccaccacctgtacctgggaagggacagccacgccctgctctggatgctgaccctggggggaggtgggctgggctggctctgggagttctggaagctcccaagctttgtagctcaggccaacagagcccagggacagaggcagagccccagaggggtgacaccc

SEQ ID NO: 62188 - DNA, 450 bp, Homo sapiens
tttcgtcggagcctgcgcggggccggtaggatcgcgtcgggagccggtaccgaggcccgagccgcgggagtcgagcgaagacagcgccgaggccgcggtttccccctgggcctccccagcagcagccatgggcatcaaatttttagaagttatcaaaccattctgtgcagttctaccagaaattcagaaaccggaaaggaaaatccagtttagagagaaggttctgtggactgctataacgctcttcattttcttagtgtgttgtcagatcccactgtttggaatcatgtcatcagattctgcagatcctttctactggatgagagttattctggcttccaatagaggaactttaatggaattgggtatctccccaattgtaacatctggtttgattatgcagttgttagctggagccaaaatcattgaagttggagatacaccgaaaga

SEQ ID NO: 62189 - DNA, 924 bp, Homo sapiens
  misc_feature (1)...(924): n = a,t,c or g
tttcgtgtaagatataactcaactttgaaaatgtcagccgttatagttgaagaaatctgacccaagagacttcgctccgctgcaagatggaaggaagcttaagtaagacataaatttgtaatgaacttgctcacaacatccgccgccactgtgacttgcagtcatcatccattaccacaaaattagttgcaggatggctactcgtatccctccacacatgatcatcagtatttgcctcctgtgtcccaaccggcctgagtcaaggttacgactcactgattaaaaagagggactttttcaaatactttgcacttttgattgtgtattatggataccaaggaagagaagaaggaacggaaacaaagttattttgctcgactgaaaaagaaaaaacaagccaaacaaaatgcagagacagcctcagctgtagctacaaggactcatactgggaaggaagataataatacagtagttttagagccagacaagtgcaacattgctgtggaagaggaatatatgactgatgagaaaaaaaagagaaaaagtaatcagttaaaggagatcaggcgtacagaactaaagagatattatagtattgatgacaatcaaaacaaaacacatgataaaaaagagaagaagatggtggttcagaagccccatgggactatggaatacactgctggaaaccaggacaccctaaactccatagcactgaaatttaacatcactcccaataaattggtggaactgaataaacttttcacacatactattgttccaggccaggtcctttttgtgccagatgccaactctccttccagtaccttaaggctatcatcatccagtcctggtgctactgtctctccttcatcatnagatgcagaatatgntaattggctgatgctgacttagcacggaaggctt

SEQ ID NO: 62190 - DNA, 679 bp, Homo sapiens
tttcgtgctgtggcgcgcggccggcagagggaggggagaggccactggggccgtgttagtctgccggtggggactcttgcagggccgtccccatgttgcgttttccgacctgtttcccatccttccgggtggtgggagagaagcagctcccgcaggagattattttcctggtctggtcgcccaagcgggatctcattgctttggccaacacagctggcgaggttttacttcatcgactggcaagttttcatcgagtttggagttttccaccaaatgaaaatacaggaaaggaggtgacgtgtctggcatggagaccagatggcaaacttttggcctttgctcttgctgataccaagaaaattgttttgtgtgatgtagaaaaacctgagagcttacactctttttctgtggaggctccagtttcctgtatgcattggatggaagtgacagtagaaagcagtgttctcacatcattttataatgctgaggatgaatcaaatcttctcttacctaaactacctacactgccaaaaaactatagcaacacctcaaaaatatttagtgaagaaaattctgatgaaattattaagctcttgggagacgtcaggcttaatattctcgtccttggaggaagctctggatttattgagctttatgcttatggaatgtttaaaattgc

SEQ ID NO: 62191 - DNA, 429 bp, Homo sapiens
agctctggcagaggactgttccactagacacgctgaagggactgggtacgtgttttccttcaggaccagagctgagaggagctgggatcgcggcggcaatggaacgggcctcagaaaggcgcacggccagcgcgctttttgcggggttccgggccttgggacttttcagcaacgacattccacacgtggtgcggttcagcgcgctcaagcgccggttctatgtaacaacctgcgtgggcaagagtttccacacctatgacgttcagaaacttagtctggttgcagtaagtaattctgttccacaggatatctgctgtatggcagctgatggcagattagtctttgctgcttatggaaatgttttctctgcatttgcccgtaataaagagatagtacatacctttaagggtcataaggcagaaatccatc

SEQ ID NO: 62192 - DNA, 506 bp, Homo sapiens
cgcctgtgtttgctctcgggccctccctgacgcctggatctgggagctgccaccccgacgatcgacaagaccatgctggcaagtctgaaggtcaaaagcaggagctggccaacagctcggatgcgaccctcccagaccggccgctctcccctcctctcacggcacctcccaccatgaagtcgtcggagttctttgagatgctggagaaaatgcaggggatcaagcttgaagagcagaagccgggaccccagaagaacaaggacgactatatcccataccccagcatcgacgaggttgtggagaagggaggcccgtaccctcaggtcatcctgccacagtttgggggctattggatcgaggacccggagaacgtgggcaccccaacatcgctggggagcagcatctgtgaggaggaggaagaggacaacctcagccccaacacatttggctacaagctcgagtgcaagggtgaagccagggcctaccggaggcacttcctggggaag

SEQ ID NO: 62193 - DNA, 1078 bp, Homo sapiens
ttttttttttttatatttaaaacatttattttattatacatatttaaattttagaaagttattaggtagatgtacattcctctgttgctttactttgatcttcagttaccattttccgagatctttccaatagcttatcccatattgtaaaatgtgctcttaagtgaacaggtaaagacacaccctggaatcttcgtatgagacttggctgggtgggttgaagattgtgaactgctgacacttcatactggaaacaaatacttgttcttggaataagagggccctcactcacatcaatgaagtcacctattctgtgtagcttgactattctctcagggttctgagatgccttctcttctatgaaatctactttgtacttgctgtgttgaaatatttccaatgccacttttgcttcaacttccagagtttcaaatggaagatctttataaattaaagcatgagcatcctttgtgaaggaacgtaagttctcttttgttggcatccactcatcaagtttgctatccaaaactacgtcataacagaaggcaccagaaattacaggaacttctggagctctgaccaaattgaccatatattcatctttgaatgccctctctatcacacagcccatcatcatagcacaggaacgccaatatgccttattcacttctcctggatcacaatctttgaaagtaagaaatttaatttcacaggactttgttaaaggcttatacatgtcccaaggctgtccatccaccagagccagaatggacttcctgcaataccactcgcttaaatgcatggcacaactgtagggagttgaaatgtttttattcatcacgaagacagtaccggggtcagttttcccaacatgcttaacttctatcttctcagttcggggagttaatgataactgcctggctttctctttattaaagagatcattccgcatttctgtcaattctgtcggtgacagctgagaagctggcgatgttgctataaatctccatttgatcccgccaccgggtgcgaccagccagagccgcagcgcccgggaacccatggccagcgcctccat

SEQ ID NO: 62194 - DNA, 425 bp, Homo sapiens
ctgcgggcggaggagcggccatgccgccgcggcgcatcatcgtggaggtgaaggtgctagacgtgcagaagcggcgggtgcccaacaagcattatgtctacatcatccgggtcacgtggtccagcggctccaccgaggccatttaccggcgctacagcaagttttttgacctccagatgcagatgttggacaaatttcccatggaaggaggacagaaggaccccaagcagcggatcatcccctttctgccaggtaagattctcttcagacgaagccacatccgggacgtggctgtcaaacgcctgataccaattgatgaatactgtaaggccctcatccagctgcccccctacatctctcagtgtgatgaggtgctgcagttctttgagacaagacctgaggacctgaatccccccaaagaggag

SEQ ID NO: 62195 - DNA, 585 bp, Homo sapiens
cccacgcgtccggaagaagatggcggcccctgtagtggcgccgcctggtgtggtggttagtcgggctaacaagcgcagcggcgcggggccgggaggcagcggtggcgggggagccagaggggcggaggaggaaccgccgccgcccctacaagcagttctggtggccgatagcttcgatcgccgcttcttccccatctccaaggaccagcctcgggtcctcttgcccctggccaatgtggcattaattgactacactctggaattcctgactgccacaggtgtacaggaaacatttgtcttttgttgctggaaagctgctcaaatcaaagaacatttactgtaaggccctgcaacttttctttccatgtttcgccatctttttccagttttttcaggatgaatgtaactaaggggaaatgtgagaggggaaaaatgtgtctacttagatgtcattgtaagttctaagggtattttctacacttatcaggaggtgagcagctgaaactttgtatctgtctgtcttgggttttctgtgacaaagattaaagaataaacttgggttttttctgaatctcaaaaaaaaaa

SEQ ID NO: 62196 - DNA, 1014 bp, Homo sapiens
ccggaattcccgatcgacgatttgtagtcactgcgggcgaggaggctggggtcaccttagccggagccccctccttggcgggggcgtccggcaccacctcagtgaggccgcggcgcagggcagagagacgccacacagccaccagccgcagcaccaggatcatgattcatcagaaagtggcatgctgtcccgcctgggtgatttgctcttttacactattgctgaaggacaggaacgaatccctatccacaagttcaccactgcactaaaggccactggactgcagacatcagatcctcggctccgagactgcatgagcgagatgcaccgcgtggtccaagagtccagtagtggtggcctcttggaccgagatctcttccgaaagtgtgtgagcagcaacattgtgctcctgacccaggcattccgaaagaagtttgtcattcctgattttgaggagttcacgggccatgtggatcgcatctttgaggatgtcaaagagctcactggaggcaaagtggcagcctacatccctcagctggccaagtcaaacccagacctgtggggtgtctccctgtgcactgtggatggtcaacggcactctgtgggccacacaaagatccccttctgcctgcagtcctgtgtgaagcccctcacctatgccatctccataagcaccctaggcactgactacgtgcacaagtttgtgggcaaagagccaagtggcctgcgctacaacaagctctccctcaatgaggaaggaatcccccataaccccatggtcaatgctggtgccattgttgtcagctccctgatcaagatggactgtaacaaagcagagaagtttgattttgtgttgcagtatctcaacaaaatggctgggaatgaatacatgggtttcagcaatgccacattccagtcagagaaggaaacaggggatcggaattatgccatcggctattatctcaaggaaaagaagtgctttcctaagggggtggacatgatggctgcccttga

SEQ ID NO: 62197 - DNA, 492 bp, Homo sapiens
attggctgccggcgtgactttgaccgcttcccggtgcgttaccggcagctgaacccacccggcgccacgggactttgacgcgtgctctgcgcttgccatgagactcctgggagctgcagccgtcgcggctctggggcgcggaagggcccccgcctccctaggctggcagaggaagcaggttaattggaaggcctgccgatggtcttcatcaggggtgattcctaatgaaaaaatacgaaatattggaatctcagctcacattgattctgggaaaactacattaacagaacgagtcctttactacactggcagaattgcaaagatgcatgaggtgaaaggtaaagatggagttggtgctgtcatggattccatggaactagagagacaaagaggaatcactattcagtcagcagccacttacaccatgtggaaagatgtcaatattaacattatagatactcctgggcatgtggactttactatataaagtgc

SEQ ID NO: 62198 - DNA, 422 bp, Homo sapiens
tatttcgtgggagcccaggatggaggtggcggtcgcggcggcgggccgagccctgcggcgggcgggaggaggtgagcaccaggcccactgagcctctgcagagccaccagccatgcccgggatcgtggtgttccggcggcgctggtctgtgggcagtgatgacctcgtcctaccggccatcttcctctttctcctgcataccacctggtttgtgatcctgtccgtggtgctcttcggcctggtctataacccgcacgaggcctgctccctgaacctggtggaccacggccgcggctacctgggcatcctgctgagctgcatgatcgctgagatggccatcatctggctgagcatgcgcgggggcatcctctacacggagccccgtgactccatgcagtacgtgctctacgtgcgcctggcca

SEQ ID NO: 62199 - DNA, 443 bp, Homo sapiens
accggattccggtcgacgatttcgtcggaagcaggaagtgagtttgcgaacggagctgctgctgcagggcccatggcggacacccagtacatcctgcccaatgacatcggcgtgtctagcctggactgccgtgaggccttccgcctgctgtcacccacagagcgcctctatgcctaccacctgtcccgtgccgcctggtacggaggcctggctgtgctgcttcagacctcccctgaggccccctacatctatgctctgctcagccgcctcttccgcgcccaggaccccgaccagctgcgccaacatgccctggctgaaggccttaccgaggaggagtatcaggcgttcctggtctatgccgcgggtgtttactccaacatgggcaactacaagtcctttggtgacaccaagtttgttcccaacttgcccaaggaaaagctggc

SEQ ID NO: 62200 - DNA, 696 bp, Homo sapiens
tttcgtgaagtgcggcacccagaggcggtcttgtagctgggccagcctggggcttggttgtatgtccctgcgggtcggtgcgagggcgaagaggaacccgtgggcccgggggatcccggggggccggaccagtgttccccagttgtgggagcagacgcgtgggcgcatcgcgggcgggcagggcctgaagtgcagctatgtttccagtgttctctggctgtttccaagagctacaagaaaagaataaatctctggagttggtgtcctttgaggaggtagctgtgcacttcacctgggaggagtggcaggacctggatgacgctcagaggaccctgtacagggacgtgatgctggagacctacagcagcctggtatcattggggcattgcattaccaaacctgagatgatcttcaagctagagcaaggagcagagccatggatagtagaagaaaccctaaacctgagactttcaggtggaagcaagaagcaagttttctcaggtatttgccacaggagcctggtggagctccaagaggttcatttggtctgatggattcatgtaccattgaaattctgatagtttcaaaatcttttatctccaggtttgagctctcttgtgaactctggaactgtattcccaactgtcaattggacatccctacgcatgggacctcagatatttcacacatgatgtg

SEQ ID NO: 62201 - DNA, 549 bp, Homo sapiens
tttcgtcccaggccgccgcgctgccgcccggcctccccgtcagcgcgccaccatgggcagtccccggtttccccttgtaaagatggcggtgagggatcgctgcaacctttagactaatgactgtccgaaacatcgcctccatctgtaatatgggcaccaatgcctctgctctggaaaaagacattggtccagagcagtttccaatcaatgaacactatttcggattggtcaattttggaaacacatgctactgtaactccgtgcttcaggcattgtacttctgccgtccattccgggagaatgtgttggcatacaaggcccagcaaaagaagaaggaaaacttgctgacgtgcctggcggaccttttccacagcattgccacacagaaaaagaaggttggcgtcatcccaccaaagaagttcatttcaaggctgagaaaagagaatgatctctttgataactacatgcagcaggatgctcatgaatttttaaattatttgctaaacactattgcggacatccttcaggaggagaaaaaacaggaaaaac

SEQ ID NO: 62202 - DNA, 769 bp, Homo sapiens
ccgggaaagatggcggcgtctgtggtttgaattccagcggcgccgccagagtctgaacaagagctggggtggagggggcggggacctggggagcccggcgggtcgctatcgcggggggtactagtggcgccgccgccacagacaccaacgccgtcgccacctctgtatccatgatggacttggtgttggaagaggacgtcaccgtccctgggacgctcagcggctgcagtggccttgttcccagtgtaccagatgacctggatggcatcaaccccaatgctgggttgggaaatggtctgctcccaaatgtgtcagaagaaacagtgtctcccaccagagcacggaacatgaaggactttgaaaatcaaatcactgaattgaagaaagaaaactttaacctaaagctccgcatctatttccttgaggaaagaatgcaacaggaatttcatggccccactgaacatatctacaaaactaacattgagctcaaggtggaagtagaaagtctgaagcgggaactccaggagagagagcagctgctcatcaaagcctcgtgagtaccatcatccgttgaaagcttgcaagtcgcccacactgggttggtcagtgaaatagagccgtacacttttctaagacagttggtttccatctggactctgaggactgcaaggagggttttgtttttacttaattatttacttttcaacaagcttttaagatataccatgcttatagaaaaatgaacagatcttaagtgtacagcgtgaat

SEQ ID NO: 62203 - DNA, 413 bp, Homo sapiens
tttcgtgttcaccttcaggctgagtcgagactgaggtgaaaaagcggaaaaacgcgagaaaaggtttccccgttgtacagaggctagagtgaggctcggctgaatcggttgcaggcgttggtgcctctgtcagcgtccaggtcactgccgctcccgccccgctcttccctggctgtgctggcggaggctgcgccgatgaacctgactgagggttcatagcagtggcagcaatgcttatggatgctggacaggattatatggtttttgaggacgtggccatacatttctcccaggaggagtggggaattcttaatgacgttcagagacacctgcacagcgatgtgatgctggagaactttgcacttttgtcctcagtaggttgttggcatggagccaaggatgaggaggcacct

SEQ ID NO: 62204 - DNA, 525 bp, Homo sapiens
tttcgtggaataatggaactcttaagtgagaagtcgaaatagcaaacaccgctggctgccaacagcacactgtgccattaacctttcatatgaagtcattggaagataactgaattatatttccttgggcggatttttttttaagaagagtgatttcttctgacttgagcctgcagtgtgctgtgagagatctaccactagattatctcaactttggtctcctgggaccactcgttgctgacagtcagaaactgaattcttgccgccaggatggggaaacagaacagcaagctgcgcccggaggtcatgcaggacttgctggaaagcacagactttacagagcatgagatccaggaatggtataaaggcttcttgagagactgccccagtggacatttgtcaatggaagagtttaagaaaatatatgggaactttttcccttatggggatgcttccaaatttgcagagcatgtcttccgcaccttcgatgcaaatggagatgggacaatagactttagagaattc

SEQ ID NO: 62205 - DNA, 437 bp, Homo sapiens
tgtcgtgcaatatggcggaggcggaaggggaaagcctggagtcctggctcaataaagccaccaatccttccaaccgccaggaggactgggaatacataattggcttctgtgatcagatcaacaaggagctggaagggccacagatcgccgtccgactgctggcccacaagatccagtccccacaggaatgggaggcgctccaggccctgacggtgctggaggcatgcatgaagaactgtgggaggagatttcataacgaagtggggaagttccgctttttgaatgagttaatcaaagtcgtctctccaaagtacctgggggacagggtgtctgagaaagtgaagaccaaggttattgagctgctgtacagctggaccatggccctgccagaagaagcaaagatcaaagacgcctaccacatgctgaagagacaggct

SEQ ID NO: 62206 - DNA, 1317 bp, Homo sapiens
gggtcagtaggaagccgcggggtggtggcgagagaggacccaggtgtcctggcagtgggcgccgcggggcacacgctgggccaaggtgcaggcggccagggtgggagactgttcgccccgccctgagtactcctatcttgtttctccacctgttcgggagttggagatgtgcacctaaaggaggcgcatctggggacggacacatctggcactgaggccctcgccacctgcctcgccacctggcgaccctgaccccaccacactgccttgagagtcgctcaaaagtagggccccagggctcgcagcagcatgggcaccgagaaagaaagcccagagcccgactgccagaaacagttccaggctgcagtgagcgtcatccagaacctgcccaagaacggttcttaccgcccctcctatgaagagatgctgcgattctacagttactacaagcaggccaccatggggccctgcctggtcccccggcccgggttctgggaccccattggacgatataagtgggacgcctggaacagtctgggcaagatgagcagggaggaggccatgtctgcctacatcactgaaatgaaactggtggcacagaaggtgatcgacacagtgcccctgggtgaggtggcagaggacatgtttggttacttcgagcccctgtaccaggtgatccctgacatgccgaggcccccagagaccttcctgagaagggtcacaggttggaaagagcaggttgtgaatggagatgttggggctgtttcagagcctccctgcctccccaaggaaccggcacccccaagcccagagtcccattcacccagggacctggactccgaggttttctgtgattccctggagcagctggagcctgagctggtttggacagagcagcgggcagcatctggaggaaagcgtgatcccaggaacagccccgtgccccccacaaagaaagaggggttgcggggcagcccgccggggccccaggagttggacgtgtggctgctggggacagttcgagcactacaggagagcatgcaggaggtgcaggcgagggtgcagagcctggagagcatgccccggccccctgagcagaggccgcagcccaggcccagtgctcggccatggccccttgggctcccggggcccgcgctgctcttcttcctcctgtggcccttcgtcgtccagtggctcttccgaatgtttcggacccaaaagaggtgactgtcagtggaggggtctctgcagccaactgagactatcttgctgtgccctgagccttcctagggtttagaagaacagcattcaaaattc

SEQ ID NO: 62207 - DNA, 601 bp, Homo sapiens
cgacgctgtcgtcgcgcgggtgtgagcgtgtgtccgagcgcgagtttgtgtgcgtttggcgggcgggcactgcagcttgttcctccgtggagcggagagcgagacagagctacagcgaacgagagagcggcgaaggcgggtagaggggcgcgggcgaggcggcgcaaccatccccggaccaggggccgcgccgccaccatgctaaacaacctgacggactgcgaggacggcgatgggggagccaacccgggtgatggcaaccccaaggaaagcagtcccttcatcaacagcaccgacacagagaagggaaaggagtatgatggcaagaacatggccttgtttgaggaggagatggacaccagccctatggtgtcctccttgctcagtggcctggccaactacaccaacctgccccagggaagtagggagcatgaagaggcagaaaacaatgagggtggaaaaaagaagccggtgcaggccccacgcatgggcaccttcatgggcgtgtacctgccgtgcctgcagaacatctttggcgtcatcctcttactgcggctcacctgggtggtaggcattgcaggcatcatggagtccttctgca

SEQ ID NO: 62208 - DNA, 878 bp, Homo sapiens
gcgcggggccctgcggtagcctcaggcccctcccctggacccgccgcagagccagtgcagaatacagaaactgcagccatgaccacgcacgtcaccctggaagatgccctgtccaacgtggacctgcttgaagagcttcccctccccgaccagcagccatgtatcgagcctccaccttcctccatcatgtaccaggctaactttgacacaaactttgaggacaggaatgcatttgtcacgggcattgcaaggtacattgagcaggctacagtccactccagcatgaatgagatgctggaggaaggacatgagtatgcggtcatgctgtacacctggcgcagctgttcccgggccattccccaggtgaaatgcaacgagcagcccaaccgagtagagatctatgagaagacagtagaggtgctggagccggaggtcaccaagctcatgaagttcatgtattttcagcgcaaggccatcgagcggttctgcagcgaggtgaagcggctgtgccatgccgagcgcaggaaggactttgtctctgaggcctacctcctgacccttggcaagttcatcaacatgtttgctgtcctggatgagctaaagaacatgaagtgcagcgtcaagaatgaccactctgcctacaagagggcagcacagttcctgcggaagatggcagatccccagtctatccaggagtcgcagaacctttccatgttcctggccaaccacaacaggatcacccaggtgagggcagactccttgttaggcctggcctgatgtctcggggttataggcaggcgtgtagaggttgggtggaccacgagcccaagcagacaagctcagtctgcagcttccatctccactgccctacttgagag

SEQ ID NO: 62209 - DNA, 445 bp, Homo sapiens
tttcgtgccgccgggagggagggcgggcggcgcgagtgggcgcgggcccggtgggccaggctccagggagcagtgtcagggccagggagacgatggtctccgtgactatggccacttccgagtggatccagttctttaaggaagccggcattcctccaggacctgccgtcaattatgccgtgatgtttgtggataataggattcagaagagcatgctgctggatctcaataaggagataatgaatgagctgggcgtgaccgtggtgggtgacatcatcgccattctcaagcatgccaaagtggtgcaccgtcaggacatgtgcaaagctgccactgagtcagtaccctgcagccctagcccccttgcaggcgaaattcgccgtggcaccagtgctgcctcccgaatgatcaccaacagcctgaaccatgactctccacccagcac

SEQ ID NO: 62210 - DNA, 633 bp, Homo sapiens
tttcgtgccgtccccctgctggggacagcagttgggtccagcagagagctggctgggggcttgacaggagtttatcctaactgatgctgggtgggcgcaggccctgagatgggcgtcagggagaggggacgccagacacacggcctgagcagggtgaggagcagctgccagccccggcaggcccaggccctgtctgggtgcacaggacagagacacagcaagatgcccagggagtgccgcttcctgggctagagacaagcaccagcctgcagtggagaacgcaggaccccgctgcccagaaggagcagccacggcctgcggaggactggcccagcaaggtcccaggtcttccctctcctcagcgcctaagagggaggcccagtgcgggtgaggagtcgcgaggaagaggcggaaggcgccggaaggcaccatgttccgcaagaaaaagaagaaacgccctgagatctcagcgccacagaacttccagcaccgtgtccacacctccttcgaccccaaagaaggcaagtttgtgggcctccccccacaatggcagaacatcctggacacactgcggcgccccaagcccgtggtggacccttcgcgaatcacacgggtgcagctccagcccatgaa

SEQ ID NO: 62211 - DNA, 821 bp, Homo sapiens
  misc_feature (1)...(821): n = a,t,c or g
ctttcatactgcctcctcccttgtttttctgtctcagagagatagtctgtcctaaatatcccatgtagcccaggccactgaattaaaacggagcgtattcgttctctgccccaccccgcaactcctgaaagcggcgcaactcaattacttgatccttatatgccccacgcgggactcatactacgtttcccgtgaacacgtgcagtccaaaccccgcccctgatatttatctcagtggacggtggccggaaaaggacaatggtttccatgtcagcggataaacgctctcccctcggctcccggacgcgacggaggtcgtagtagtagtgagtacgtgctgaggagcaaaggagtaaccaagagatccagtgaccgacagagcaagagccatgccgcgccggggcctggtggctgggccagacttggagtattttcagcgtcactatttcacgccggcggaggtggcccaacataacaggcccgaagacctctgggtatcttacctgggacgcgtgtacgacctaacgtcattggcacaggaatacaaggggaacctgctgctgaaacccatcgtggaagttgcaggccaggatatcagccactggtttgatccaaagaccagagacgtgagttatgctggaacctgggattgtgggtagaggaaatggagagcggggatgggaaggaaaggcggaggctagccagagcctaatggctgctctgacaccctcgccccaaaccctcctttaaagatccgcaagcacgaattccaccacatggnataagggtcgtcaatgnnnnnnnaaggggnatcaancccc

SEQ ID NO: 62212 - DNA, 562 bp, Homo sapiens
  misc_feature (1)...(562): n = a,t,c or g
tttcgtgcgaaggcgggcggcagaggcgatcagaagtttccaagggtcacttgtgtctcgtccgtgggaagaccgggggagcccagaaggccttggtgtggaattctgagagctgattcctgccttgtcttctccactgttcctggaggaatccgagaagagcagagcggagggagccccagacacggtccgcgggagagctgtggggcttggtgagtgtttcgtggcctctcgggttggtcagcacccccagccagctggcccaggacccctctacagaagtccaggagagcaggcgtcaccaagatgtccaaccccttcctgaagcaagtcttcaacaaggacaagacattccgccccaagcgcaagtttgagccaggcacccagcgcttcgagctgcacaagaaggcgcaggcgtcgctgaacgccgggctggacctgcggctggccgtgcagttgcccccgggcgaggacctgaacgactgggtggctgttcacgtggtggacttctttaaccgcgtcaacctcatctacggcaccatcancgacggctgcacgaaca

SEQ ID NO: 62213 - DNA, 954 bp, Homo sapiens
ccggaactcccgggtcgacgatttcgtgccgggggcagctgtctgtctggctccttttgacagcccccagtgcgaaaggctgccagcatgtcatcagtgagccccatccagatccccagtcgcctcccgctgctgctcacccacgagggcgtcctgctgcccggctccaccatgcgcaccagcgtggactcggcccgcaacctgcagctggtgcggagccgccttctgaagggcacgtcgctgcaaagcaccatcctgggcgtcatccccaacacgcctgaccccgccagcgacgcgcaggacctgccgccgctgcacaggattggcacagctgcactggccgttcaggttgtgggcagtaactggcccaagccccactacactctgttgattacaggcctatgccgtttccagattgtacaggtcttaaaagagaagccatatcccattgctgaagtggagcagttggaccgacttgaggagtttcccaacacctgtaaaatgagggaggagctaggagaactatcagagcagttttacaaatatgcagtacaattggttgaaatgttggatatgtctgtccctgcagttgctaaattgagacgtcttttagatagtcttccaagggaagctttaccagacatcttgacatcaattatccgaacaagcaacaaagggaaactccagattttagatgctgtgagcctagaggagcggttcaagatgactataccactgcttgtcagacaaattgaaggcctgaaattgcttcaaaaaaccagaaaacccaagcaagatgatgataagagggttatagcaatacgccctattaggagaattacacatatctcaggtactttagaagatgaagatgaagatgaagataatgatgacattgtcatgctagagaaaaaaatacgaacatctagtatgccagagcaggcccattgtatt

SEQ ID NO: 62214 - DNA, 723 bp, Homo sapiens
tttcgtggaccagctctgctccttgcaccccgctccctgcctggacacaggctcactcgctgccttcttctgggggaaaccagcttcttgccagccacagctgctgcctccgccactggccaccgcccctgtcctgggagtcccttggcccagacacccacctgacttagtggctcctctgcaggaaaggtggctgccccctgcgttcctccatccaaccatgagctggtgcccatcaccactgagaatgcaccaaagaatgtagtggacaagggagaaggagcctcccggggtggaaacacacggaaaagcctcgaggacaacggctccaccagggtcaccccgagtgtccagccccacctccagcccatcagaaacatgagtgtgagccggaccatggaggacagctgtgagctggacctggtgtacgtcacagagaggatcatcgctgtctccttccccagcacagccaatgaggagaacttccggagcaacctccgtgaggtggcgcagatgctcaagtccaaacatggaggcaactacctgctgttcaacctctctgagcggagacctgacatcacgaagctccatgccaaggtactggaatttggctggcccgacctccacaccccagccctggagaagatctgcagcatctgtaaggccatggacacatggctcaatgcacaccctcacagatgtcgtgttctacacaacaaggga

SEQ ID NO: 62215 - DNA, 426 bp, Homo sapiens
tttcgtctgcagcaagatggcggcggtctcaatgttaggggtactgaggcagacgttgtggcggaaaagggcagtggctgtagctgccctttccgtttccagggttccgaccaggtaatagaattttcacacttttcttcaagcttcttgggtccctccatttttgcggagtctctgctggctgagttccggaggaggcctcggggaaggcgtcctctgttgacccttttctcgggagaggtcgggcggactagggactgtctgctatcaatgggcgttggccaggcgagtgagggcgtgagtgcgaggccggggaggaggacctgtggttttctggaagctttcgtattcggcttgtcgctgaaggagagggtccgtggaggttttgcctccgagctgcaagctgaaccttaaccctcagagaac

SEQ ID NO: 62216 - DNA, 819 bp, Homo sapiens
cccgctcgacgatttcgtgccgagagaccgcatcgtcggctcggaggctgaggggctgccgcagccgggagcccccctcgcctcgctcctcgctccgcttggtgtcatgtgattctctgagggagcagctgcgtgagtggagatgctttcagtggtggagaatggactggacccccaggctgccatcccggtcatcaagaagaagctggtgggatccgtgaaagccttgcaaaagcagtacgtgtccctggacatggtggtcactagtgaagacggagatgccaacaccatgtgcagcgccctggaggccgtatttatccatggcctgcacaccaagcacatccgagctgaggccggaggaaaaaggaagaaaagtgcccaccagaagcctctgccccagcctgtcttctggcccctcctgaaagctgtcacccccaaacacatcatctcagagttggagcacctgacgtttgtcaacatggatgtgggccgctgccgggcatggctgcggctggccctgaacaatggcctgatggagtgctacctgaagctgctgctgcaggagcaggcccgcttgcaactacagcggaaggaatctctggattccatttcccattcttcaggctctgaagacatcgaagtccatcactcgggccataagatacggaggaaccagaagccgactgcctcctccctcagcctggacacggccagttcatcccagctgtcctgcagcttaaactgtgatagctgcttactccaagagaatggctccaagagtccagaccatgtattgcggccgctcagaggatcaagctt

SEQ ID NO: 62217 - DNA, 758 bp, Homo sapiens
tttcgtggacagctggcgccggcagcagcggaccggcgggagacggcggcttgcgagctggctgtgctgcaggagctgcggcagccgccgtccttgcacctaaggaacctctgctgccagcccttcctcacttttggaaatggcgggtgaaattacagagaccggggaactctactcttcctacgttgggctggtgtacatgtttaacctcatcgtgggcacgggcgcactcaccatgcccaaggcattcgccactgccgggtggcttgtcagcctcgtcctgctggtgttcctgggcttcatgagcttcatgaccaccacctttgtgatagaggccatggctgcagccaacgcgcagctccactggaagaggatggagaacctcaaggaggaggaagatgacgactcctccacagcctcagacagcgatgttctcatccgggacaactacgagcgggcagagaagcggcccatcctgtctgtgcagagacgtggatctcccaacccgtttgaaatcacagaccgggtggaaatgggacaaatggcctccatgttcttcaataaagtgggggtcaacttgttctatttctgcatcatcgtttacctgtatggagacctcgccatctatgctgctgccgtgcccttctccctcatgcaggtgacctgcagcgccactggcaatgactcctgcggtgtggaagcagacaccaaatacaatgacactgaccggtgctgggggcccctgcgccgagtggacg

SEQ ID NO: 62218 - DNA, 1915 bp, Homo sapiens
agcggccgctcgcgatctagaactagttgaggaacctaccggtaccggccgcgcgctgttagtcgccggtgtggctgcacctcaccaatcccgtgcgccgcggctgggccgtcggagagtgcgtgtgcttctctcctgcacgcggtgcttgggctcggccaggcggggtccgccgccagggtttgaggatgggggagtagctacaggaagcgaccccgcgatggcaaggtatatttttgtggaatgaaaaggaagtattagaaatgagctgaagaccattcacagattaatatttttggggacagatttgtgatgcttgattcacccttgaagtaatgtagacagaagttctcaaatttgcatattacatcaactggaaccagcagtgaatcttaatgttcacttaaatcagaacttgcataagaaagagaatgggagtctggttaaataaagatgactatatcagagacttgaaaaggatcattctctgttttctgatagtgtatatggccattttagtgggcacagatcaggatttttacagtttacttggagtgtccaaaactgcaagcagtagagaaataagacaagctttcaagaaattggcattgaagttacatcctgataaaaacccgaataacccaaatgcacatggcaattttttaaaaataaatagagcatatgaagtactcaaagatgaagatctacggaaaaagtatgacaaatatggagaaaagggacttgaggataatcaaggtggccagtatgaaagctggaactattatcgttatgattttggtatttatgatgatgatcctgaaatcataacattggaaagaagagaatttgatgctgctgttaattctggagaactgtggtttgtaaatttttactccccaggctgttcacactgccatgatttagctcccacatggagagactttgctaaagaagtggatgggttacttcgaattggagctgttaactgtggtgatgatagaatgctttgccgaatgaaaggagtcaacagctatcccagcctcttcatttttcggtctggaatggccccagtgaaatatcatggagacagatcaaaggagagtttagtgagttttgcaatgcagcatgttagaagtacagtgacagaactttggacaggaaattttgtcaactccatacaaactgcttttgctgctggtattggctggctgatcactttttgttcaaaaggaggagattgtttgacttcacagacacgactcaggcttagtggcatgttgtttctcaactcattggatgctaaagaaatatatttggaagtaatacataatcttccagattttgaactactttcggcaaacacactagaggatcgtttggctcatcatcggtggctgttattttttcattttggaaaaaatgaaaattcaaatgatcctgagctgaaaaaactaaaaactctacttaaaaatgatcatattcaagttggcaggtttgactgttcctctgcaccagacatctgtagtaatctgtatgtttttcagccgtctctagcagtatttaaaggacaaggaaccaaagaatatgaaattcatcatggaaagaagattctatatgatatacttgcctttgccaaagaaagtgtgaattctcatgttaccacgcttggacctcaaaattttcctgccaatgacaaagaaccatggcttgttgatttctttgcccccgtaagttatttttatctgtcagattctaacattgtcagatcttctcctgttatggcaaaaagacattttctagataactttgaatcattagtacaaaaactgtgtcattccattatggccactaatgcatattgcttttaaatgagtgctaatgtaattactcctccagggtattgaagctagctctc

SEQ ID NO: 62219 - DNA, 760 bp, Homo sapiens
tttcgtagagtgttgagccgccatatctgctgctgccgccgcagttgcgaatgcagcatcggcgcttagctgcctccgcggtgcagctaaggttcgtgtcgctaccccttggcccttcgctcttgctgccttaaccccgccggcggagcccgctcttctggcctgttgagcccgctccctcactgccacacagcaagttccgagaccatggattcgggcagcagcagcagcgactcggcgcccgattgctgggaccaggtggacatggaatccccggggtcggccccgagcggggatggagtctcctctgcggtggccgaggcccagcgcgagcccctcagctcggctttcagccgtaagctcaacgtcaacgccaagcccttcgtgcctaacgtacacgccgcggagttcgtgccgtccttcctgcggggcccgactcagccgcccaccctcccggccggctccggcagcaacgatgaaacctgcaccggcgcgggataccctcaaggtaaaaggatgggacggggggcacctgtggaaccttcccgagaggaaccgttagtgtcgcttgaaggttccaattcagccgttaccatggaactttcagaacctgttgtagaaaatggagaggtggaaatggccctagaagaatcatgggagcacagtaaagaagtaagtgaagccgagcctgggggtggttcctcgggagattcagggcccccagaagaaagtggccaggaaatgatggaggaaaaaaaaa

SEQ ID NO: 62220 - DNA, 1069 bp, Homo sapiens
  misc_feature (1)...(1069): n = a,t,c or g
tttcgtgctggagtggccagctgggcctggagcaatgcgagcgggcccccagggagcgacagcggcgttggcgcagcggccgaaggagccccggccgggaagtgtggatgcgtctctcccgaggccgggccgcctcgcccgctctagtccagcggagcccgagcgcctcggaccaatccccagtgattatgcaagacagcggaccaatcagctccgccagctcatgaatatttatgaccttcgctgagtcaaagctttgaaccgagtttggggagctcagcagcatcatgcttagacttttcaaagagacaaactccattttcttatgaatggaaagtgaaaacccctgttccgcttaaattgggttccttcctgtcctgagaaacatagagacccccaaaagggaagcagaggagagaaagtcccacacccagaccccgcgagaagagatgaccatgaccaccatgccagaaagtctcaacagccccgtgtcgggcaaggcggtgtttatggagtttgggccgcccaaccagcaaatgtctccttctcccatgtcccacgggcactactccatgcactgtttacactcggcgggccattcgcagcccgacggcgcctacagctcagcctcgtccttctcccgaccgctgggctacccctacgtcaactcggtcagcagccacgcatccagcccctacatcagttcggtgcagtcctacccgggcagcgccagcctcgcccagagccgcctggaggacccaggggcggactcggagaagagcacggtggtggaaggcggtgaagtgcgcttcaatggcaagggaaaaaagatccgtaaacccaggacgatttattccagtttgcagttgcaggctttgaaccggaggttccagcaaactcagtacctagctctgccggagagggcggagctcgcggcctctttgggactcacacagactcaggtcaagatctggttccaaaacaagcgatccaagttcaagaagctgatgaagcanggtggggcggctctggagggtagtgcgttggccaacggtcgggccctgtctgt

SEQ ID NO: 62221 - DNA, 480 bp, Homo sapiens
ccggattccgggtcgacgatttcgtgcggcttttgtgttgggcagcgcgaatgtggcgagctcggtgcgtctccgctgctccttccccttatccctgggaggtccaagtggtcccgcggcagcttctgttgctctgggacctgcaggtcccggaaggtccttagggaggaccccagacaccggagactgggaaatggattcagtgtcatttgaagatgtggctgtggcctttactcaggaggagtgggctttgctggatccttctcaaaagaatctctacagagatgtgatgcaagaaatcttcaggaacctggcttctgtaggaaacaaatcagaagaccagaatatccaagatgacttcaaaaatcctgggagaaatctaagcagtcatgtggtagagagactgtttgaaattaaagaaggcagtcaatatggagaaaccttcagccaggattcaaatttgaatctgaataagatagt

SEQ ID NO: 62222 - DNA, 467 bp, Homo sapiens
cgtaatctctcagcctttctgtgtctcctttcctccgcctcagtttggggcgggtcgggggaatggctgaggagatggagtcgtcgctcgaggcaagcttttcgtccagcggggcagtgtcaggggcctcagggtttttgcctcctgcccgctcccgcatcttcaagataatcgtgatcggcgactccaatgtgggcaagacatgcctgacctaccgcttctgcgctggccgcttccccgaccgcaccgaggccacgataggggtggatttccgagaacgagcggtggagattgatggggagcgcatcaagatccagctatgggacacagcaggacaagaacgattcagaaagagcatggttcagcactactacagaaatgtacatgctgttgtcttcgtgtatgatatgaccaacatggctagttttcatagcctaccatcttggatagaagaatgcaaacaacat

SEQ ID NO: 62223 - DNA, 628 bp, Homo sapiens
attttattgggtgaccaaagctggccccgcgggtgcctggcctgtgggcagccggaccgacacgatgtggcggctccgctgcaaggccaaggacggcacccatgttttgcaggggctgtccagccggacccgggtgcgggaactccagggccaaattgccgccatcaccgggatcgcccccggcggtcagcgaatcctcgtcggataccctcccgagtgcctggatctcagcaatggggataccattctggaagacttgcccatccaatctggtgacatgctgatcattgaagaagaccaaaccaggcccagaagttcacctgcatttactaaacgtggtgcttctagttacgtcagggaaactttgcctgtgcttaccagaaccgtggtcccagcagacaactcttgcctctttactagtgtgtactatgtcgtcgaaggaggagtcttgaatccagcttgtgcccctgagatgagacgcctcatagcacaaattgtagcaagcgatccagacttctatagtgaggcaatactgggaaaaacaaatcaagagtactgtgactggatcaaaagggatgacacttggggaggagcaatagagatatcgattttgtccaagttttaccat

SEQ ID NO: 62224 - DNA, 436 bp, Homo sapiens
atcgtgttcggcgctgcgggctcggtgcgaggacgcgacggggaggctttgcaaaggccgcgagcgggggtcaccgtcggccgcgccagggacagcaacatggctgacaaggccaagcctgccaaagctgccaacaggacgccccccaagtccccgggggacccctcgaaggactgggcagccaagaagctgtcgctggagttggaggacatgtgcaccgagtggtgtggacggccgtctcgcggggctgtggtgctggtcagacctcggtcagggctccttgggagcagcgggactcgagccacgttcctgaaaagctgccgagaggcctttaaggccaaacctcactagcatcaggaagggttcacatcccgagctcagtcttcagcaaagaccagagtgctggcccaccctgctccttgaatctggaaagcac

SEQ ID NO: 62225 - DNA, 490 bp, Homo sapiens
tggcaccgatccgagattcccggatcgacgatttcgtcggagccccgaggggccggagctcctggcggtgccggatcctgacggcggccttcccccgggtcgattgtgatcatggctgctgagtctgatgttctgcatttccagtttgaacagcaaggagatgtggtcttgcagaaaatgaatcttttgagacagcagaatttattttgtgatgtatcaatttacattaatgacactgagttccaggggcacaaggtgattttggctgcttgctccacttttatgagagatcagtttttactcacacagtcaaaacatgtcagaatcaccatcttacagagtgcagaagttggcagaaaattgttactgtcttgctatactggagcacttgaagttaaaaggaaagagcttttgaaatacttgactgctgccagttaccttcagatggttcacattgcggaaaagcgcacagaagcttttgtcaagttct

SEQ ID NO: 62226 - DNA, 621 bp, Homo sapiens
gagtggacgatttcgtgcggagagcgaggccgagacccccagcaccccgggggagttcgagagcaagtacttcgagttccatggcgtgcggctgccgcccttctgccgcgggaagatggaggagatcgccaacttcccggtgcggcccagcgacgtgtggatcgtcacctaccccaagtccggcaccagcttgctgcaggaggtggtctacttggtgagccagggcgctgaccccgatgagatcggcttgatgaacatcgacgagcagctcccggtcctggagtacccacagccgggcctggacatcatcaaggaactgacctctccccgcctcatcaagagccacctgccctaccgctttctgccctctgacctccacaatggagactccaaggtcatctatatggctcgcaaccccaaggatctggtggtgtcttattatcagttccaccgctctctgcggaccatgagctaccgaggcacctttcaagaattctgccggaggtttatgaatgataagctgggctacggctcctggtttgagcacgtgcaggagttctgggagcaccgcatggactcgaacgtgctttttctcaagtatgaagacatgcatcgggacct

SEQ ID NO: 62227 - DNA, 866 bp, Homo sapiens
gccgcatctgcatcagccgccgcagccgctgcggggccgcgaacaaagaggaggagccgaggcgcgagagcaaagtctgaaatggatgttacatgagtcattttaagggatgcacacaactatgaacatttctgaagattttttctcagtaaagtagataaagatggatgaatcagccttgttggatcttttggagtgtccggtgtgtctagagcgccttgatgcttctgcgaaggtcttgccttgccagcatacgttttgcaagcgatgtttgctggggatcgtaggttctcgaaatgaactcagatgtcccgagtgcaggactcttgttggctcgggtgtcgaggagcttcccagtaacatcttgctggtcagacttctggatggcatcaaacagaggccttggaaacctggtcctggtgggggaagtgggaccaactgcacaaatgcattaaggtctcagagcagcactgtggctaattgtagctcaaaagatctgcagagctcccagggcggacagcagcctcgggtgcaatcctggagccccccagtgaggggtatacctcagttaccatgtgccaaagcattatacaactatgaaggaaaagagcctggagaccttaaattcagcaaaggtgacatcatcattttgcgaagacaagtggatgaaaattggtaccatggggaagtcaatggaatccatggctttttccccaccaactttgtgcagattattaaaccgttacctcagcccccacctcagtgcaaagcactttatgactttgaagggaaagacaaggaagcagacaaagattgccttccatttgcaaaggatgatgttctgactgtgatccgaagagtggatg

SEQ ID NO: 62228 - DNA, 1061 bp, Homo sapiens
tgccctgactacacagtgataagaggtgtcttttttgtttattattaaagaaatgacgtattgggacagaagtctaggagaaactgataaaacattaattgaaatgaaaatgccaagaaaataaaggtctgtgaatagtaggcacgtgagaggatatattaaggctgcattattatgtttgcttttaccagtgaatgaattatgagcttaatttcaaacgtgaaatgcctaacataaaaagtcttggattgacaaatctgaactttctgttaaaaagattaagttctgtacttcctttaattacagattatgtctactttgagaattcctccagcaacccatacctaataagaaggatagaagaactcaacaagactgcaagtggcaacgtggaagcaaaagtagtatgcttttatagacgacgtgatatttccaacacacttataatgctcgcagataagcatgctaaagaaattgaggaagaatctgaaacaacagttgaggctgacttgaccgataagcagaaacatcagttgaaacatagggaactctttttgtcacgccagtatgaatctctgcccgcaacacatatcaggggaaagtgcagtgttgcccttctgaatgagacagaatcagtattgtcatatcttgataaggaggataccttcttctactcattggtctatgacccctcattgaaaacactattagctgacaaaggtgaaatcagagtgggacctagatatcaagcagacattccagaaatgctgttagaaggtacgtttttctgcgtgtttgcagttttgtgaaacaaatatatcttgaaactcaaatatacatgtcctcatgtagaaaaggcaatgttcagggcaaagtctaaaagttataagcacttgccattttactgttctttgtaaaaaataaaaaataaataaataaatagagatgaggcctcgctatgttgccaaggctggtcttgatctcctggcctcaaacaatcctcccacctcggactcccaaaagtgatgctattataggtgtggcctggccagcactttcat

SEQ ID NO: 62229 - DNA, 919 bp, Homo sapiens
ccccctgggtatccacatgacccacttcccggaagcgcagcagacccgctcaacttcatcctgggttgaggcggaggagaacttccagaattatggcgaagtccgggctgaggcaggacccgcagagcacagctgcagccactgtgctaaagcgggcagtagaactagattcggagtcgcggtatccgcaggctctggtgtgttaccaagaggggattgatctgctcctgcaggttctgaaaggtaccaaagataatactaagagatgtaatctcagagaaaaaatttccaaatacatggacagagcggaaaacataaagaagtacttggaccaagaaaaagaagatggaaaatatcacaagcaaattaaaatagaagagaatgcaacaggtttcagttatgagtcactttttcgcgaataccttaatgagacagttacagaagtttggatagaagatccttatattagacatactcatcagctgtataactttcttcgattttgtgagatgcttattaagagaccatgtaaagtaaaaactattcaccttctcacctctctggatgaaggcattgagcaagtgcagcaaagtagaggcctgcaagaaatagaagagtcactcaggagtcacggagtgctgttggaagttcaatactcttcttcaatacatgaccgagaaattaggttcaacaatggatggatgattaagattggaaggggacttgattattttaagaaaccacagacaggatataatcttatgagtaaatgtgtagcactgtttttgtatcatttttaatgatactcttttcttctcttcttagagaacgttttcccttggatattgtgattttgatttaagaccatgtcatgaaacaacagtagacatttttcataagaagcatacaaaaaatatat

SEQ ID NO: 62230 - DNA, 718 bp, Homo sapiens
cattgcttgaggttgcccaggtagtttcgccttacacttcttgtcccagtgcaattattagtagagctccctttcactgtcaaatttccggttggggataaattgcattgtcgttttggtttgagataggaagatgaggggaggaaggaggtgaggcggtaaggggcgttctctctcttgggtcccgcgcccaacttccgctggcccaaagaaactataattttgaaccaacagacctctgctggcatctgcgattgcatttttcctgttttaacaacggctgtgctagacgaagtggtgaagcccaaagacttatttttgagctcgctgtaagactgagaaatcacgtagtccttcctgaaaccactaagaggaaaaatgtctgtgacactgcatacagatgtaggtgatattaaaattgaagtcttctgtgagaggacacccaaaacatgtgagaatttcttggctctttgtgccagtaattactacaatggctgtatatttcataggaatatcaagggtttcatggttcaaacaggagatccaacaggaactggaagaggaggcaacagtatttggggcaagaagtttgaggatgaatacagtgaatatcttaagcacaatgttagaggtgttgtatctatggctaataatggcccgaacaccaatggatctcagttcttcatcacctatggcaaacagccacatttggacatga

SEQ ID NO: 62231 - DNA, 428 bp, Homo sapiens
tttcgtgctagaggcgactcgggggattctagggcgacggcgctgccgccattttgtggggtgtttgtcgcagcggccgaggagggaagacggcagtttggcgacatttctcggccgaggggccatttgcttttgcggagatgcggcattccaaaagaactcactgtcctgattgggatagcagagaaagctggggacatgaaagctatcgtggaagtcacaagcggaagaggagatctcatagtagcacacaagagaacaggcattgtaaaccacatcaccagtttaaagaatctgattgtcattatttagaagcaaggtccttgaatgagcgagattatcgggaccggagatacgttgacgaatacaggaatgactactgtgaaggatatgttcctagacattatcacagagacattggaagcggg

SEQ ID NO: 62232 - DNA, 1058 bp, Homo sapiens
gcctccgatggctccggattcgttactggcgagccatggcgctggggctggggcgcgcaaggccgggcctttcctgtggagtcatctcaccgccgtgcgcacccactcgtaactcgcacccgggtcctggctgcaccgcatcccctcctgcaccccctggatggcccttcagccaacgggggcctgggcgatggtcgaccacggagctgcgcaaggaaaagtcccgggatgcggcccgcagccggcgcagccaggagaccgaggtgctgtaccagctggctcacacgctgcccttcgcccgcggcgtcagcgcccacctggacaaggcctctatcatgcgcctcaccatcagctacctgcgcatgcaccgcctctgcgccgcaggggagtggaaccaggtgggagcagggggagaaccactggatgcctgctacctgaaggccctggagggcttcgtcatggtgctcaccgccgagggagacatggcttacctgtcggagaatgtcagcaaacacctgggcctcagtcagctggagctcattggacacagcatctttgatttcatccacccctgtgaccaagaggagcttcaggacgccctgaccccccagcagaccctgtccaggaggaaggtggaggcccccacggagcggtgcttctccttgcgcatgaagagtacgctcaccagccgcgggcgcaccctcaacctcaaggcggccacctggaaggtgctgaactgctctggacatatgagggcctacaagccacctgcgcagacttctccagctgggagccctgactcagagcccccgctgcagtgcctggtgctcatctgcgaagccatcccccacccaggcagcctggagcccccactgggccgaggggccttcctcagccgccacagcctggacatgaagttcacctactgtgacgacaggattgcagaagtggctggctatagtcccgatgacctgatcggctgttccgcctacgagtacatccacgcgctggactccgacgcgggcagcaagagcatccacaccttgctgagcaagggg

SEQ ID NO: 62233 - DNA, 706 bp, Homo sapiens
agaggaggttggtgtggagcacaggcagcaccgagcctgccccgtgagctgagggcctgcagtctgcggctggaatcaggatagacaccaaggcaggacccccagagatgctgaagcctctttggaaagcagcagtggcccccacatggccatgctccatgccgccccgccgcccgtgggacagacaggctggcacgttgcaggtcctgggagcgctggctgtgctgtggctgggctccgtggctcttatctgcctcctgtggcaagtgccccgtcctcccacctggggccaggtgcagcccaaggacgtgcccaggtcctgggagcatggctccagcccagcttgggagcccctggaagcagaggccaggcagcagagggactcctgccagcttgtccttgtggaaagcatcccccaggacctgccatctgcagccggcagcccctctgcccagcctctgggccaggcctggctgcagctgctggacactgcccaggagagcgtccacgtggcttcatactactggtccctcacagggcctgacatcggggtcaacgactcgtcttcccagctgggagaggctcttctgcagaagctgcagcagctgctgggcaggaacatttccctggctgtggccaccagcagcccgacactggccaggacatccaccgacctgcaggttctggctgcccgaggtgcccatgt

SEQ ID NO: 62234 - DNA, 744 bp, Homo sapiens
gggccacggggcgaccgagatggcggcctccgggggcctagagggaccctgggcgtgcactcgcccttccggctcgggctttagttagtgaccagctcctcggcgttctgcagagcgtgggtttcagcgagttctacgtgccaggtccgcccggtgccggcttcctcgctgcccctggcggctcgtcagcccccactacccctgaacttggtcccaatggcggcccgcccctccttcacccggaccgtgggcatctgggcctcgccgaagccgtcaaggtggctgctcgggcttctagagcccgtgtccagccctttgccaccgaggcctgatcctcttttctgccctaaagaacttgccctgacagcctctggctcccgctcttgaggatcttgcttgtccaaacccagaagacagtgcatgaagccaggggacatccgccatgctccaaacaacttggcctcaggagtcagtgacctttgaggatgtggctgtttacttcacccagaatcaatgggccagcctcgaccctgcgcagagggccctgtacggggaggtgatgctggagaattatgcaaatgtggcttctctggtagcgtttccattccccaaacctgctctgatctcccacctggagagaggggaagcaccatggggcccagatccctgggacaccgagattctgagaggcatcagtcaaggtggtgagtcctggatcaaaaatgaagggctagttataaagca

SEQ ID NO: 62235 - DNA, 953 bp, Homo sapiens
gtcgacgcggccgcgcggccgcgtcgactggaggccgccaggaccgctgtactccgggtgaagcggaagcgcagtgcggagccggcggaggctcttgtgctcgcttgtaaacgcctccggagcgacgcggtcgagtcagcggcacagaagacgtcggaggatttggagagagcggcggagaataatgtcttccacttggtggccactgtgtgctcccaggaggaaccagtccagcctctcctgcgggaagttctgcgcccgtcacgggacagccagcagcgtgtccgccgtaatctccgcgcctcggctcgggaggtccggcaggagggccgctaccgggtgctttccagccgccgatccttggggaccacctcgagcggccaggagtccgagtacacgccggggaacccagaagccgccgggaactcgggctttcagttgttagaccttgtccacgaggagggagaacctgaagccgcctctgcaggctcctgcaaaacatctgacccagatgtgatcctctgcaattctgtagagttgatccgtgagcgattgactgtgtctgaggatggaccaggagtcaggcgccaggaagaacaaaaacacgatgactatgtgtatgacatttactacttggagacggccactccaggctggattgagaacatcctctccgtgcagccctacagccaagaatgggagctggtgaatgatgatcaagaaccagaggacatttacgacgatgaagatgacgagaacagtgagaataactggcgcaatgagtacccagaggaggagagcagtgatggagatgaggattccagaggctctgctgactacaacagcctgagtgaggaggaaagaggcagcagcagacagcggatgtggagcaagtaccctctggatgtgcagaaggagttcggctatgacagcccccacgacctggattcaga

SEQ ID NO: 62236 - DNA, 1401 bp, Homo sapiens
tgcggccgccatactgcggggagcatgggctgctgggcggaaggagccattgggatactgcgatggggggaacacggggcttgagtgcactggttgggcgccgcccggcagggccaccaagtgctgcgtggagctgcagggccccaggggctgcccagactggccctcaccgctggctgtgcccgccgccccgtactggccgcccacagggcccgacgacgtctctaggaaactggcctctgggaaggccgttgagtgcttgcgcttttccgccccagagctgctcacgccgcaagggtacagggggacactctgcaggaagggcaccggcgtgctgaaggggccttctagcattttccgcagctgcttctccttcttggccacttcgttcaggaagagcttggagttcaggtggccgatcttagtgggggaaaggctgctgctcgtgcaggtctgggtcctgtccatcaggattttcacagacttggtgttcttcatgaagctgacatcctccgtcttatcaaagagcagctgcagggagcccagcagcttcttggcctcctgcatgcgctccccgaggtgcagcgcctgcgctgcgttctcgctgcagaacttggcctgggccttgtctaggacctccactgtctgccgcaggtccttgtccagcagctggtgcagcttctcgtactgcagccgaacttcctccttcagttggttcactttctcctccaccaggcgcttgtctgactcgagtttgtacagctggtcctcaatgtcctgctctcgctcctccagccggtcctgctgcttcatgagcatcttccggatttcattccttcggatctccacgtcgcacaccgagtgtccctgatgcgcgccgctgtagtagcagcagtactggcacacggccacctgctcggcctcgcagtggtagaggcggtaggcgttgtgctgcgggcagctccaggcccgcacgtcgtccgcctccaccaggaggtgcccgcgggcggtggagggctgctgcaggtgcgtctgcacgtgggactggcagcagggcgcctcgcagcgcaggcagaccttctgcgcgggcagcggggggccgcggcggcagaacacgcagtgcagcgccgccggcggcttctccacgtgcagggcattgaacttctccacgatgttggtgagcttcaggttcttctccaggcccggcttctggttgtaggcctggttgcactctgggcagcgtacgaggccgctgtccttggcccacgcctcgccgatgcagccccggcagaagttgtgtttgcacggcagctgcactggctccacgaaaacgtgcaggcagatagggcagatgagctcctcctcgaagcagttcttccaattctccgccatggcggccgc

SEQ ID NO: 62237 - DNA, 1061 bp, Homo sapiens
tatgaagcaagagatggaccgcagggaatgcagtggtgtcttttgaaagaagaggatgttattcctcgtatcagggcaatggaaggtcgtagaggaagaccaccaaatccagatagacaacgagcaagagaggaatccaggatgagacgtcggaaaggtcgacctccaaatgttggcaatgctgaattcctagataacgcagatgcaaagttgctaagaaaactgcaagctcaagaaatagccaggcaagcagcacaaataaagcttttgagaaaacttcaaaagcaggaacaggctcgggttgctaaagaagccaaaaaacaacaagcaataatggctgctgaggagaagcggaagcaaaaagaacagataaagattatgaaacagcaggaaaaaattaagagaatacagcaaatcagaatggaaaaagaacttcgagctcagcaaattctagaggctaaaaaaaaaaagaaggaagaagcggcaaatgccaaattattggaggccgagaaacgaataaaggaaaaagaaatgagaagacaacaagctgttcttctgaaacatcaggagttggagaggcatagactagatatggaacgagagcgaaggcgacaacacatgatgcttatgaaagctatggaagctcgtaaaaaagcagaagaaaaagagcggttgaaacaagaaaaacgtgatgagaaaagattaaataaagagcgtaaactagagcagcgaagattagaattagaaatggcaaaggaactaaagaagcctaatgaagacatgtgcttagcagaccaaaagcctttgccagagttgcctcgtattccaggacttgttctctctggaagtacattttcagactgtctcatggtggtgcagttcttacgaaactttggtaaagttttgggctttgatgtgaatattgatgttccaaacctgagtgttcttcaagagggattgctaaatataggggacagcatgggtgaagtacaagacttgcttgtgaggctcctctcagctgctgtatgtgatccaggtctaataacaggatacaaggtaaa

SEQ ID NO: 62238 - DNA, 452 bp, Homo sapiens
cggcggaggaggagcagggggagggctgtcaaattcgggagccagattttttcccttctcctggcaatcccttccgcttccccggctcccggcgtgacatctgcgggccggggacctgcatgtgtgtgcgcgcgaaggagcggaagaatggcagtgctcaaactcaccgaccagccaccattggttcaggcaatcttcagcggtgatccagaggagatccggatgctcatccataaaactgaagatgtgaatactctggattctgagaaacgaacccctcttcatgtggccgcatttctgggagatgcagagatcattgaactcctgattttgtcaggagctcgtgtaaatgccaaggacaacatgtggctgactccactgcaccgggctgttgcttccagaagtgaagaagcagtacaggttttgattaagcactcagctggatgtcaatg

SEQ ID NO: 62239 - DNA, 523 bp, Homo sapiens
  misc_feature (1)...(523): n = a,t,c or g
aaagggccactaccatttcccccacccttcactgcaagtcttaaggaaaagcctgtgttcaggagggagttgccaaggcctcaagaaagatccctcctgagtgccagggattacagattcccaggggactttcctaaggcctcggcctggcccctccagccctgctcacctcggaagctcagctcactgtcactaaccccacagtcctctgcagagctctccttctcctgcttgctgctgccccggctcctcttgacgctcttatagaactgcccccagcggtgccgccctgcatccttcttcaggcgtttctctttggcccttctgttctgaaaccaaacctgccacacaagcacaagggacatactcagggggcgtccaccacaaacccaaagcccccagggaccccctagggcgggcggctgggaagcaggactgaaggcctgaatgggagcacaggtttggggagtgcgatggggncccacccgtttttccccagggtggggcntcagaaattttgtgt

SEQ ID NO: 62240 - DNA, 1438 bp, Homo sapiens
gagctcaggaggtcaaggctgcagtgagctatgattatacctctgcactccagtctgggtgacagagcgaggctttgtctgcggtcccagttacttggaaggctgagacaggaggattgcttgagtccgggtggttgaggatgcaatgacctgtgatcatgccactgcacttcagtccgggtgacatagtaagaccctcgtgctgcgtgtcgtccagtcccaagctccggaggaatgcccactcccggctggagtcctaccggccagacacggacctgagccgcgaggacacgggctgcaacctgcagcacatcagcgaccgggagaacatagacgatttgaacatggaattcaatccttcagatcatcctcgggccagcacaatattcctcagtaaatctcagacggacgtgagagaaaaacgcaagagtctcttcattaaccatcatcctccaggacaaatagcaaggaaatacagttcctgctccaccattttcctagatgatagcacagtcagtcaaccaaacctcaagtatacaattaaatgtgtcgctcttgcaatatattatcacatcaaaaacagggacccagatggaaggatgctcttagatatttttgatgaaaatcttcaccctctttcgaaatccgaagtgccaccagattatgacaaacacaacccagagcagaagcagatttaccggttcgttcggacactgttcagtgctgctcagctgacggctgaatgtgccatcgtcaccctggtgtaccttgaaagacttttaacatacgcagagatagatatctgtccggccaactggaagcggattgttttaggggcgatcctgctggcctccaaggtgtgggatgaccaggctgtatggaatgtggattactgccagatcctgaaagacatcacggtggaggacatgaacgagctagagcgacagtttcttgaattgctgcagttcaacatcaatgttccttccagtgtctatgccaagtattattttgatcttcgttctctggcagaagcgaacaacctgagctttcccttggagcccctgagcagggagagggctcacaagcttgaggccatctctcgcctctgcgaggacaagtacaaggacctaagaagatccgcgaggaagcgctcagccagtgcagacaacctgactctgccccggtggtccccagccatcatctcttaactacggaggcccgccggaggccacaccatcccttagtttctcctttagtttgagaaaagacagacttggggtgggtttgtttttgttttttctttccttttctttttttacgcatagctccgtcaagctgcctggatgagcgcccatgcagcaaggcttggaggaagcgtcagtgccctggagatcccagctcgctctccccactgtcagcaacagcacttccttcgtgg

SEQ ID NO: 62241 - DNA, 674 bp, Homo sapiens
cgcgccggggcactgcccatgagcagcatagagacagagcaccatggggcacgtgaggccagggcaccgcctgtgagcaggagagagacagagaaccacggggcacgtgaggccggggcacttcctgtgagcaggagagagacagagaaccacggggcacgtgaggccagggcatcgcccgtgagcaggagagagacagagaaccacggggcacgtgaggccggggcactgcccatgagcaggagcgagacagagcaccacggggcacgtgaggccggggcacttcctgtgagcaggagagagacagagaaccacggggcacgtgaggccggggcactgcccatgagcaggagcgagacagagaaccacggggcacgtgaggccggggcacttcctgtgagcaggagagagacagagaaccacggggcacgtgaggccggggcaccgcccgtgagcaggagtgagacagagaaccacgaagcatatgaggccggggcaccacccgtgaagtcacagtcacacgtcagctggtggcacccaaagtgtgcagaggatgccacaccctcagagcctctttctgagtcgtcccctctgggaaatctttaaaacaaactgagcctggcacagcaggagagctacaatacgttaaattttggatacagatccagctactg

SEQ ID NO: 62242 - DNA, 1833 bp, Homo sapiens
tttcgtggagccgagctgggtgcggtgaggcgcgcagatcaccgcggttcctgggcagggcacggaaggctaagcaaggctgacctgctgcagctcccgcctcgtgcgctcgccccacccggccgccgcccgagcgctcgagaaagtcctctcgggagaagcagcgcctgttcccggggcagatccaggttcaggtcctggctataagtcaccatggcacagcaagctgccgataagtatctctatgtggataaaaacttcatcaacaatccgctggcccaggccgactgggctgccaagaagctggtatgggtgccttccgacaagagtggctttgagccagccagcctcaaggaggaggtgggcgaagaggccatcgtggagctggtggagaatgggaagaaggtgaaggtgaacaaggatgacatccagaagatgaacccgcccaagttctccaaggtggaggacatggcagagctcacgtgcctcaacgaagcctcggtgctgcacaacctcaaggagcgttactactcagggctcatctacacctattcaggcctgttctgtgtggtcatcaatccttacaagaacctgcccatctactctgaagagattgtggaaatgtacaagggcaagaagaggcacgagatgccccctcacatctatgccatcacagacaccgcctacaggagtatgatgcaagaccgagaagatcaatccatcttgtgcactggtgaatctggagctggcaagacggagaacaccaagaaggtcatccagtatctggcgtacgtggcgtcctcgcacaagagcaagaaggaccagggcgagctggagcggcagctgctgcaggccaaccccatcctggaggccttcgggaacgccaagaccgtgaagaatgacaactcctcccgcttcggcaaattcattcgcatcaactttgatgtcaatggctacattgttggagccaacattgagacttatcttttggagaaatctcgtgctatccgccaagccaaggaagaacggaccttccacatcttctattatctcctgtctggggctggagagcacctgaagaccgatctcctgttggagccgtacaacaaataccgcttcctgtccaatggacacgtcaccatccccgggcagcaggacaaggacatgttccaggagaccatggaggccatgaggattatgggcatcccagaagaggagcaaatgggcctgctgcgggtcatctcaggggttcttcagctcggcaacatcgtcttcaagaaggagcggaacactgaccaggcgtccatgcccgacaacacagctgcccaaaaggtgtcccatctcttgggtatcaatgtgaccgatttcaccagaggaatcctcaccccgcgcatcaaggtgggacgggattacgtccagaaggcgcagactaaagagcaggtatgtcctctggggccagggcagctggctgcctcctgggtgaatgtccctgcagcagcacagttgaggctgttgtgggccatcctggggtgtccgtgtcaggcactttcacatgattccatgatgcagtcctcacagcaacccggagagaggtggcataaccccatctagagcactggagaagcttcatggcacactcaaggcttcacgcccaggaagtgccatcctgagactgcattgtgcctctttacattgagatggtattttggctgattggtcatcaaggatataggcatgtcctgtctggtataaaagcaggaacttgatgccactgtagctgaactccttctggtgccagggtggcggctcccgccatcctcgacccgggaattc

SEQ ID NO: 62243 - DNA, 1306 bp, Homo sapiens
caggcggtggctatacttattaaagttggcgggagctgagcgatcagtcggtcctgggctggctgtggtgtagggcgttgcaggcagcgctcacctcctcaggccggcagaatgcgggtggctgtggctggctgctgccacggcgagctggataagatctatgagacgctggcgctggcagagcggcgcggcccggggcctgtcgacctcttgctgtgctgcggcgacttccaggcggtgcgcaacgaggcggatctacgctgcatggccgtgccgcccaagtatcgtcacatgcaaaccttctacaggtattactctggagagaaaaaggctccagttctcacgctcttcattgggggaaaccatgaagcctcaaatcatttgcaagagttaccctatggtggctgggtggcaccaaacatttattatttaggtttggctggtgtggtaaaataccgaggtgtaaggatcggtggaatctctggtatctttaaatctcatgactatcgaaaaggtcattttgagtgccccccttataattcatctacaatcaggagtatatatcatgtgagaaatattgaagtctataaattaaaacagctgaagcagcctatagatatattcttgtctcatgattggccaagaagtatatatcattatggaaataagaagcaacttcttaagactaaatcttttttccgacaagaagtggaaaataacacattaggaagtccagctgcctcagagcttttagagcatctcaaacctacttattggttttctgcccaccttcatgtgaagtttgccgccttgatgcagcatcaggcaaaggataaaggacagacagccagagcaaccaaatttttagccttggacaaatgcttaccacatagagattttcttcagatattagagatagaacatgaccccagtgctcctgattacttggaatatgatattgaatggctcactattctcagggctacggatgatcttattaatgtgactgggcgcctgtggaatatgccagaaaataatggcctgcatgcaaggtaagtcagactttatttaggacctgctttttccattgcatgcataatttttatatctcccacctttgttttgttttgttttgaaacagggtctagctctgttatccaaactggactgcagtggtgtgatcttggatcttggctcactgcatcctctgcctcctgggctaaagggatcctcccacctctgcccccagagtagctgggaccacaggcatgcaccaccatgcccagctaattttttggtatttttg

SEQ ID NO: 62244 - DNA, 706 bp, Homo sapiens
ttttgatgcgtcgccgcacaccggtgataatcctcgggtcgacccacgcgtccgctccggcgacagagccccgctctcaggcactgctggagaaccgagaccgacttctttctctttaccctcattggcgcttctctcctgcagtccgcctctgggccctgccgcatttcttgagacttaaagtggcattctaaaggcaatttaaaaatcatgtcaagctcagttgaacagaaaaaagggcctacaagacagcgcaaatgtggcttttgtaagtcaaatagagacaaggaatgtggacagttactaatatctgaaaaccagaaggtggcagcgcaccataagtgcatgctcttttcatctgctttggtatcatcacactctgataatgaaagtcttggtggattttctattgaagatgtccaaaaggaaattaaaagaggcacgaagctgatgtgttctttgtgccattgtcctggagcaacaattggttgtgatgtgaaaacatgtcacaggacataccactaccactgtgcattgcatgataaagctcaaatacgagagaaaccttcacaaggaatttacatggtctattgccgaaaacacaagaaaactgcacataactccgaaggtacatcatttagccacgtttcagccacttttcagtttcaagaagaaatttgagtacagattagtgaattatactata

SEQ ID NO: 62245 - DNA, 677 bp, Homo sapiens
tttcgtaacgccgcgtgctcttcccaaggggaggacgcgggagaagccggggcctgagtgctccaaggccccgtgggcttcttgggtttgttgcctccggccgctcattaactcaggatggcgtggaagacctcgcccgcctccccttctgggccgcggctccgcttaagtgaaggcctgtttgggcgtccccaccctggagaggggccggggtctggattttcagaactgccactcttctagtgcgctggcgtcaatgctcccttcctcgggccattggagactccgttgctttttaatggcggcagcggctgctgggtgagcagctggaggccggacagtgttcgtcccatccggagaggatcgctttctcctggcgtcaccagcgctgggttggtgggggtagcttttccctctttgctcctccattcttgaagaaagaagaagatgccactgccatttgggttgaaactgaaacgcacccggcgctacacggtgtccagcaagagttgcctggttgcccggatccaactgcttaataacgagtttgtggagttcaccctgtccgtggagagcactggccaggaaagcctcgaggccgtggcccagaggctggagctgcgggaggtcacttacttcagcctctggtactacaacaagcaaaatcagcgccggtg

SEQ ID NO: 62246 - DNA, 443 bp, Homo sapiens
cagccgccagatccttacgctcaacgtcaacctcatgctgggccaggctcaggagtgcctcctggagaagtcgatgttggacaacaggaagagctttctggtggcccgcatcagtgcacaggtggtagattactacaaggaggcatgccgggccttggagaaccccgacactgcctcactgctgggccggatccagaaggactggaagaaacttgtgcagatgaagatctactacttcgcagccgtggctcatctgcacatgggaaagcaggccgaggagcagcagaagttcggggagcgggttgcatacttccagagcgccctggacaagctcaatgaagccatcaagttggccaagggccagcctgacactgtgcaagacgcgcttcgcttcactatggatgtcattgggggaaagtacaattctgccaagaaggacaacg

SEQ ID NO: 62247 - DNA, 604 bp, Homo sapiens
tttcgtgagcgagctccgggttttgaaaatgttggagggaaaagctcctcggagatgagcgtgaccccctggctcgtggtggccgcctgttctcactaacgccatggcggggaccggagtgagaaaccggtgtctgtcactgactgcaaagtgagcgagaagcaggctgcgggccgtcccagcacgacgtggagccccgcggagacctcgagatgccccgcggggaagctcctggccccgggagacggggggctaaggacgaggccctgggcgaagaatcgggggagcggtggagccccgagttccatctgcagaggaaattggcggacagcagccacagtgaacagcaagatcgaaacagagtttctgaagaacttatcatggttgtccaagaaatgaaaaaatacttcccctcggagagacgcaataaaccaagcactctagatgccctcaactatgctctccgctgtgtccacagcgttcaagcaaacagtgagtttttccagattctcagtcagaatggagcacctcaggcagatgtgagcatgtacagtcttgaggagctggccactatcgcttcagaacacacttccaaaaacacaga

SEQ ID NO: 62248 - DNA, 653 bp, Homo sapiens
gcctgctgggaggtgttgtcctcggaaacgtcgctggcgcggagggatggttcggcgctttaggcgtctgtcacagacctatctgcgggtcgccttcacccagcatctcagaaactgcgcgcgggatgaacattcgggtgtttccggcaggtgacgctgccgagtccccgcagcagggggcgagcaagggactcgcggttgacgggacacggatcctctaaggcccagagtgtcccgagtagcggcagtggggagtgctcagggtacgctaatgatctgtgtcttgtaaagagcatattgctgggcttacatccgtttatcttgtttgactgttattttaatagcttggtgttctcaagagtctgccctttccgaggaagaagaggatacaaccaggcctcttgaaacagtgacatttaaggatgtggctgttgaccttacccaggaggagtgggagcaaatgaaacctgctcaaagaaacttgtatcgagatgtgatgctggagaactacagcaacctagtcacagtgggctgtcaagtcaccaaaccggatgtgatattcaagttggagcaagaagaggagccctgggtgatggaggaagaaatgtttgggaggcactgtccagaacccagaagaggagagaactgctgtg

SEQ ID NO: 62249 - DNA, 399 bp, Homo sapiens
tttcgtgggaccagcgcctgaggtgccccggagaggccatgtagctgagcagcaagaagaagcttcacgccctgtccctggccgagaagatccaggtgctggaactcctggatgagtccaagatgtcccagtcggaggtggcccggcgcttccaggtttcccagccccagatctcgcgcatctgcaagaataaggagaagctgctggcggactggtgcagcggcacagccaaccgagagcgcaagcgcaagcgggagtccaagtacagcgggatcgacgaggctctgctctgctggtaccacattgcccgggccaaggcctgggacgtgacggggcccatgctgctccacaaagccaaggagctggccgatatcatgggccaggacttcgtgcccagca

SEQ ID NO: 62250 - DNA, 404 bp, Homo sapiens
cgacgatttcgtctgccagttgattaagtttgacagtgtggaggtgtgtgtctgctgtgagctgcagcaccagtcgtccggctgcagcaacctcggggagacgctgaagctgaacccgctgcaggagaactgcaacgctgtgaggctgaccttgaagtcctccatgggtggtctccggctggtagacaagcaaagatgtacagagagagaggatgcggctcatctccatggtaggactacgcctggctcacagcgcctgtcatgttttgcacggaggaatggtccaagttggatggtcccagcagctcaccagagtgacagatgcagcggggttggaggaatcaagaactgcagcactccagggcccatcccatcatgggaccaggatctcctcttcagcgtgt

SEQ ID NO: 62251 - DNA, 422 bp, Homo sapiens
aatttcgtctacacctctgcggcgggagtcgcggtggagcctgaatggagagccggcctgggggcggcgttgctgtgactgacacctccggggtctgtcccgagagggggtgattccgccggctcccggttctctcccgagctcggagttggtaggggaggaggctttctccaactaccgccgctacttccgaggtacgagactccagttgtttggccaaagtggctgtgggccgagcacaggctgccgcgggggcgttcgctgctgagatcgtgctcgcggattctcgcagcaatgcagcaagtcttggaaaaccttacggagctgccctcgtctactggagcagaagaaatagacctaattttcctcaagggaattatggagaatcctattgtaaaatcacttgctaacgctcatgagag

SEQ ID NO: 62252 - DNA, 635 bp, Homo sapiens
gtcgacgatttcgtcgcgcctcgagagacctcaggctggttgggccactgtggccctctcgaggccggcgccgcggcaagagcgcatcggcattacacagttttggtcccatgcgacctccggttcccccatcctggcccgcgggacggatcaggaatgtgaacctgagcacgaccggggccacccggggcttagcgtcccgtatacacccacgtgagcttgggatttcagtttcatggaaggaacgtaggtcagggactcaggaaactagggttctaaaagtagatgtgtaatatcgacccacagtgtgggcccttgagcagatgtcttcatcattcaagctagaatcctcatgtctgtaaaataagggaggtgggagtaaggcagtcgtcaaaaattactaaccacgcaaacttcatgtccttggcaaatgaaaacaagacctggagaagtccttattgattgtttagattccattgaagacaccaaaggaaataatggagatagaggtagactcttggtaacaaatttaagaattctctggcactctttggcattatcaagagtcaatgtttctgtcggttacaattgcatattgaatattacaacaaggactgctaactctaaattacgag

SEQ ID NO: 62253 - DNA, 459 bp, Homo sapiens
gacgatttcgtgccgggggatgtcacagcggctcctgggagccagcagccgccgccgccgccgcccccgggaaccgcgatcatgaacccccagtgcgcccgttgcggaaaagtcgtgtatcccaccgagaaagtcaactgcctggataagtattggcataaaggatgtttccattgtgaggtctgcaagatggcactcaacatgaacaactacaaaggctatgaaaagaagccctattgtaatgcacactacccgaagcagtccttcaccacggtggcagatacacctgaaaatcttcgcctgaagcagcaaagtgaattgcagagtcaggtcaagtacaaaagagattttgaagaaagcaaagggaggggcttcagcatcgtcacggacactcctgagctacagagactgaagaggactcaggagcaaatcagtaatgtaaaataccatgaagatttt

SEQ ID NO: 62254 - DNA, 674 bp, Homo sapiens
tttcgtcgcaggcgcagcccggcagtcggcggcgcgcttagggcggaggtggtgcgtgcgtgcgtgtgtgtgtgtgtgtgtgtgtgtgtgtgtgtgtgtatgtggagctcgggtgccaagggcgagccgtcagtccccgggtgcgagtccctgctgttttacacaccctttctccctccaggctttttttctacatccttcccgcgcccccacggttgcggaccgagcgagaacccccttaaacatatgtggggggcgtgcggggtggcacgagacaaaaggggcacgggggtaagcccgccatggcctcccggagcctggggggcctgagcgggatccgcggcggtggcggcggaggcggcaagaaaagcctgagcgcccgcaatgctgcggtggagaggaggaacctgatcaccgtgtgcaggttttctgtgaagaccctgattgatcggtcttgctttgagacaattgatgattcttctcctgaatttaacaattttgcagctattttggaacagattttaagccaccggctaaaaggtcaagtaacctggtttggttatgaaagacctcgtagcttctgggactatatcagagtggcttgccggaaagtttcacagaattgtctctgcagcattgaaaatatggaaaatgtcagttcttctagagctaag

SEQ ID NO: 62255 - DNA, 672 bp, Homo sapiens
gcggccgcggtcccggggggcggctgagggggccgggccggggctgcggggcgaacggcgcggctaggatccggcggctcagcccggggcggcgaggctcggcacggagatggcggcgcgctcggcgcagacagagctgtgaaccaaccccgctcacggctaacaagcccacccaccatggcgagccccactctgagccccgactcctcatcccaggaggccctgtcggcccccacctgctccccaacctctgactccgagaacctcagccccgatgagctggagctgctggccaagctcgaagagcagaaccggctcctggaggccgactccaagtccatgcgctccatgaatggctcgcggcggaacagtggctcctcgctagtgtccagctcctcggcctcctccaacctgagccacctggaggaggacacgtggatcctgtggggccggatcgccaacgagtgggaggagtggcggcgcaggaaggagaagctgctcaaggagctgatccgcaagggcatcccccaccacttccgggccatcgtgtggcagcttctgtgcagcgccacggacatgcccgtcaagaaccagtactccgagctgctcaagatgtcctcgccgtgcgagaagctgatccgcagggacatcgcccgcacctacccggaacat

SEQ ID NO: 62256 - DNA, 826 bp, Homo sapiens
tttcgtccggggtagtcgctgggagcaaagctcgcttctcccgcgcctgtgcttttgcctgccccggcttacttctccccgcgtcggtccgctggccacgtacagctgaccagctcatcttccagcttcggaccgaggctccacggccgccgcagggacccgcccaccagaccctgcgctcggtagccggtgtgagtggaacgtgccgctgatgacacctggcagaaggcagccatggagggcgatggctcagattcgccggttaccattaagaatatcgaaagggagctcatttgcccagcatgcaaggagctgtttacccacccattgattctcccttgccaacatagtatctgtcataaatgtgtaaaagaactcctgctgactctcgatgattcattcaacgatgtgggatcagacaactccaatcaaagcagtcctcgacttcggctcccctcccctagtatggataaaattgaccgaattaacagaccaggctggaagcgcaattcattgaccccgaggacaactgttttcccttgccctggctgtgagcatgatgtggatcttggagaacgaggaatcaatggtctgtttcgaaacttcactttggaaactattgtggaaagatatcgtcaagcagctagggcagccacagccattatgtgtgacctttgtaaaccaccacctcaagaatccacaaaaagctgcatggactgtagtgcaagttactgcaatgaatgcttcaaaattcatcacccttggggtactataaaagctcaacatgagtatgttggtccaactactaacttcagacccatgtatt

SEQ ID NO: 62257 - DNA, 494 bp, Homo sapiens
agtcctcacgcgcgcttagactcttgggagttgtagtacgaatccgtcaggccggaaccatggcagtgaccaaggagctcttacagatggacctgtacgcgctgctaggcattgaggagaaggcagcggacaaagaggtaaagaaggcgtataggcagaaggccctctcctgccacccagacaaaaatccagataatcccagagcagctgaactcttccaccagctttctcaggccttggaggtgctgaccgatgctgcagccagggctgcatatgacaaggtcaggaaagccaagaagcaagcagcagagaggacccagaaacttgatgagaaaaggaagaaagtgaagcttgacctggaggcccgggagcggcaggcccaggcccaggagagtgaggaggaagaggagagccggagcaccaggacactagagcaagagatcgaacgcctgagagaaaagggttcccggcagctggaagaacagcagaggctc

SEQ ID NO: 62258 - DNA, 673 bp, Homo sapiens
atccgccgcggcgtctccatggcacgaccctggcctccgacttcaacgacttcataaggcggcgtttctgggcgcagccgtgtcgctcctggtttccatcgtgtgggaagaacggagtaacgagtctcacgcagaaaaaggtcttgagagcaccttgtggcgcacccagtgtaactgtgacgatcaaccatttttgtgttgtcctcccccacctgccagaagccaaccatgaaggaccgctcttcaactccccccttacatgttcacgtggatgagaacacccctgtccacgtccacataaaaaaactcccgaaaccatcagcgaccagcagccagaaatctcacaagcgaggaatgaaaggggacactgtgaatgtgcggcggagtgtccgggtgaaaaccaaggtaccttggatgccccctggaaaatcatctgcccggcctgtgggatgcaagtgggaggtaggctcacccttgcccaggcttttcttctcggactgctcagatcctagcaggcctcagcctcggtatgattcagggtcagctatagctactggaatgtcctaacagaccccatttactgagggccttgctaaaccctgaaactatgtgaatcttcttgagttcttatgatactgctgtgtgggaagtcctgctgtccaaaggcagagat

SEQ ID NO: 62259 - DNA, 600 bp, Homo sapiens
tttcgtgttgagcaccttcgtcgccattggctttcctcccccagctccagcctctctcatcttgggaatctgcgtcagaagtcactcgcagtcccgtcagcccagaagacgtaaagcaggctaccagcaattttgagaacttgcaaaaacagcttgcaaggaaaatgaagcttcctattttcatagcagatgcattcacagcaagagcatttcgtgggaatcctgctgctgtttgcctcctagaaaatgaattggatgaagacatgcatcagaaaattgcaagggagatgaacctctctgaaactgcttttatccgaaaactgcacccgacagacaactttgcacaaagttcctgctttggactgagatggtttacaccagcgagtgaggtcccactctgtggccatgccaccctggcttctgcagctgtgctgtttcacaaaataaaaaacatgaatagcacgctcacgtttgtcactctgagtggagaactaagggccagacgagcagaggacggcatcgtcctggacttgcctctttatccagcccacccccaggacttccatgaagtagaggacttgataaagactgccataggca

SEQ ID NO: 62260 - DNA, 1029 bp, Homo sapiens
tttcgtgccgcttccggggtcgggcgcctggatagctgccggctccggcttccacttggtcggttgcgcgggagactatggcgtcctcctcggtcccaccagccacggtatcggcggcgacagcaggccccggcccaggtttcggcttcgcctccaagaccaagaagaagcatttcgtgcagcagaaggtgaaggtgttccgggcggccgacccgctggtgggtgtgttcctgtggggcgtagcccactcgatcaatgagctcagccaggtgcctcccccggtgatgctgctgccagatgactttaaggccagctccaagatcaaggtcaacaatcaccttttccacagggaaaatctgcccagtcatttcaagttcaaggagtattgtccccaggtcttcaggaacctccgtgatcgatttggcattgatgaccaagattacttggtgtcccttacccgaaacccccccagcgaaagtgaaggcagtgatggtcgcttccttatctcctacgatcggactctggtcatcaaagaagtatccagtgaggacattgctgacatgcatagcaacctctccaactatcaccaggtcaggcctctctctagccccattctttccctctcctccctactcacatatagctcagctattgtcagtaatagatgccaactggggagaaaactcattggaagagagaatccataatcatatcccgccctaaatgggtgagggaagctattctgtctgataagatttacaggctgggggcagtggctcacacctcggcctccccaagtgctgggattacaggcgtgagctagcatgcctggccagggattaaaatattcaaacatgttgtgtgtacccagatatgctgttaatttaggaaaaacagtacaatttctatgaagtggttgtgactattttctgtagtcaatacagttgggatatctgatctatttctctgtctactttggaaatgattgcataataaataaaattttactgtttttttaaaaacaaaata

SEQ ID NO: 62261 - DNA, 807 bp, Homo sapiens
cagagaacgtttgtctgcctgatgagagccacttgggttaagaaactacctgtgaatagtcatcatttctgtccttcattggggaatacttttagaggccagtttccaaaaattctgcttaaaaaagaattctggttttgtcttactcttccagatgagatatcacagaggcttgggcctagattgtcatcagcatactgctatactattcgtttgttcttattaagccttattgtgtgtaatgctgttactttttcagagtgttgcggagataggaacatgggagagaaacaatctgggtaacatgaaagtgatgctggttgctaagggaaggcaacttgattctgtgggaagggctgtagctgatccatccgttgtctagatttgagtatgagcacagtggaagaggattctgacacagtaacagtagaaactgtgaactctgtgactttgactcaggacacagaagggaatctcattcttcactgccctcagaatgaagcggatgaaatagactcagaagatagtattgaacctccacataaaaggctttgtttgtcctctgaggatgatcagagtattgatgattctactccttgcatatcagttgttgcacttccactttcagaaaatgatcagagctttgaagtgaccatgactgcgaccacagaagtagcagatgatgaggttactgaggggactgtgacacagatacagattttgcagaatgagcaactagatgaaatatctcccttgggtaacgaggaagtttcagcagttagccaagcatggtttacaactaaagag

SEQ ID NO: 62262 - DNA, 750 bp, Homo sapiens
tttcgtcgttttcctggggaagcggcgggcggggtgtatcatccagctgggtccggggagcgccgccgccgcctcgatggggtgttgaaaagtctcctctagagctttggaaggctgaatgcactaaacatgaagagcttgaaagcgaagttcaggaagagtgacaccaatgagtggaacaagaatgatgaccggctactgcaggccgtggagaatggagatgcggagaaggtggcctcactgctcggcaagaagggggccagtgccaccaaacacgacagtgagggcaagaccgctttccatcttgctgctgcaaaaggacacgtggaatgcctcagggtcatgattacacatggtgtggatgtgacagcccaagatactaccggacacagcgccttacatctcgcagccaagaacagccaccatgaatgcatcaggaagctgcttcagtctaaatgcccagccgaaagtgtcgacagctctgggaaaacagctttacattatgcagcggctcagggctgccttcaagctgtgcagattctctgcgaacacaagagccccataaacctcaaagatttggatgggaatataccgctgcttcttgctgtacaaaatggtcacagtgagatctgtcactttctcctggatcatggagcagatgtcaattccaggaacaaaagtggaagaactgctctcatgctggcctgtgagattggcagctctaacgctgtggaagccttaattaaaaag

SEQ ID NO: 62263 - DNA, 1116 bp, Homo sapiens
ggcacgagcgactgtgtatgctctggaggactgaaaggctgtacaagccctatgtattttttttcaaatatacatatgcatgggtcttgctgctgcctcttttgctgactgtaattggactttgaagcttcgaagttatatcataaaaatttgtaacctttgtctgagagagagctcagctaagcaatcactttccacttcttttcacaggataatataaacgttttcttgaaagcttgtgaacagattggattgaaagaagcccagcttttccatcctggagatctacaggatttatcaaatcgagtcactgtcaagcaagaagagactgacaggagagtgaaaaatgttttgataacattgtactggctgggaagaaaagcacaaagcaacccgtactataatggtccccatcttaatttgaaagcgtttgagaatcttttaggacaagcactgacgaaggcactcgaagactccagcttcctgaaaagaagtggcagggacagtggctacggtgacatctggtgtcctgaacgtggagaatttcttgctcctccaaggcaccataagagagaagattcctttgaaagcttggactctttgggctcgaggtcattgacaagctgctcctctgatatcacgttgagaggggggcgtgaaggttttgaaagtgacacagattcggaatttacattcaagatgcaggattataataaagatgatatgtcgtatcgaaggatttcggctgttgagccaaagactgcgttacccttcaatcgttttttacccaacaaaagtagacagccatcctatgtaccagcacctctgagaaagaaaaagccagacaaacatgaggataacagaagaagttgggcaagcccggtttatacagaagcagatggaacattttcaagactctttcaaaagatttatggtgagaatgggagtaagtccatgagtgatgtcagcgcagaagatgttcaaaacttgcgtcagctgcgttacgaggagatgcagaaaataaaatcacaattaaaagaacaagatcagaaatggcaggatgaccttgcaaaatggaaagatcgtcgaaaaagttacacttcagatctgcagaag

SEQ ID NO: 62264 - DNA, 988 bp, Homo sapiens
gagtagcgggggctccggcgccgggcgacatgccggttcgcttcaaggggctgagtgaataccagaggaacttcctgtggaaaaagtcttatttgtcagagtcttgtaattcctccgtggggcgaaagtacccatgggctggacttagatcagatcaattaggcatcacgaaagagccaagttttatttcaaaaagaagagtcccttaccatgacccacagatttcaaaatctctggagtggaatggagctatctcagagagcaatgtggttgcatcaccagaaccagaagccccggaaacaccaaaatcacaagaagcagaacaaaaggatgttattcaagaaagagttcactcactagaagcttccagggttcccaaaagaaccagatctcactctgcagactccagagctgaaggggcttcagatgtggaaaataatgagggtgtaacaaaccatacaccagttaatgaaaatgtggaactggaacattctaccaaggttctttcagaaaatgtagataatgggttggatagacttctgcgtaagaaagctggattgactgttgttccttcatataatgccttgagaaattctgaatatcaaaggcagtttgtttggaagacttctaaagaaactgctccagcttttgcagccaatcaggtagtttaatggatgtaatacatttctgagtaccattatcttatctagtaatgtagatttacatagaattaagagttgaaagaaattaagtacttaagtagcctggaggtaggttctagaaaaccaaaatgagagttttgctaaaatcatcctattacttatgatttatggtagtaatattatactgtcctaggcttctgatgatcattgttgccagatgcagcacatatactaaatatgagacagggtaatgaaaacttggggaactggtaagtttttgcatgctacaagatttttttacttattaaaaaattattaaattgaaa

SEQ ID NO: 62265 - DNA, 530 bp, Homo sapiens
tttcgttgcgcgttccggaactggtttcccggaaggagtatgtctgcgccttcgatccgaccggaagttgcacgctgagccgcggacaccatgcagtcggatgatgttatctgggatacactaggaaacaagcaattttgttccttcaaaataagaaccaagactcagagcttctgccgaaatgaatatagcctgactggactgtgtaatcggtcatcctgtcccctggcaaatagtcagtatgccactattaaagaagagaaaggacagtgctacttgtatatgaaggttatagaacgagcggcttttcctcggcgtctctgggaacgggtccggcttagtaaaaactatgagaaagcactggagcaaatagatgaaaatctgatttactggccccgtttcattcgacacaaatgtaagcagagattcaccaagatcacccaatacctaattcgaattagaaaacttacactaaagcgacagaggaaacttgttcctttgagtaagaaggtggagcgtagggagaaaag

SEQ ID NO: 62266 - DNA, 428 bp, Homo sapiens
tttcgtagagcggggactcggcgaccctgccctcccgaccctcatgttcgaagagcctgagtgggccgaggcggccccagtagccgcgggccttgggcccgtaatctcacgacctccgcctgcggcctcctcgcaaaacaaggtgagtgactcgcgggagcaatgggagctgtttcaggccgcgaagcggacattggtggatcccagcgctgtgtgtattgcggggagggacacctgtggcaccgttaagggcgagtcctgatctgaagatccgagaacttccaaaagaaactgacgttgggtcagagagagttgttgagtaaaagttggtgaagcgaagagggttcttcagacaggaaaaagtacgtacaagggccctgggacaagagagcatgttctgtcagagtcacaaacacaagtggtccttt

SEQ ID NO: 62267 - DNA, 481 bp, Homo sapiens
tttcgtctggcggcgggctccgacgtctgcgccaagacctggctggctgagcccggcgcagcagcagcagccagggcagcgcggcccctactccctgtcaggtcgtagaggcgagcagggaccagctggtcgccggcccctcgggcaagatggggaaccgggagatggaggagctgatcccgctggtgaaccgtctgcaggacgcgttttcggcgctgggacagagctgcctgctggagctgccgcagatcgccgtggtgggcggccagagcgccggcaagagctcggtgctcgagaacttcgtgggcagggactttctccctcgagggtcgggcattgtaacaagacgacctcttgtgctgcagcttgttacttctaaagcagaatatgccgagtttctacattgcaaaggaaagaaatttacagattttgatgaagttcgccttgagattgaagcagaaacagatcgcgtgactggaat

SEQ ID NO: 62268 - DNA, 1211 bp, Homo sapiens
gcgaccgggccgaattcccgggtcgacgatttcgtcgccgcgcagcgcggctgtatttgcggcctgtgcgagtaggcgcttgggcactcagtctccctggcgagcgacgggcagaaatctcgaaccagtggagcgcactcgtaacctggatcccagaaggtcgcgaaggcagtaccgtttcctcagcggcggactgctgcagtaagaatgtcttttccacctcatttgaatcgccctcccatgggaatcccagcactcccaccagggatcccacccccgcagtttccaggatttcctccacctgtacctccagggaccccaatgattcctgtaccaatgagcattatggctcctgctccaactgtcttagtacccactgtgtctatggttggaaagcatttgggcgcaagaaaggatcatccaggcttaaaggctaaagaaaatgatgaaaattgtggtcctactaccactgtttttgttggcaacatttccgagaaagcttcagacatgcttataagacaactcttagctaaatgtggtttggttttgagctggaagagagtacaaggtgcttccggaaagcttcaagccttcggattctgtgagtacaaggagccagaatctaccctccgtgcactcagattattacatgacctgcaaattggagagaaaaagctactcgttaaagttgatgcaaagacaaaggcacagctggatgaatggaaagcaaagaagaaagcttctaatgggaatgcaaggccagaaactgtcactaatgacgatgaagaagccttggatgaagaaacaaagaggagagatcagatgattaaaggggctattgaagttttaattcgtgaatactccagtgagctaaatgccccctcacaggaatctgattctcaccccaggaagaagaagaaggaaaagaaggaggacattttccgcagatttccagtggccccactgatcccttatccactcatcactaaggaggatataaatgctatagaaatggaagaagacaaaagagacctgatatctcgagagatcagcaaattcagagacacacataaggtagtattcttgtcttttcacttgataccaatctagactttttacagaatccaaagcaaagagacaaaaaaaatcaaccttaaattagaatataattttaaatgttttttataggtttaattgatatttaaaaaaaa

SEQ ID NO: 62269 - DNA, 853 bp, Homo sapiens
ccgaccggggtgaatttccgggtcgaggatttcgtctggagttgggggagagcccagggctccagtcgctccggaggaggcgtgaatcgcgcagggattgactaatttggggtggggggtgcggtgggcgatggagcagcctgaggacatggcgtcgctgagcgagttcgactccttggcgggcagcatcccggccaccaaggtggagatcaccgtgtcctgcaggaacctcctggacaaagacatgttttccaagtccgacccactgtgcgtcatgtatacccaagggatggagaacaagcagtggcgggagtttgggcgcaccgaagtcatcgacaacacgctcaatcctgacttcgtgcgcaagttcattgtggattactttttcgaggagaagcagaacctccgttttgatctatacgacgttgactctaagagtcctgatttatccaaacacgatttcctgggccaggccttctgcacccttggagagattgtggggtcccctgggagccgcctggaaaagcccctcacgataggcgcattcagcctgaattccaggacgggcaaacccatgccagctgtgtccaacggaagtggtctttggatggaaagtttgagaaccactggtctggaagcctccggtggtgtcccaggaaagaaatgtggcaccatcatcctgtccgctgaggagctcagcaactgtaggataagcttcagggagaggccagtttctctacctgaaagaagaggaagaaagaagagcccatggagaagagagaatgaaaggaagaggccaagatgtcggcaccaatgcagttctgtggcaacaactggaccagaaagaattctt

SEQ ID NO: 62270 - DNA, 1152 bp, Homo sapiens
tttcgtcaaaggatgaacaaaagcacatgtgtccctatgagtttgaggtggagagggatgcaaaggctcggggcctggagcagttctctgccacccacgggcacacccctatcatcctcaatggctggcatggggagtcagctatggacctctcctgctcatcagaggggtccccaggagccacatcccctttcccagtgagcgccagcacccctaagattggggctatcagttcacttcagggagcccttggcatggacttgtctgggattctgcaagctggcctgatccatcctgtgactggacagattgtcaatggaagcctcagaagagatgatgcagccacgaggaggcggagagggaggcggaaacatgttgaaggagggatggacctcatctttttgaaggagcagacacttcaggcgggaatcttggaagtccatgaagacccagggcaggccaccttgagcaccacacaccctgaggggccagggcctgccacctcggctcctgagccagctacggcagccagcagccaagccgagaaatccattcccagcaagagtctgcttgactggctaaggcagcaggctgactactccttagaagttcctggctttggggcaaatttttcagacaaaccaaagcagaggaggccacgctgtaaagaacctggaaaattagatgtcagctccctgagcggggaagagagagttcctgccatccccaaggagccaggactgagggggtttcttccagaaaacaagttcaatcacactctggctgagcctattcttcgagatacgggcccccgcaggagggggaggcggcctcggagcgaactcctgaaggctccttccattgtggcagactctccctctggaatggggccactgttcatgaatggactgattgctgggatggacctggtaggacttcagaacatgagaaatatgccaggcatccccctcaccgggctggtggggtttccagctggctttgccacgatgccaacaggtgaagaggtcaaaagtaccctgagcatgctgcccatgatgctgccaggcatggctgctgtgccccagatgtttggtgttgggggactcctcagtccacccatggcaaccacctgcacttccactgccccggcgc

SEQ ID NO: 62271 - DNA, 1773 bp, Homo sapiens
cccgggtcgacgatttcgtggggaacagctgatccgtctgttgggaggacagatatctcaaggccaggatggaagaatcaccactaagccgggcaccatcccgtggtggagtcaactttctcaatgtagcccggacctacatccccaacaccaaggtggaatgtcactacacccttcccccaggcaccatgcccagtgccagtgactggattggcatcttcaaggtggaggctgcctgtgttcgggattaccacacatttgtgtggtcttccgtgcctgaaagtacaactgatggttcccccattcacaccagtgtccagttccaagccagctacctgcccaaaccaggagctcagctctaccagttccgatatgtgaaccgccagggccaggtgtgtgggcagagcccccctttccagttccgagagccaaggcccatggatgaactggtgaccctggaggaggctgatgggggctctgacatcctgctggttgtccccaaggcaactgtgttacagaaccagctcgatgagagccagcaagaacggaatgacctgatgcagctgaagctacagctggagggacaggtgacagagctgaggagccgagtgcaggagctcgagagggctctggcaactgccaggcaggagcacacggagctgatggaacagtacaaggggatttcccggtcccatggggagatcacagaagagagggacatcctgagccggcaacagggagaccatgtggcacgcatcctggagctagaggatgacatccagaccatcagtgagaaagtgctgacgaaggaagtggagctggacaggcttagagacacagtgaaggccctgactcgggaacaagagaagctccttgggcaactgaaagaagtacaagcagacaaggagcaaagtgaggctgagctccaagtggcacaacaggagaaccatcacttaaatttggacctgaaggaggcgaagagctggcaagaggagcagagtgctcaggctcagcgactgaaagacaaggtggcccagatgaaggacaccctaggccaggcccagcagcgggtggccgagctggagcccttgaaggagcagcttcgaggggcccaggagcttgcagcctcaagccagcagaaagccacccttcttggggaggagttggccagcgcagcagcagccagggaccgcaccatagccgaactacaccgcagccgcctggaagtggctgaagttaacggcaagctggctgagctcggtttgcacttgaaggaagaaaaatgccaatggagcaaggagcgggcagggctgctgcagagtgtggaggcagagaaggacaagatcctgaagctgagtgcagagatacttcgattggagaaggcagttcaggaggagaggacccaaaaccaagtgttcaagactgagctggcccgggagaaggattctagcctggtacagttgtcagaaagtaagcgggagctgacagagctgcggtcagccctgcgtgtgctccagaaggaaaaggagcagttacaggaggagaaacaggaattgctagagtacatgagaaagctagaggcccgcctggagaaggtggcagatgagaagtggaatgaggatgccaccacagaggatgaggaggccgctgtggggctgagctgcccggcagctctgacagactcagaggacgagtccccagaagacatgaggctccaccctatggcctttgtgagcgtggagacccaggcttctcttctgctgggcctcgaag

SEQ ID NO: 62272 - DNA, 656 bp, Homo sapiens
tttcgagccggggctccttcctgtggtgcagcttcgggtctcggagtttggcccctactctgaccccaccccagctccgctccgccttgggttccggcagaacccgccttgcggtagccatggcagcaggctccgaggcgaccactcctgtgatcgttgcggctggggctggaggggaggaaggtgaacatgtcaaaccttttaagccagagaaagcaaaagaaattatcatgtctttacaacaacctgcaatcttctgtaacatggtgtttgattggccagcacgacactggaatgctaaatacctttcgcaggtccttcatggcaagcagatacgattcagaatggggatgaaaagcatgagcacagttcctcagtttgaaactacatgtaattacgtagaagctacactcgaagagtttctgacctggaactgtgaccagtctagtatttctggaccatttagagattatgaccattccaagttctgggcttatgctgactataaatattttgtcagtctatttgaagacaagacagatcttttccaggatgtgaaatggtctgacttcgggtttcctggaagaaatggacaggaaagtacattgtggattggctccttgggagcccacacaccctgtcatctggactcctat

SEQ ID NO: 62273 - DNA, 438 bp, Homo sapiens
  misc_feature (1)...(438): n = a,t,c or g
tttcgtgccacatggatcctggcagccggtggcggaacctgcccagcgggcctagcctaaagcacttgactgacccctcttatggaatcccgcgggaacagcaaaaggcagcgttgcaggagctgacgcgggcgcacgtggagtccttcaactacgctgtgcacgagggtctcggcctcgcggtgcaggctatacctccctttgaatttgctttcaaagatgagcgtatctcttttactattctggatgctgttatcagtccacctacagttccaaaagggaccatctgcaaagaggccaatgtttatccagcagaatgccggggccgaaggagtacctaccgtgggaagttgacagctgatatcaactgggcagtgaatggaatctcaaaaggaatcattaagcagtttcttggctatgttcccatcatggngaaat

SEQ ID NO: 62274 - DNA, 627 bp, Homo sapiens
cgggtgaatcccggcgccgcgccccggacccgcagctccctgcactcctccctcccagccgctttaacacccacaccccacagtctctcccacggccgcgccttggcggccccactgaatccctacgcggggcccagcggtaccgggagaccgggctagcctatgggagcgcccagataacgcgggttskggggcgcccgcgccccccatccccgccagcatgactcgatcgccgcccctcagagagctgcccccgagttacacacccccagctcgaaccgcagcaccccaggtgagtagagggggagctggaagaaggaagagagcggagccaggtctgtcactcgggcctctgcaaggtttgtgatgtcttgaagtgccgagtgtcattagatgtctgaaggcaagtgagagctagcaccgcaagcaagttgtgcgtgtgtgtcggtgtgtctgtgccggtgtctcctcatcgtctggccagtgagaatgaatgtctgtgggttcacctctgtgtccacccgacgacaggtgtgtgtacatatgtatcctgctctcagaaaatgggcctatgccggccgggcgcggtgactcacgcctgtaatcccaacactgtgaggctgaggc

SEQ ID NO: 62275 - DNA, 394 bp, Homo sapiens
gccgcgctcggcgctggcctgctgccccggcgggtccgccggccggaggcgggagtcacaggaagagccctccacaaaaggaggcctcggcggatcaggacagctgcaggtgggtgtgcacactggtgagctgccagcaggggcccagacgcgccaggcctggagatggctggaaactgctcctgggaggcccatcccggcaacaggaacaggatgtgccctggcctgagcgaggccccggaactctacagccggggcttcctgaccatcgagcagatcgcgatgctgccgcctccggccgtcatgaactacatcttcctgctcctctgcctgtgtggcctggtgggcaacgggctggtcctctggtttttcggcttctccatcaagaggaacc

SEQ ID NO: 62276 - DNA, 1539 bp, Homo sapiens
tttcgtcttatttgtgccataaaaacaatcgatcctaattgacagctatttggacttttacatctgccaaacccttttccttgaactgtggtcactaaatgaggggagtctggtctgggaagtcccatccattccttcaataggatggggagcggtgatagtgtctccggcgatctcaagaataggagggaatgttgaccagggagcaccgctgcggccgatcagaggagcaggaactggaaccctggccgagtccgaaaaaagccagatctggaaggtggctgcggaacggttttaagcggaagatggaggagccggaggaaccggcggacagtgggcagtcgctggtcccggtttatatctatagtcccgagtatgtcagtatgtgtgactccctggccaagatccccaaacgggccagtatggtgcattctttgattgaagcatatgcactgcataagcagatgaggatagttaagcctaaagtggcctccatggaggagatggccaccttccacactgatgcttatctgcagcatctccagaaggtcagccaagagggcgatgatgatcatccggactccatagaatatgggctaggttatgactgcccagccactgaagggatatttgactatgcagcagctataggaggggctacgatcacagctgcccaatgcctgattgacggaatgtgcaaagtagcaattaactggtctggagggtggcatcatgcaaagaaagatgaagcatctggtttttgttatctcaatgatgctgtcctgggaatattacgattgcgacggaaatttgagcgtattctctacgtggatttggatctgcaccatggagatggtgtagaagacgcattcagtttcacctccaaagtcatgaccgtgtccctgcacaaattctccccaggatttttcccaggaacaggtgacgtgtctgatgttggcctagggaagggacggtactacagtgtaaatgtgcccattcaggatggcatacaagatgaaaaatattaccagatctgtgaaaggtacgaacctcctgccccaaatccaggcctgtagaagcagctgccgcagcttgtcttccccatttgcatagccttgtctgaaaactagactgctgaatactgaaggatcaggtttctcatcaagaaaactgcactttaaatgaatatcttgtatgtttatagggaagttactaatgtagtataaagagatgcctgtcctccccctcctttctggataagagattttatactttcacaaaacgaaaaattaatgatttgcagtgtaggccaaacagtactgttacagtggttagggaaactttcccaaaagcaatctggagtgacatttcattcatgtattcatttaatgactatttattgaatgcctactatgtataaagtattgattctaccctcgaggaagttagtggaaatttttaaatgttagataaataaatagagattgattttcatattcacacacatttaaataaataaaacatagaaaattgtaagaa

SEQ ID NO: 62277 - DNA, 450 bp, Homo sapiens
tttcgtcagtgtggggcctggaccgctgggtaggcgcgtccagcggcctgagcaggggagggtaatgaggctgttacgcgccttctccgcatcttggcgggagcctgacgccccgcttcttccctaacggggtgttccaccggcgcctgccgaggcctaggcctccgcagccgccctccgtctcctcagccccgacgctgcgcccgctttgtgctcatttttctctggggaaactgaggctccgagtgcgaaagtcagccgaggtcgccccgcccaggacagagaagggctgggggtcggctgagccgcggcattcccgggccccgctagggctgcagggtctcaggatggcagcctcggcgcaggtgtctgtgacctttgaggatgtggctgtgacattcacccaggaggagtggggacagttggatgcagcccagagaaccttgtatc

SEQ ID NO: 62278 - DNA, 381 bp, Homo sapiens
tttcgtgaaggaggaacatggagaggagagcagcgggcccaggctgggcagcctatgaacgcctcacagctgaggagatggatgagcagaggcggcagaatgttgcctatcagtacctgtgccggctggaggaggccaagcgctggatggaggcctgcctgaaggaggagcttccttccccggtggagctggaggagagccttcggaatggagtgctgctggccaagctgggccactgttttgcaccctccgtggttccgttgaagaagatctacgatgtggagcagctgcggtaccaggcaactggcttacatttccgtcacacagacaacatcaacttttggctatctgcaatagcccacatcggtctgccttcggtaa

SEQ ID NO: 62279 - DNA, 439 bp, Homo sapiens
tttcgtgggtcgctttcctcaccttcctcgctgcgcgggcggcggttggtaaccggtcagaccagcccgagagggacctggtgcctgtacccaggcttctgtcgctctgtcgcctgcgctatgccctgctgtagtcacaggagctgtagagaggaccccggtacatctgaaagccgggaaatggacccagtggtctttgaggatgtggctgtgaacttcacccaggaagagtggacattgctggatatttcccagaagaatctcttcagggaagtgatgctggaaactttcaggaacctgacctctataggaaaaaaatggagtgaccagaacattgaatatgagtaccaaaaccccagaagaagcttcaggagtctcatagaagagaaagtcaatgaaattaaagaagacagtcattgtggagaaacttttacccagg

SEQ ID NO: 62280 - DNA, 578 bp, Homo sapiens
tttcgtgggcgggcgggcacggtagggccatggcagagggtgaggatatgcagaccttcacttccatcatggacgcactggtccgcatcagtaccagcatgaagaacatggagaaggaactgctgtgcccagtgtgtcaagagatgtacaagcagccactggtgctaccctgtacccacaacgtgtgccaggcctgtgcccgagaggtcttgggccagcagggctacataggacatggtggggaccccagctccgagcccacctctcctgcctccaccccttccacccgcagcccccgcctctcccgcagaactctccccaagccagaccgcctggaccggctgcttaagtcaggctttgggacataccctgggaggaagcgaggtgctttgcacccccaagtgatcatgttcccgtgcccagcctgccaaggtgatgtggagcttggggagcggggtctggcagggcttttccggaacctgaccctggagcgtgtggtggagcggtaccgccagagtgtgagtgtgggaggtgccatcctgtgccagttgtgcaagcccccaccactagagacgaaa

SEQ ID NO: 62281 - DNA, 479 bp, Homo sapiens
gggcgggagcagcggcggcggcggcacaggctcggggccagccgggcgcgcatccccgggcgccctgcgcggaggagagcttggcgggctgcgggtgccgcaggacaggagtggacaaagcaagatggcagggatcttagcctggttctggaacgagaggttttggctcccgcacaatgtcacctgggcggacctgaagaacacggaggaggccaccttcccgcaggctgaggacctctatctcgcttttcccctggccttctgtatcttcatggtgcggctcatcttcgagagatttgtagccaaaccgtgcgccatagccctcaacattcaggccaatggaccacaaattgctccgcccaatgccattctggaaaaggtcttcactgcaattacaaagcatcctgatgaaaagagattggaaggcctctccaagcaactggactgggatgttcgaagcattcagcgctggtttcgaa

SEQ ID NO: 62282 - DNA, 746 bp, Homo sapiens
tttcgtggccagacatggcggaagaggaggtggccaagttggagaagcacttgatgcttctgcggcaggagtatgtcaagctgcaaaagaagctggcggagacagagaagcgctgcgctctcttggctgcgcaggcaaacaaggagagcagcagcgagtccttcatcagccgtctgctggccatcgtggcagacctctacgagcaggagcagtacagcgatctgaagataaaggttggggacaggcacatcagtgctcacaagtttgtcctggcagcccgcagtgacagctggagtctggctaacttgtcttccactaaagagttggacctgtcagatgctaatcctgaggtgacgatgacaatgcttcgctggatctatacagatgagctggagttcagagaggatgatgtgttcctgactgaactgatgaaactagcaaatcggtttcagctacagctcctcagggagagatgtgagaagggtgttatgtctctagtgaatgtcaggaactgtattcgcttctaccagacggcagaggagctgaatgccagcacactgatgaactactgtgcagaaattattgcaagtcattgggtgagtgaggttgagggtgtcaacaaagcactctagctggcagtcaggagaccgccgctggggacgtagttccatggaaagtgacctctctggcacctggttttctcttgttacacaattgaagaataaatagtttgaaaagatgaaaaa

SEQ ID NO: 62283 - DNA, 782 bp, Homo sapiens
tttcgtgccagagcttgcttgccaagctctcgctcagaccggatctaggaaatacgaggcgggcctcggtgggagggacgcactgagggaggagggaggaaagggggcggcggcggcggcggccaaagagcagcagccgcctgaaaatgactgtggtgctagaagatcattacttttggaaagccggttaacatccatttcctaagagaaacttggccaccatttgctctggcatggcgcaaagcagcccacagcttgatattcaggttctccatgatcttcgacaacgtttccctgaaattccagagggcgtggtgtctcagtgcatgttacagaataacaacaatcttgaagcctgttgccgagccctttcccaggagagtagcaaatacttatatatggaataccatagtccagatgacaataggatgaatagaaatcgccttttacatattaacctgggtatccattctcctagtagctatcacccaggagatggagcccaacttaatggtggtcgaacactggtacatagctcaagtgatggacatattgatcctcagcatgcagcaggtaaacagctgatatgtttagttcaagaaccacactcagctccagctgttgttgctgctactcccaactacaatccattttttatgaacgaacagaacagaagtgcagctactcctccttcacaaccacctcaacagccatcttccatgcaaacaggaatgaatccgtctgctatgcaagggccttcaccaccaccgccacctccttca

SEQ ID NO: 62284 - DNA, 546 bp, Homo sapiens
ggtggacttcctcttggatgtccgggctggcagtgtcaaattcggataatagcgtctgagtcctaactcagtttctatgcttctcttgttaccgagtaatccccagtctgtggccagcactctgtgaagccctgttctagaggctgattcttaggtgctggttcactctggctatccagtgggcctgatagatttcatattgatcttttttccagtgtgttccttactgctagcatggccccaaagaaacaagtagtagttggtttgtcaccttccttagttgcaagagtatgatgcctgctacttctcctccaccacccaccccgctttccctcaccacccaaagctcggttttagaagaggaggctttctgtgctttatgaaagctttctgtgccaggcagagcagcagctgttagagatgatgaagcctggagaaagaagccaaatgaaaccccttttcgtaactacttccagggccagatattcgaagcttacaacatggcagctttgtggaaattaccttgtattttcatctgtgagaatg

SEQ ID NO: 62285 - DNA, 769 bp, Homo sapiens
cgtcccgttccggagatcccgggtcgacccacgcgttcgctctcggtgcccccctccacgcccaggttcgtgtgaaccctgcttaagggctttactagggaaaacggtgctggttcactggggcgcgtttccgggaaggtgaataccggtgaaagttatgctgagggtgagtaaactcaaaaactgacactcgattcagctattggaaagtttttttaatgcggttggaacaactgaggtcttaaaaataaatatgaatttagattccatacatcgattaattgaggaaacacagatcttccagatgcaacaatcatcaattaagtcacgcggcgacatggtggcccctgcctcaccccccagggatacctgtaatacctgcttcccacttcatgggctacaatctcatgctgctcacaatttctgtgctcactcatataacaccaacaaatgggatatttgtgaagaacttcgcctgcgggagcttgaagaagtcaaggccagagctgctcagatggaaaagaccatgcggcggcgggcggactgcactgccaactggagagaaaaatggagtaaagttcgagctgaacggaacagtgccagggaggaaggaagacaactcataataaaactagagatggcgatgaaagaattgagtacactgaaaaagaaacagagattgccacctcataaggaggcattagaagctaatgctacccacgatctgaagcttgctggcttcgtaaaagaaacctgagaacataccgat

SEQ ID NO: 62286 - DNA, 1745 bp, Homo sapiens
gataccgctccggaatttccgggtcgacgattctcgagccgacccacggagtcttgtctcctgcttgtgggtggaggggagcttccgaaggaggccagcgaagaaccctgcaaagctggggaggacccagcatccggcccctcgcccctggcgagcaaacgggtcagaccgttaggcacagcctccttgtggagcgcacggacaggaagcagggtttatagcacctagagggggaaggagtggcaagtgcggagggcagcccctcccaggactagaacccacttcctactttacaccagcactggaggaggctggtggggcagggcgggggcggtggggcctcccctagccttccctccccctctccttcactgtccttccagcaggcacaggaaggtgaggcaaggtgtttccagccggcaggatggaggacgaggaaggccctgagtatggcaaacctgactttgtgcttttggaccaagtgaccatggaggacttcatgaggaacctgcagctcaggttcgagaagggccgcatctacacctacatcggtgaggtgctggtgtccgtgaacccctaccaggagctgcccctgtatgggcctgaggccatcgccaggtaccagggccgtgagctctatgagcggccaccccatctctatgctgtggccaacgccgcctacaaggcaatgaagcaccggtccagggacacctgcatcgtcatctcaggggagagtggggcagggaagacagaagccagtaagcacatcatgcagtacatcgctgctgtcaccaatccaagccagagggctgaggtggagagggtcaaggacgtgctgctcaagtccacctgtgtgctggaggcctttggcaatgcccgcaccaaccgcaatcacaactccagccgctttggcaagtacatggacatcaactttgacttcaagggggacccgatcggaggacacatccacagctacctactggagaagtctcgggtcctcaagcagcacgtgggtgaaagaaacttccacgccttctaccaattgctgagaggcagtgaggacaagcagctgcatgaactgcacttggagagaaaccctgctgtatacaatttcacacaccagggagcaggactcaacatgactgtgcacagtgccttggacagtgatgagcagagccaccaggcagtgaccgaggccatgagggtcatcggcttcagtcctgaagaggtggagtctgtgcatcgcatcctggctgccatattgcacctgggaaacatcgagtttgtggagacggaggagggtgggctgcagaaggagggcctggcagtggccgaggaggcactggtggaccatgtggctgagctgacggccacaccccgggacctcgtgctccgctccctgctggctcgcacagttgcctcgggaggcagggaactcatagagaagggccacactgcagctgagaccagctatgcccgggatgcctgtgccaaggcagtgtaccagcggctgtttgagtgggtggtgaacaggatcaacagtgtcatggaaccccggggccgggatcctcggcgtgatggcaaggacacagtcattggcgtgctggacatctatggcttcgaggtgtttcccgtcaacagtttcgagcagttctgcatcaactactgcaacgagaagctgcagcagctattcatccagctcatcctgaagcagaaacaggaagagtacgagcacgaatggcgaa

SEQ ID NO: 62287 - DNA, 236 bp, Homo sapiens
tgagcctctcgactttgcttctttctctttttctcatggtaatccaaacggaatccatagcgtttacggtgtaattcaatatattcattctgtggcatggtgacggcaaaggcagcggagttggcgaagtttagctaggactgtcgggcagtgctgaccacgcagtacacacggcttggattcagctggccggggactcacattgggtccctcactaacgtcggtcgacgcggccg

SEQ ID NO: 62288 - DNA, 340 bp, Homo sapiens
ctcggagcttgcccaatacttcccagaaggacgaggctgctgaacttctcattcggggctccgggacctggactgtacccctttctggcgtcacctcctcctgtcgcctggccctcgccatgcagaccccgcgagcgtcccctccccgcccggccctcctgcttctgctgctgctactggggggcgcccacggcctctttcctgaggagccgccgccgcttagcgtggcccccagggactacctgaaccactatcccgtgtttgtgggcagcgggcccggacgcctgacccccgcagaaggtgctgacgacctcaacatccagcgagtcctgcggggcat

SEQ ID NO: 62289 - DNA, 528 bp, Homo sapiens
ggaacacggctcgcaggccgggggcaaggggcggccgggcgcggccgagctgccatcagtcatgctcttaaacggggactgcccagagagcctgaagaaggaggcggcggcggccgagccacccagggaaaatgggcttgacgaggccggcccgggagatgagaccaccggccaggaagtcattgtcattcaggacacgggcttttctgtgaagatcctcgcccctgggatcgagcccttctccctgcaggtgtccccccaggagatggtgcaggagattcaccaggtgctcatggaccgggaggacacgtgtcaccgcacctgcttctcactgcacctggatggcaacgtgctggaccacttctcggagctgcgcagcgtcgaggggctgcaggagggctctgtgctgcgtgtggtggaagagccgtacacggtgcgtgaggcccgcatccacgtgcgccatgtccgagacctgctcaagagcctggacccatccgatgccttcaacggggttgactgcaactcctt

SEQ ID NO: 62290 - DNA, 447 bp, Homo sapiens
gacccacgcgtccgctgagatatctcccagggaggttcacttccccggaactctgccttttcccagaaggaggaggggaaaaatgaccaagttccaggaggcagtgacattcaaggatgtggctgtggccttcactgaggaggagctggggctgctggactctgcccagaggaagctgtaccgagatgtgatgctggagaactttaggaacctggtttcagtgggacatcagtccttcaaaccagatatgatatcccagttggagagggaagaaaagctttggatgaaggagcttcaaacccaaagaggtaagcattcaggagacaggaatcaaaatgagatggcaactcttcacaaagcaggattaaggtgcttttcactgggagagctttcatgctggcagatcaagagacacattgcgagcacattagccagaagtcaagactc

SEQ ID NO: 62291 - DNA, 807 bp, Homo sapiens
tgggaacacaagttgacgctttttgtgttccttgagtccagtcgggaagggcccttgtgactgggtctcatgccaaacaacttgttacaataagagctagggtcccagaccatgcggaaacttcatgagaatcctctgtagtctggtgagtgtagtgtccgactctggagcccaggctgttgcttcccggtctggtggtgaatcctccatagtctggagatctcagccctgctgagctgatgatgctgactataggagatgttattaaacaactgattgaagcccacgagcaggggaaagacatcgatctaaataaggtgaaaaccaagacagctgccaaatatggcctttctgcccagccccgcctggtggatatcattgctgccgtccctcctcagtatcgcaaggtcttgatgcccaagttaaaggcgaaacccatcagaactgctagtgggattgctgtcgtggctgtgatgtgcaaaccccacagatgtccacacatcagttttacaggaaatatatgtgtatactgccctggtggacctgattctgattttgagtattccacccagtcttacactggctatgagccaacctccatgagagctatccgtgccagatatgaccctttcctacagacaagacaccgaatagaacagttaaaacaacttggtcatagtgtggataaagtggagtttattgagatgggtggaacgtttatggcccttccagaagaatacagagattattttattcgaaatttacatgatgccttatcaggacatacttccaacaatatttacgagg

SEQ ID NO: 62292 - DNA, 958 bp, Homo sapiens
attccgcccctgcggcagagtggcgcccgcgcgtgactcccccctgccggctgcggaggtggggggggacggcgcccccgccgtgtgcgtggggcggggatggagcacgcgccctggagccccggagccagatgctctgacctttgaccctgccgttcagctctagggcccgtgcaggccacaccatgaacacctccccaggcacggtgggcagtgacccggtcatcctggccactgcaggctacgaccacaccgtgcgcttctggcaggcccacagcggcatctgcacccggacggtgcagcaccaggactcccaggtgaatgccttggaggtcacaccggaccgcagcatgattgctgctgcagttcagcctgtgtccctaggttaccagcacatccgcatgtatgatctcaactccaataaccctaaccccatcatcagctacgacggcgtcaacaagaacatcgcgtctgtgggcttccacgaagacggccgctggatgtacacgggcggcgaggactgcacagccaggatctgggacctcaggtcccggaacctgcagtgccagcggatcttccaggtgaacgcacccattaactgcgtgtgcctgcaccccaaccaggcagagctcatcgtgggtgaccagagcggggctatccacatctgggacttgaaaacagaccacaacgagcagctgatccctgagcccgaggtctccatcacgtccgcccacatcgatcccgacgccagctacatggcagctgtcaatagcaccctggtgcccttctcctgtctacttccgttggccatcggcatcctccaggaaggagaatttgagtccttggccaggcgtggcctcctgttcttggcttgccagggaaactgctatgtctggaatctgacggggggcattggtgacgaggtgacccagctcatccccaagactaagatccctgc

SEQ ID NO: 62293 - DNA, 919 bp, Homo sapiens
ccctttccgggcgggcaggcggcggaccccagtgtctttatccctcttttgcacagtcagcttctgcagctctcccgggctagcatggcagcgtggaagagttggacggccctgcggctctgcgccacagttgttgtacttgatatggtcgtctgtaaaggatttgtagaagatttagatgaatcgtttaaagaaaatcgaaatgatgacatttggcttgtagatttttatgcgccatggtgtggccattgtaaaaagctggaaccaatttggaatgaagttggtcttgagatgaaaagcattggttctccagttaaggttggaaagatggatgctacttcctattctagcattgcttcagagtttggagttcgaggttatccaacaattaagctattaaaaggggacttggcatataattatagaggaccacgaacaaaagatgatattattgagtttgctcacagagtatctggggctctaattcggccacttccaagtcaacaaatgtttgaacatatgcagaagagacaccgtgtatttttcgtttatgtaggtggagaatcacctttgaaagagaaatacatagatgctgcttcagaattgattgtatatacatacttcttttctgcctcagaagaagtggttcctgaggtaatatttaaaatttgattttaacgacacaattttatttattaaattattacttgatttaataaactaaattgtgattttattacttgattaaactattgagtttaatatcagatttatttactgcgatatgtgtggaaaaagtaaacatgctgattctttaaattggaaaaaaaaaagatttttggcaaaaaaaaaatcaaaaaaaagttttgtgtggggggaaaagtttaattgatcgggccccggggggaatttctgctca

SEQ ID NO: 62294 - DNA, 700 bp, Homo sapiens
ttttttttttttcctgatccccagctgcctgcaggctgggaaattcttgctgaaactgactattcacttggattccatctccttgcccaccttgcttgttactggcccatgatttgggagcaggtgctacttctgggggagctgcaaccccaggttttggctgtgctggtggcacttctggtgttttttcttcttcatgttgctcttgttttgatgcccaccctgtgccatctttaggtacaatgtttacattaggatcattgcctttgttttctgctttaagacttgggaggttagcaggtggaggcatacgccgtgaaataccgacttttccaagactctgtaatccatgtcgagctgcaactgtggttttctgtgtttctaatgatttccccttgtaagtattaaataaactgagtgttgcatactttttcccatcctttgcttttgtgctctggcctgacttctccgacatttcggtggaaactcatcgagtccaaaacctcctgccacaccccttaaaaccccagtccggtcagggtgagtgtcaagtttgcgcacttcgagggtctccgccgatctctgatcgaaagaagggggagggaaagctggggttaaaggggtggccggaagggccaccagactggaaaagccgaagctgcggatggacaaaccgccaaagcactttcgcagctttccg

SEQ ID NO: 62295 - DNA, 811 bp, Homo sapiens
  misc_feature (1)...(811): n = a,t,c or g
tcgacgatttcgtggaagcgtgagccgtaaccaggccaacccagaaaggctttctttctgagatttcacttccctgtcaactcttcagctcggtaagtgtcctggcactggttggcgctcccccgcactatggtattctctggacgcaaaggggcgcgtgccatgcagccccctactagcaacaagggcttccgggggagaggggagcagtggtgtggaagtggtttcctgcggcgctcttgctgaaggaaatgacgtcgatgacaggcgccccccgcggcctacccagctgctccctggttcgccagagacagcttaatcccgtctctgaaatgcgtttgctggctgggagcctagaagggatagtgggcgaggctccgccccgtggtggggcgctttccgtcggcgtgtgttttggggttgccatcggcccgtagtatgtgaaaattgtttttcagaggcaccaaataatgtcatctgaaatgttgccagcatttattgaaacttctaatgttgacaaaaagcaaggcataaatgaagatcaagaggagagccagaagccaagattaggtgaagggtgtgaaccaatatctaaacgacaaatgaaaaaactaataaaacagaaacaatgggaagagcaacgggaactccgcaaacaaaagcgaaaagaaaaacgcaagaggaaaaaattagagcgacaatgtcaaatggaaccaaactcagatggacatgacagaaaacgtgttcgaagagatgttgttcatagcacccttcgccttattattgactgtagttttgatcanttgatggt

SEQ ID NO: 62296 - DNA, 482 bp, Homo sapiens
gacccacgcgtccgcaacaatggcggcgcccgcggagtcgctgaggaggcggaagactgggtactcggatccggagcctgagtcgccgcccgcgccggggcgtggccccgcaggctctccggcccatctccacacgggcaccttctggctgacccggatcgtgctcctgaaggccctagccttcgtgtacttcgtggcattcctggtggctttccatcagaacaagcagctcatcggtgacagggggctgcttccctgcagagtgttcctgaagaacttccagcagtacttccaggacaggacgagctgggaagtcttcagctacatgcccaccatcctctggctgatggactggtcagacatgaactccaacctggacttgctggctcttctcggactgggcatctcgtctttcgtactgatcacgggctgcgccaacatgcttctcatggctgccctgtggagcctctacatgtccctgg

SEQ ID NO: 62297 - DNA, 825 bp, Homo sapiens
caagtgggattgtggtcagagctttgtggagggaaaaaaaacctggtgggggcaggagagtaaaaagaagaaacccaggcagacaggcagttggacacactgaggaagaccccccacgagtgggaaccccctggaaggaacacaccggccccggcccccaggaagggagcacaatggaggccgctcatgctaaaaccacggaggaatgtttggcctattttggggtgagtgagaccacgggcctcaccccggaccaagttaagcggaatctggagaaatacggcctcaatgagctccctgctgaggaagggaagaccctgtgggagctggtgatagagcagtttgaagacctcctggtgcggattctcctcctggccgcatgcatttccttcgtgctggcctggtttgaggaaggtgaagagaccatcactgcctttgttgaaccctttgtcatcctcttgatcctcattgccaatgccatcgtgggggtttggcaggagcggaacgcagagaacgccatcgaggccctgaaggagtatgagccagagatggggaaggtctaccgggctgaccgcaagtcagtgcaaaggatcaaggctcgggacatcgtccctggggacatcgtggaggtggctgtgggggacaaagtccctgcagacatccgaatcctcgccatcaaatccaccacgctgcgggttgaccagtccatcctgacaggcgagtatgtatctgtcatcaaacacacggagcccgttcctgacccccgagctgtcaaccaggacaagaagaacatgcttttctcgggcaccaacattgcagccggca

SEQ ID NO: 62298 - DNA, 752 bp, Homo sapiens
cccacgcgtccgcggacgcgtgggccgctaactcggctacggtgtatctgcgtctttggtcaggttgttccttggctaagagggcagtcgtcgcggacccacgcggttagcaaggcttagtgctcgggccggccgccttcacttccctcccggcttttcctcccgacttatccactttaggggcgtctcggagtgccggaggcccccggggaagagcggggtgccggtgtccgctccgggctcggatgggaagtggtgggaggagcgacccgggatgttcagtctgatggccagttgctgcggctggttcaagcggtggcgggagcctgtcagaaaggtgactcttttgatggtgggacttgataatgctggtaaaaccgcaacagcaaagggaatccaaggagaataccctgaagatgtagctcctactgttggattttcaaaaattaaccttagacaaggaaagtttgaagtcaccatctttgacttgggaggtggaataagaattcggggaatctggaagaattactatgctgaatcctatggggtaatatttgttgtggattccagtgatgaagagagaatggaagagacaaaagaggctatgtcagaaatgctaagacatcctaggatatcgggaaagcctatattggtgttggcaaataaacaagataaagaaggagctttaggagaagctgatgtcattgaatgtctatctctggaaaaattggtcaatgagcacaagtgcctgt

SEQ ID NO: 62299 - DNA, 412 bp, Homo sapiens
atgcacagtacccaggacaaatctctccacttggaaggagatcccaatccttctgcagccccaacatccacctgcgcacctaggaaaatgcccaaaaggatttcaatatccaaacaactggcttcagtgaaagctctgaggaagtgctcagatctggaaaaagctattgccaccactgctctgattttcagaaattcttctgactctgatggtaaacttgaaaaagctattgccaaagatctgctgcaaacccaatttaggaatttcgcagagggacaagaaaccaagccaaaatacagagagatcctttctgaacttgatgagcacacagaaaataagctagattttgaagacttcatgatcttgctcttaagcatcactgtcatgtcagatctgctacaaaatatacgga

SEQ ID NO: 62300 - DNA, 1599 bp, Homo sapiens
tttcgtgcctccagagcctccgggtctgggcggcgcttcggctcctcccgagccgcctgctagccccgcgccgcactccatccccacaggctggggacgggcccggtgcggctgtgtgggttcgggagcggagttgcagaatccaaggacccattttgttctttctccgcactgctttatgggaggcattatggcccccaaagacataatgacaaatactcatgctaaatccatcctcaattcaatgaactccctcaggaagagcaataccctctgtgatgtgacattgagagtagagcagaaagacttccctgcccatcggattgtgctggctgcctgtagtgattacttctgtgccatgttcactagtgagctctcagagaaggggaaaccttatgttgacatccaaggtttgactgcctctaccatggaaattttattggactttgtgtacacagaaacagtacatgtgacagtggagaatgtacaagaactgcttcctgcagcctgtctgcttcagttgaaaggtgtgaaacaagcctgctgtgagttcttagaaagtcagttggacccttctaattgcctgggtattagggattttgctgaaacccacaattgtgttgacctgatgcaagcagctgaggtttttagccagaagcattttcctgaagtggtacagcatgaagagttcattcttctgagtcaaggagaggtggaaaagctaatcaagtgcgacgaaattcaggtggattctgaagagccagtctttgaggctgtcatcaactgggtgaagcatgccaagaaagagcgggaagaatccttgcctaacctgctacagtatgtgcggatgcccctactaacccccaggtatatcacagatgtaatagatgctgagcctttcatccgctgtagtttacaatgcagggatctggttgatgaagcaaagaagtttcatctgaggcctgaacttcggagtcagatgcagggacccaggacaagggctcgcctaggagccaatgaagtgcttttggtggttgggggctttggaagccagcagtctcccattgatgtggtagagaaatatgaccccaagactcaggagtggagctttttgccaagcatcactcgtaagagacgttatgtggcctcagtgtcccttcatgaccggatctacgtcattggtggctatgatggccgttcccgccttagttcagtggaatgtctagactacacagcagatgaggatggggtctggtattctgtggcccctatgaatgtccgacgaggtcttgctggagccaccaccctgggagatatgatctatgtctctggaggctttgatggaagcaggcgtcacaccagtatggagcgctatgatccaaacattgaccagtggagcatgctgggagatatgcagacagcccgggaaggtgccggactcgtagtggccagtggagtgatctactgtctaggaggatatgacggcttgaatatcttaaattcagttgagaaatacgaccctcatacaggacattggactaatgttacaccaatggccaccaagcgttctggtgcaggagtagccctgctgaatgacca

SEQ ID NO: 62301 - DNA, 616 bp, Homo sapiens
  misc_feature (1)...(616): n = a,t,c or g
tttcgtggacggtgtgcgggccggccagccctggacgaaaaaaaagggcccctccaggccagtctgggcaccctgggatagcggctgcagccatcagcaggggcagacggcaggtggcctggttgctgcagctcccaggatcagctctgccctccccccaaacgccagcctcgtcaccgctccagggcacctccagcagtaacaggtggttgcagcaggtggcagccagcccctggatgagccaaggtctcttccccagccaggcatggccgactctgcacaggcccagaagctggtgtacctggtcacagggggctgtggcttcctgggagagcacgtggtgcgaatgctgctgcagcgggagccccggctcggggagctgcgggtctttgaccaacacctgggtccctggctggaggagctgaagacaggttcttgttgggggagcttgtggtggagagggtgtggacgcttccccaacccttcccaagctgggatccccacccctgcagtggaacagatgatgctggtttctgtccacatggatgggtcgagtgagtcncnnggggnnttgcgcagggtcntcatggntatttgggggggnnnccctggtcct

SEQ ID NO: 62302 - DNA, 435 bp, Homo sapiens
tttcgtctggtggtggtcgttttggttctgtgtggtgtttcaccaacttcggcctatggctctgtttgacgtcaccgaagtgacggaacggaaaagcgcgagaagcggctcggttcccaccacggagaggcgggagtgagtcaactgacaagcgctgggggcagtggcgtccttgtcttgcctttgtctctcccgccccgctcttccctggctgggctggcggaggccttgctgatgaacctgactgagggtcccctggcgatggcagaaatggaccctacacagggccgtgtggtctttgaggacgtggccatatatttctcccaggaggagtgggggcaccttgatgaggctcagagattgctgtaccgtgatgtgatgctggagaatttggcccttttgtcctcactaggttcttggcatggagctgaggat

SEQ ID NO: 62303 - DNA, 1385 bp, Homo sapiens
ctggcctccgcaccgacgcggcccgggctggagccgagccggggccgagctgcaggccggaccggagccggatctgtacccgctgagacgtggaaacatggaggcctgagccggtgtgcgccacctgggctgcggcggcgacagcgacttctcctgacccctctgccaccctcccatccgtccgcgggtccgtggagctggagcagatcccccagccggctgagacaggttgtcttttggaaatgcaggtttaaggacaaattatctgcttaagctagaagatgggatcgaatagcagcagaatcggcgatcttcctaaaaatgagtacttgaaaaagttatcaggcacggaatctatctctgagaatgacccgttctggaatcagcttctctcattttctttccctgcaccaactagcagtagtgagttgaaactcttggaggaagcaaccatttcagtctgcaggtcattagttgaaaacaatcctcgaacaggaaatcttggtgcactaattaaggtcttcctttctagaaccaaagaactaaaactttcagcagaatgtcagaaccacatcttcatttggcagacacacaatgctttgtttattatttgctgtttgctgaaagtgttcatctgtcagatgtcagaggaggaattacaacttcattttacttatgaagaaaaatctcctggcaattacagttctgactcagaagatcttttggaagaattgctgtgctgtttgatgcagttgatcactgatattccactcttagatattacatatgaaatatcagtagaagctatatcaacaatggttgttttcctttcctgccaactcttccacaaagaagttttgcgacagagcatcagccacaagtatttgatgcgaggtccatgtcttccatacaccagcaaacttgtgaagaccttattatataactttatcagacaagaaaagccacctcctccaggggcccatgttttccctcagcagtcggatgggggaggactgctttatggacttgcatcaggagtagcaacaggactctggactgtcttcacactaggtggtgtgggcagcaaagcggctgcctctccagagctttcttcccctctggccaaccagagtctcctgcttctgctggtgttggccaatctgacagatgcctcagatgcgccaaacccctacagacaagccattatgtccttcaagaacacacaagatagcagtcctttcccctcatcaattccacatgccttccagatcaactttaatagtttgtacacagctctttgtgaacagcagacatctgatcaagcaactctcctcttgtataccttgctccatcaaaatagtaatattagaacatacataataaca

SEQ ID NO: 62304 - DNA, 437 bp, Homo sapiens
tttcgtggctgggacacacctactccaattttctcagctttctctccggctgcgggctgcgcgccttcctgctccgagtctctgcacctccctcaggagcctgtcagcctggccctcgtgagaggggcgccagcccagcagcctgctctggggcaccctcccctacctgaagggcacagggtttcgggagttttccaccatgactattgccctgctgggttttgccatattcttgctccattgtgcgacctgtgagaagcctctagaagggattctctcctcctctgcttggcacttcacacactcccattacaatgccaccatctatgaaaattcttctcccaagacctatgtggagagcttcgagaaaatgggcatctacctcgcggagccacagtgggcagtgaaggaccggatcatctctggggatgtggccc

SEQ ID NO: 62305 - DNA, 375 bp, Homo sapiens
tttcgtcggagacagaggcagaggcagaagctggggctccgtcctcgcctcccacgagcgatccccgaggagagccgcggccctcggcgaggcgaagaggccgacgaggaagacccgggtggctgcgcccctgcctcgcttcccaggcgccggcggctgcagccttgcccctcttgctcgccttgaaaatggaaaagatgctcgcaggctgctttctgctgatcctcggacagatcgtcctcctccctgccgaggccagggagcggtcacgtgggaggtccatctctaggggcagacacgctcggacccacccgcagacggcccttctggagagttcctgtgagaacaagcgggcagacctggttttcatcattg

SEQ ID NO: 62306 - DNA, 375 bp, Homo sapiens
tttcgtggcggtggctggggcggtgtccggggagccgctggtgcactggtgcacccagcagttgcggaagactttcggcctggatgtcagcgaggagatcattcagtgagaacagttcgggtccaagcggggaaggagctctgggatgtgcactgcctgagcgaaccgggaagcggggaggactgaaaagttaagagagaaatgtgataaaggggctgcagtctgtagtctgtaggcgtcgaattttggcctccacctttgtagtttagtttctggaatagggtgtccggctccacagtctgccggtcgggcttttttcctgggaagacgcccaatctgtaataattataaatgcaaggctgtcccaggagccag

SEQ ID NO: 62307 - DNA, 1342 bp, Homo sapiens
tttcgtgcggcccccgagagccgcgcttttgtaagagctggccccttacatatggaaatgacactcacgcgggtccccattcgcgtccttttgaaggacgcccgcccggaaccgctgcgccggctgcgaagtattgtcccgtttctccagccctaacaaagcgtcctccttcgctttgcagagcgctggaggcgggctgccggctgtgcgggcgctccggagagaccgacagaaggtgagcactgtgggctatgggatggatgaggtggagcaggaccagcatgaggcccgactcaaggagctgtttgacagttttgacacgacgggcacagggtccctggggcaggaggaactcaccgacctttgccacatgttgagcttggaggaggtggccccagtgctgcagcagacattacttcaggacaacctcttgggcagggtacattttgaccaatttaaagaagcattaatactcatcttgtccagaactctgtcaaatgaagaacactttcaagaaccagactgctcactagaagctcagcccaaatatgttagaggtgggaagcgttacggacgaaggtccttgcccgagttccaagagtccgtggaggagtttcctgaagtgacggtgattgagccactggatgaagaagcgcggccttcacacatcccagccggtgactgcagtgagcactggaagacgcaacgcagtgaggagtatgaagcggaaggccagttaaggttttggaacccagatgacttgaatgcttcacagagtggatcttcccctccccaagactggatagaagagaaactgcaagaagtttgtgaagatttggggatcacccgtgatggtcacctgaaccggaagaagctggtctccatctgtgagcagtatggtttacagaatgtggatggagagatgctcgaggaagtattccataatcttgatcctgacggtacaatgagtgtagaagattttttctatggtttgtttaaaaatggaaaatctcttacaccatcagcatctactccatatagacaactaaaaaggcacctttccatgcagtctttcgatgagagtggacgacgtaccacaacctcatcagcaatgacaagtaccattggctttcgggtcttctcctgcctggatgatgggatgggccatgcatctgtggagagaatactcgacacctggcaggaagagggcattgagaacagccaggagatcctgaaggccttggatttcggcctcgatggaaacatcaatttgacagaattaacactggcccttgaaaatgaacttttggttaccaagaacagcattcaccaggcctgtatt

SEQ ID NO: 62308 - DNA, 446 bp, Homo sapiens
  misc_feature (1)...(446): n = a,t,c or g
tttcgtcggcggccacggaagcggccaagggggcggtggcgcaaagaggggtgcggagcgggcggaagaggcgtctgtgtcgcagcttggtctcagaggagcatcgctgggaacaacgactatcgtctattccacaagatgagtaacagccaccctcttcgcccctttactgcagtgggggaaattgatcatgtgcacattttgtctgaacatatttgtgccttgttgattggggaagaatatggcgacgtcacattcgtgggggaaaagaaacgttttcctgcccacagggtaattttagcagccaggtgccaatattttcgagcattattatatggtggaatgcgagagtctcagcctgaagcagaaattcctctccaagacaccactgcagaagcattcacaatgctactcanatatatctacactgggcgggcaacgctgac

SEQ ID NO: 62309 - DNA, 588 bp, Homo sapiens
acatttcgtgaccagggttgggcgcagcggcggaggtggcttttgggctgcgcgagctgggagagctgggaggcggcgatcgcagctgggccgggacttccttcctccaccgcacggcaacaaaacaaccctgcggcaggcactgagtgcttcgcagctgtctgggcgagaggcacagcgatgggctccgtgctgagcaccgacagcggcaaatcggcgcccgcctctgccaccgcgcgggccctggagcgcaggagggacccggagttgcccgtcacgtccttcgactgcgccgtgtgccttgaggtgttacaccagcctgtccggacccgctgtggccacgtattctgccgttcctgtattgctaccagtctaaagaacaacaagtggacctgtccttattgccgggcatatcttccttcagaaggagttccagcaactgatgtagccaaaagaatgaaatcagagtataagaactgcgctgagtgtgacaccctggtttgcctcagtgaaatgagggcacatattcggacttgtcagaagtacatagataagtatggaccactacaagaacttgaggagacagcg

SEQ ID NO: 62310 - DNA, 682 bp, Homo sapiens
tttactggcaagtttacaaaattaattttattggccatcctggaatggttagtgaacaaatttgctgtccaggtaaatttgtgaattagctatcatcagaaggaagtgcttttatcttagtaataggcctttttcagaactaaaattaatgacaatccatcctgcttatgccctaggtgacatccctggttcagttactcagtgatcccttttataggacacttgaaggcttccagatgttggttgaaaaagagtggctctcttttggtcacaaattcagtcagaggagcagcttgaccctcaactgtcaggggagtggttttgctccagtcttcttacagttcttagactgtgtacaccaggtaagtagagcaagcttgagttgacttgatatgaaggaaagaacacaacatactagcattgatggagcattgcgatggtgtgcccggtaccttcctgtcataactctgattaactcagccacaggacatgctgaaatcttagcagtagactccttctgggtcgtggcagataaaatgagttcacgtcagggctggctctcaggaggcgctcagtgctcgtggctttcctccccggtggacagaaccccggggcagctccccgcgccctgacgcccagagcggagcggcccggagcggagcgaccaccgcacactggacac

SEQ ID NO: 62311 - DNA, 802 bp, Homo sapiens
aacgtttcatctaaatggtgtgcaagcggaagggggccggtgttcttttctgcaccccctgcaagcagccgctctgccctccgccctcttctcccacctgcgaaggcgcccccaccgaagctggcggggacgctgtccgagccgggggcaccgcccccttgtccgaccagcagcagcatgaatgtggcgacacggactgtcgagagtcccccgaaaacccctgcgactgtcacagggagccgccccccgaaaccccagacatcaaccagctgccgccgcccatcctgctcaagatattttccaatttgtcactggaagagcggtgcctttccgcatcattggtttgcaagtactggcgtgacctttgtttagacttccagttttggaagcagctggatcttagtagtcgtcagcaggtcactgatgaattgttggaaaaaattgcatcaagaagtcagaatataattgaaatcaacatttctgattgtcgcagtatgtctgataatggcgtatgtgttttagcatttaaatgtcctggacttcttaggtatacagcctacaggtgtaaacagctttctgacacctctattattgcgggtgcctctcactgtcctttacttcagaaagtgcatgtaggcaaccaggacaaactcactgatgaaggactcaagcagctgggctcaaaatgcagagaactcaaagatattcatttcggccagtgttacaagatctcagatgaaggcatgatcgtcatagctaagggctgtctgaaattacaaaggatatacatgcaggaaaacaa

SEQ ID NO: 62312 - DNA, 730 bp, Homo sapiens
tttcgtgcctggggcagaaatggctgcaagtggccgaggtctctgcaaggctgtggccgcctctcccttcccggcgtggagacgagataacacggaagccaggggaggtctgaagcctgagtatgatgcggtggtgataggagcaggacacaacggactggtggctgcagcgtacctgcagagactgggggtgaacaccgccgtcttcgagaggcgccatgtgatcgggggtgcagctgtcactgaggagatcatcccagggtttaagttctcccgtgcgtcctacctgctcagcctgctgaggccgcagatttacactgatctggagctgaagaaacatgggctgaggcttcatcttcgaaacccctactccttcacccccatgctggaagagggtgcaggcagcaaggtgcccaggtgccttctgctgggcacagacatggcagaaaaccagaagcagatcgcccagttctcccagaaggatgcccaggtctttcccaaatatgaggagttcatgcatcgcttggcattagccattgaccctctgctggatgcggcccccgtggacatggcggccttccagcatggctccttgctgcaaaggatgaggtcgctctccaccctcaagcccctgctgaaggcaggccgcatcctgggagcccagcttccccgatattatgaggtcctcacagcttccattaccaaggtgctggatcagtggttcgagtct

SEQ ID NO: 62313 - DNA, 491 bp, Homo sapiens
tttcgtcatcaacacggcggcggcggcggcggtttcttccaacaggctctggggcgccgagcggacaggaacgcagcacgggggctccgaggcggggtctgggtgttgaggggcgactggagccatggcggagtcggcgcctgctcggcacaggagaaaacgacgctccacacctttaacttcttccacacttccttcacaagcaacagagaaaagctcctattttcagaccaccgagatttcactctggacggtggtggccgctattcaggctgtggagaagaagatggagtcccaggctgcccggctacagagcctggaggggcgcacggggacagccgagaagaagctggctgactgcgagaagatggccgtggagttcgggaaccagctggagggcaagtgggccgtgctggggaccctgctgcaggagtatgggctactgcagaggcggctggagaacgtggagaacctgctgcgcaacaggaact

SEQ ID NO: 62314 - DNA, 801 bp, Homo sapiens
tttcgacacagagctgctgctgctggactttggtgtttgtggatggcacgacaggcggagaagaatttcctctgtgtgcgcatttaaacaggtcggtaggctccacgacaaaagtccacccttctgtaaatcacctgctgtggctatgatgctctgagttcaatacgtaagaacctttgctgtctatggatctgctctaaaccttatagcctgcttatgggggaaggtgacgccttctgggccccatctgtccttcctcacagcaccctcagcaccttaagccaccaccctcagccacaatttggcagagggatggagtccaaggtctcacaaggtggcctgaatgtgaccctcaccatccgcctgctgatgcatggaaaggaagttggaagcatcatcgggaagaaaggagaaactgtgaagaagatgcgtgaggagagtggtgcaaggatcaacatctcagagggaaactgcccagagaggattgtgaccatcacaggccccacagacgccatcttcaaggcctttgccatgatcgcatacaagtttgaggaggatatcatcaactccatgagcaacagccctgccaccagcaagcccccagtgacgctgaggctggtggtgcctgccagccagtgtgggtccctgatcggcaaaggaggctccaagatcaaggagatcagggaggtaacaggaccttcccagcctgggccgctgcggagcctctaggcgggctgcgggtggtggccacaggccaggcagccttcctgagccttgtccctgctgtctgcaagcccaatg

SEQ ID NO: 62315 - DNA, 929 bp, Homo sapiens
tttcgtgtcatcgcccccgccccgcccggtccagccagctcggcccgggggcttcgggctgtcgggccggcgctcccttctctgccaggtggcgagtacacctgctcacgtaggcgtcatgaggtctccggttcgagacctggcccggaacgatggcgaggagagcacggaccgcacgcctcttctaccgggcgccccacgggccgaagccgctccagtgtgctgctctgctcgttacaacttagcaattttggccttttttggtttcttcattgtgtatgcattacgtgtgaatctgagtgttgcgttagtggatatggtagattcaaatacaactttagaagataatagaacttccaaggcgtgtccagagcattctgctcccataaaagttcatcataatcaaacgggtaagaagtaccaatgggatgcagaaactcaaggatggattctcggttcctttttttatggctacatcatcacacagattcctggaggatatgttgccagcaaaataggggggaaaatgctgctaggatttgggatccttggcactgctgtcctcaccctgttcactcccattgctgcagatttaggagttggaccactcattgtactcagagcactagaaggactaggagagggtgttacatttccagccatgcatgccatgtggtcttcttgggctccccctcttgaaagaagcaaacttcttagcatttcatatgcaggagcacagcttgggacagtaatttctcttcctctttctggaataatttgctactatatgaattggacttatgtcttctacttttttggtactattggaatattttggtttcttttgtggatctggttagttagtgacacaccacaaaaacacaagagaatttcccattatgaaaaggaatacattctttcatcattaa

SEQ ID NO: 62316 - DNA, 944 bp, Homo sapiens
tttcgtgtgaggggaggggcgcgtgctaaaccagaagaggtaaaccaatgcagtgagagagaggtggttgtgggctccacagcttctgatttggaggaagctgcgagaccgagagcctaggagcaccttccacgcccagggctgtggtacaggttggtgggggaggggcgccacgcggtgtttggcaggaaggggaggcctctctactgaccggaagctgcgctagaaaaagaaggaggagactgcggcgcagcagcgactagtgggagtccgatgtgggagaggggctgcggccaccgccaccgccgccgccaccaggaaggcggaggacgcaggagccaagagcaagggacgccgccacggtcatcttcgcctgccccgccgccctcttagagacactcattgcctatggatcatcctctcccagcttttgcaagcaccgggctgctcgcccgctgattttcctcctccataggctcactgcggaggcaacggcgaggtgtccgatttgtgcacttgaggcccgcaatccgggacggtggggaatctgcgcctcctggccgggcatgaagaccccgtttggaaaggcagctgcagggcagcggtccaggacgggcgctggccacggcagtgtgtctgttaccatgataaagaggaaggctgcacacaagaagcataggagccgacccacctcccagcctcgggggaacatcgtgggctgcataattcagcacggatggaaagatggagatgaacctctaacacagtggaaaggaaccgttctggatcagctcctttgaataaacctgcccaccaccaagaacccatacatgactttcttttcattgtatcaaacgaatgtgtccaccggtgtgagcaccagcaactcacttcttcctcagacatctctaaagctggacagaatatgagggacaatatcgttt

SEQ ID NO: 62317 - DNA, 1405 bp, Homo sapiens
  misc_feature (1)...(1405): n = a,t,c or g
cgcgatgactgtgagtggtccagggacccccgagccccggccggccacccccggggccagctcagtggagcagctgcggaaggagggcaatgagctgttcaaatgtggagactacgggggcgccctggcggcctacactcaggccctgggtctggacgcgacgccccaggaccaggccgttctgcaccggaaccgggccgcctgccacctcaagctggaagattacgacaaagcagaaacagaggcatccaaagccattgaaaaggatggtggggatgtcaaagcactctaccggcggagccaagccctagagaagctgggccgcctggaccaggctgtccttgacctgcagagatgtgtgagcttggagcccaagaacaaagttttccaggaggccttgcggaacatcgggggccagattcaggagaaggtgcgatacatgtcctcgacggatgccaaagtggaacagatgtttcagatactgttggacccagaagagaagggcactgagaaaaagcaaaaggcttctcagaacctggtggtgctggccagggaggatgctggagcggagaagatcttccggagtaatggggttcagctcttgcaacgtttactggacatgggagagactgacctcatgctggcggctctgcgtacgctggttggcatttgctctgagcatcagtcacggacagtggcaaccctgagcatactgggaactcggcgagtagtctccatcctgggcgtggaaagccaggctgtgtccctggctgcctgccacctgctgcaggttatgtttgatgccctcaaggaaggtgtcaaaaaaggcttccgaggcaaagaaggtgccatcattgtgggtgagtggaagcaggtctggggtcttttggacgttactgtcatggaagggatggggctgagccagccaggccagttttttggggaccagacttgcagctgcaggttgtttggaatacggtttggtgacattattttactctagattctcagcaaccaaggtgcctcaggacaaagctggagctcagtctggagcctgggatgcggatccccccttccctgtgtctccctggtttgttggagaagttgaagggtcaaactgggctgggctgctgtggagcccactgatgtcttcttgttgttgccagatcctgcccgggagctgaaggtcctcatcagtaacctcttagatctgctgacagaggtgggggtctctggccaaggcccgagacaatgccctgaccctcctgattaaagcggtgccccggaagtctctcaaggaccccaacaacagcctcaccctctgggtcatcgaccaaggagctggtttgagggccaagggctgccgggaagctacgggccatccancgggtctgcttctgcagga

SEQ ID NO: 62318 - DNA, 599 bp, Homo sapiens
tttcgtggcgggttccgcacggaggttgtgacccctacggagccccagcttgcccacgcaccccactcggcgtcgcgcggcgtgccctgcttgtcacaggtgggaggctggaactatcaggctgaaaaacagagtgggtactctcttctgggaagctggcaacaaatggatgatgtgatatatgcattccaggggaagggaaattgtggtgcttctgaacccatggtcaattaacgaggcagtttctagctactgcacgtacttcataaagcaggactctaaaagctttggaatcatggtgtcatggaaagggatttactttatactgactctgttttggggaagcttttttggaagcattttcatgctgagtccctttttacctttgatgtttgtaaacccatcttggtatcgctggatcaacaaccgccttgtggcaacatggctcaccctacctgtggcattattggagaccatgtttggtgtaaaagtgattataactggggatgcatttgttcctggagaaagaagtgtcattatcatgaaccatcggacaagaatggactggatgttcctgtggaattgcctgatgcgatata

SEQ ID NO: 62319 - DNA, 1052 bp, Homo sapiens
tttcgtgcctccgctcccgcgcggttgggagtgtccagcgccctccgcgatttgggctccagcgggcagggtgacttcctttttctgcccactctggtaacttattgctctgctgggctctttcccttagggtctctggccctgttcttgccccagcatgacttttatcgggacgccgttgtggaagcctcacgcaggagccctgcccccgtggagaagatcccactggtgactccaaccctaccaccatgaatggggtcctgatcccccatacgcccatcgcagtggacttctggagcctgcgccgggctggcaccgcacgtctcttcttcttgtctcacatgcactcggaccacaccgtgggcctgtctagcacctgggcccggcccctctactgctccccaattacagcccacctcttgcatcgtcacctacaggtatctaagcaatggatccaagccctggaggttggtgagagccatgtattacccctagatgaaattggacaagagaccatgaccgtaaccctcctcgatgccaatcactgtcctggttctgtcatgtttctctttgaaggatattttggaaccatcctctacacaggtgattttcgatacacaccatccatgctaaaggagccagccctgacactggggaaacagatccatactttatacctagacaacaccaattgcaatccagccctggttcttccttcccgacaagaagctgcccaccagattgtccagctcattcgaaaacacccacaacataacataaagattggactctacagcctgggaaaggaatcactgctggagcagctggccctggagtttcagacctgggtggtattgagtcctcggcgcctggagttggtacagctactgggcctggcagatgtgttcacagtggaggagaaggctggccgcatccatgcagtagaccatatggagatctgccattccaacatgctgcgttggaaccagacccaccctacgattgctatccttcccacaagccgaaaaatccacagctcccacccgtgtatt

SEQ ID NO: 62320 - DNA, 603 bp, Homo sapiens
  misc_feature (1)...(603): n = a,t,c or g
gtccggacttcccgggtcgacgatttcgtcggcggtgctggtggtgctcggcggccggagccggatcctgtagccgggtgtgggcccgtgtctgtccgtccctccttcggccccctctcttgtcttccggagtgtggctggcggagctgggatggcggaacgaggcctggagccgtcgccggccgcggtggcggcgctgccgcctgaagtgcgggcgcagctggcggagctggagctggagctctcggagggggacatcacccagaagggctatgaaaagaaaaggtccaaactcctatctccttacagcccgcagacacaagaaactgattcagcagtacagaaagaacttagaaaccagacacctgctccatctgcagctcaaacttctgctccctctaagtaccaccgaactcgatctgggggagccagggatgaacgatatcgatcaggtgaggagaagctgcagaatggccagctgaatcgttttcctaacagtagtatgaactgtgtatcctgagagcttctaatacttgnnnnnnnnnnccctatgaggcaccaacagttttatattaactcattcaccaatcattaattttgtac

SEQ ID NO: 62321 - DNA, 384 bp, Homo sapiens
ttcagttctcctgggctccagcctcctgcaaggactgcaagagttttcctccgcagctctgagtctccacttttttggtggagaaaggctgcaaaaagaaaaagagacgcagtgagtgggaaaagtatgcatcctattcaaacctaattgaatcgaggagcccagggacacacgccttcaggtttgctcaggggttcatatttggtgcttagacaaattcaaaatgaggaaacatcggcacttgcccttagtggccgtcttttgcctctttctctcaggctttcctacaactcatgcccagcagcagcaagcagtcattgaagtcaacaagagagacatagtcttcctggtggatggctcatctgcactgggactggccaactt

SEQ ID NO: 62322 - DNA, 1064 bp, Homo sapiens
tttcgtctggaacagctgctgacagagttggatgacttcctcaagattcttgaccaggagaacctgagcagcacagcactggtgaagaagagctgcctggcggagctcctccggctttacaccaaaagcagctctgatgaggagtacatttatatgaacaaagtgaccatcaacaagcaacagaatgcagagtctcaaggcaaagcgcctgaggagcagggcctgctacccaatggggagcccagccagcactcctcggcccctcagaagagccttccagacctcccgccacccaagatgattccagaacggaaacagcttgccatcccaaagacggagtctccagagggctactatgaagaggctgagccatatgacacatccctcaatgaggacggagaggctgtgagcagctcctacgagtcctacgatgaagaggacggcagcaagggcaagtcggccccttaccagtggccctcgccggaggccggcatcgagctgatgcgtgacgcccgcatctgcgccttcctgtggcgcaagaagtggctgggacagtgggccaagcagctctgtgtcatcaaggacaacaggcttctgtgctacaaatcctccaaggaccacagccctcagctggacgtgaacctactgggcagcagcgtcattcacaaggagaagcaagtgcggaagaaggagcacaagctgaagatcacaccgatgaatgccgatgtgattgtgctgggcctgcagagcaaggaccaggctgagcagtggctcagggtcatccaggaagtgagcggcctgccttccgaaggagcatctgaaggaaaccagtacaccccggatgcccagcgctttaactgccagaaagtaagcctctgccctgcctggagggagagtccccttccatgttttctctgtaaaaattaaaagtgcaaaattgggagcttcgtttttatatttcagtccaattaataagaaacatacaatgcttgaggccgggcagggtgggctcacgcctgtaagccaagcactttgggaggctgaggcaggtggatcacctgaaa

SEQ ID NO: 62323 - DNA, 374 bp, Homo sapiens
tttcgtcagctgtgagcaggttcggtggtgccgcgggctggggtaggcggcggtggggtccctggctctggggcactgggaagatcgcgagtcgtgcgcgtgggaaggtcctccggctcatctttgctccccaggagcagcatatttcgcatctgccagaggttagagttacttgttattggtaaatagccactatggagactaaggaccagaagaaacaaagaaagaaaaacagtggacccaaagatgaaaagaaaaagaagcggcatctgcaggatctccagctaggagacgaagaagatgcccagaagagaaatcccaaagcttttgcagttcagtctgctgtgtggatggctcgatcctttcacaggact

SEQ ID NO: 62324 - DNA, 988 bp, Homo sapiens
tttcgtgtcaacatgcaagatggcggcccatcaccggcagaacacagcaaggcggaggaaagtgcaggtatggaagcccggttcctcggtcttccggacgcggccggcagctccgggcccactccagctagaaggtgcccggcgccacgaccagctggggtttcctatgttattcgagatgaagtggagaagtacaaccgaaatggagtcaatgctctgcagctggatccagcactaaatagacttttcacagccggtcgagactctatcataagaatatggagtgtcaatcagcacaagcaagatccatatatagcatctatggaacaccatactgattgggtaaacgacattgtactctgttgtaatgggaaaacattaatatctgcttcttctgacacgacagtaaaagtatggaatgcacacaagggattttgcatgtcaacattaaggacacataaggattacgtaaaggccttagcatatgccaaggataaagaactagtagcatcagctgggttggacagacaaatattcctttgggatgtgaatactctaacagcattgactgcctcaaataacactgtcacaacttcttctttaagtggaaacaaagattccatttatagcctggccatgaatcaactgggaacaatcattgtatcagggtccactgaaaaggtgttacgggtatgggatccaagaacatgtgcaaaactaatgaagcttaaagggcacacggataatgtgaaggcattgctattaaacagagatggcacgcaatgcctgtcaggcagttctgatgggacaattcgcctttggtcccttggccagcagagatgtatagcaacataccgagtccatgatgaaggtgtttgggcgctgcaagtcaatgatgccttcacacatgtgtattctggtggaagggacaggaagatttattgtacagacctaagaaaccctgacattcgggtgctaatttgtgaag

SEQ ID NO: 62325 - DNA, 617 bp, Homo sapiens
gcggagtgatcgtgtggaatcgcgggtcgcggacgctcgccgccggccatagctcagcctagcgccgccaaggccgacggccctcagcctctgccatggacttcgaggacgattacacacactccgcctgcaggaatacttatcagggctttaatggaatggatcgtgattatggccctggatcttatggagggatggatcgtgactatggccatggatcctatgggggtcagagatccatggattcctacctaaaccagtcatatggcatggacaatcacagtggtggtggtgggggtagcaggtaaattgcttaatcatttggccaaataattagacaactataagattttggatatattattttaagtactctttaggcatgttatgatacttgaacttcactgtttgctatagaatcatcaccttaaatatttaaaggtgttaattaatgggtataaaatttaaatcagtattactggcagacgttattttaggaaaacaccagataactatatcatgtcaatataatagagtaagatacactttttagcagtgaacttttaaaaaattcttttacttttaacttcttgtcaatcaaagtatcctgaaaaatg

SEQ ID NO: 62326 - DNA, 1133 bp, Homo sapiens
ggccgattcgccgtgtggcgggttcgggtcccgcctcctgactctggcctctagtccctgagtcccgggcgggctgcattcgtcggggaaacctctcctcgaccaggggcacctctactcgaccaggggcgacggcgtactttgggcttcatcatggaggactacctgcagggttgtcgagctgctctgcaggagtcccgacctctacatgttgtgctgggaaatgaagcctgtgatttggactccacagtgtctgctcttgccctggctttttacctagcaaagacaactgaggctgaggaagtctttgtgccagttttaaatataaaacgttctgaactacctctgcgaggtgacattgtcttctttcttcagaaggttcatattccagagagtatcttgatttttcgggatgagattgacctccatgcattataccaggctggccaactcaccctcatccttgtcgaccatcatatcttatccaaaagtgacacagccctagaggaggcagtagcagaggtgctagaccatcgacccatcgagccgaaacactgccctccctgccatgtttcagttgagctggtggggtcctgtgctaccctggtgaccgagagaatcctgcagggggcaccagagatcttggacaggcaaactgcagcccttctgcatggaaccatcatcctggactgtgtcaacatggaccttaaaattggaaaggcaaccccaaaggacagcaaatatgtggagaaactagaggcccttttcccagacctacccaagagaaatgatatatttgattccctacaaaaggcaaagtttgatgtatcaggactgaccactgagcagatgctgagaaaagaccagaagactatctatagacaaggcgtcaaggtggccattagtgcaatatatatggatttggaggcctttctgcagaggtctaacctccttgcagatctccatgctttctgccaggctcacagctatgatgtcctggttgccatgactatctttttcaacactcacaatgagccagtgcggcagttggctattttctgtccccatgtggcactccaaacaacgatctgtgaagtcctggaacgctcccactctccacccctgaagctgac

SEQ ID NO: 62327 - DNA, 443 bp, Homo sapiens
catgattacgcccagcttggcacgaggatttccgtgaaggagtaggcggaaatcaccattgtgcggctgaaattttcgcgcgtggtgacgtctgcgtagcgacccttcagttcggtcttgtcggagaagccgatggcgtgaacgatgaaatcgagcttgccccacttcttttcgacttcggcaaagaccgcatcgaccgactcgatatcttcaacatcgcaaggcagtacgaaatcggagccgacctgttcggccagcggctttacgcgcttgccgagtgcatcaccttgataggtgaaggctagttcggcgccctgtgctgcgagttgctttgaaattccccaagcgagtgagtgattattcgcgacccccatgatgaggccgcgtttgcctttcatcaaaccttccatattttccctctccctcagccctgatagcgctgg

SEQ ID NO: 62328 - DNA, 487 bp, Homo sapiens
aagtatgttccctactcggagtagcttcagccaagttttagaggaaacttacatgcttgctgtaactttggatgaatggaaaaagaaactggaatctcccaacagagaaattattattttacacaatccaaagcttatggtgcattaccagccagttgcagggtctgatgattggggttcaacacccacggagcagggtcgaccaagaactgtgaagagaggagttgagaacatctctgttgacattcattgtggtaatgttaatcgtttattttttcttacctttggatgtatttgtttactccttaaattgtgacctttttctgtggatttagattacctcaaggcttaaaaatcatctttaatcatatgggtttattccaagttgagattagcatcacttcgtctactaagaatcttaatagatgtagatatatcttttaatacatatggtaggatgggtacaatttggccatactatcctagg

SEQ ID NO: 62329 - DNA, 687 bp, Homo sapiens
  misc_feature (1)...(687): n = a,t,c or g
ccagctggtggaattcccgctgctggcgagctgtgccccacgctcccgctgcaacagtcccgggcatcgcagctgccagtcaaggctaggaggcggtcggggactccgcctcctcccgacccgtaggtctgggagcgcaagtcctgttgcagtcttgcaaagtgtaaagctgtcagccgcagagcacggaggaaagacggagagaatggaagagctcctgtccggtgtgccagcagcccggactggcggtgagcgcgagggcggctactgagaagcccggcgacggaggaacgcaggtctgctgccagggattgaggagactgaagaatgctgaagacaggctgatgggctcagctggtaggctccactatctcgccatgactgctgaaaatcccactcctggagacctggctccggcccccctcatcacttgcaaactctgcctgtgtgagcagtctctggacaagatgaccacactccaggaatgccagtgcatcttttgcacagcttgcctgaaacagtacatgcagctggcaatccgagaaggatgtgggtctcccatcacttgccctgacatggtgtgcctaaaccacgggaccctgcaggaagctgagattgcctgtttggtacctgtggaccagnttcaactttatcagaggataaaatttgaaagagaagttcatctgg

SEQ ID NO: 62330 - DNA, 487 bp, Homo sapiens
agtgcggtggaattcctttaatgaccggggtagtttgagccatttctgcgtcttgcaggacattttgaacgaaccccctttgcttgaggctcgcaaccacccgatgatcgatgatcgtctcaggggaaaagaagccttggcgaagagcagaggtttagaggcacaattctgctttccctggaactgtgtcattcaggactctgcaaattccctaaagtaggaggaaaaatgaccatgtccaagtaggaggcagtgaccttcaaggatgtggcagtggtcttcactgaggaggagctggggctgctggaccttgcccagaggaagctgtatcgagatgtgatgctggagaacttcaggaacctgctgtcagtggggcatcaaccattccaccgagatactttccactttctaagggaggaaaagttttggatgatggatatagcaacccaaagagaagggaattcagtttatgcaggtgtctgctgag

SEQ ID NO: 62331 - DNA, 905 bp, Homo sapiens
tacttctggaaagggacagggaactgtcaatcagcgagggagggagcgcaccggcgctgggtgatgtcagcggatcagctgctcgataacaaagagagggtattacaggagaaagttgcagcagcggcagcggccaaggcggcacaccggagcctccgaggcgaggggcaagtgggcgaagggaggggggacgacggctgctgccgcagcagctgaaggccaaggaattgaaagggctgtagggggaggcagtgcgagccagccccgactgctcctcctcttcctcctcctcctccaaactcgcgagccccagagctcgctcagccgccgggagcacccagagggacgggaggcagccgcgcagccccgagctgggcagtgtccccagccgccatggatagcgacgacgagatggtggaggaggcggtggaagggcacctggacgatgacggattaccgcacgggttctgcacagtcacctactcctccacagacagatttgaggggaactttgttcacggagaaaagaacggacgggggaagttcttcttctttgatggcagcaccctggaggggtattatgtggatgatgccttgcagggccagggagtttacacttacgaagatgggggagttctccagggcacgtatgtagacggagagctgaacggtccagcccaggaatatgacacagatgggagactgatcttcaaggggcagtataaagataacattcgtcatggagtgtgctggatatattacccagatggaggaagccttgtaggagaagtaaatgaagatggggagatgactggagagaagatagcctatgtgtaccctgatgagaggaccgcactttatgggacattattgatggagagatgatagaacgcaaactggctacc

SEQ ID NO: 62332 - DNA, 550 bp, Homo sapiens
gaaagctgcactctgttgagctccagggcgcagtggagggagggagtgaaggagctctctgtacccaaggaaagtgcagctgagactcagacaagattacaatgaaccaactcagcttcctgctgtttctcatagcgaccaccagaggatggagtacagatgaggctaatacttacttcaaggaatggacctgttcttcgtctccatctctgcccagaagctgcaaggaaatcaaagacgaatgtcctagtgcatttgatggcctgtattttctccgcactgagaatggtgttatctaccagaccttctgtgacatgacctctgggggtggcggctggaccctggtggccagcgtgcatgagaatgacatgcgtgggaagtgcacggtgggcgatcgctggtccagtcagcagggtagcaaagcagactacccagagggggacggcaactgggccaactacaacacctttggatcttcagaggcggccacgagcgatgactacaagaaccctggttactacgacatccaggccaaggacctgggcatctt

SEQ ID NO: 62333 - DNA, 373 bp, Homo sapiens
cggtcttggggcattatttctgccctcagatcccttgtgaagcccaggagggtcaaaaagagaaccaagaaattcatccggcaccagtcagaccgatatgtcaaaatcaagatgagaagaataatgtctggggtgaaggtgaagcacccagcccaagactcagcagccaggaagtggcccagcgctctttataccacgggtgcaggaattcacacagaaaagtggaggccaaggcgtgagaattcctcaatgactgccctctaaaggaagaggtgagtgtggggcctgctctgagcgctaaacacaggcagtctctgtgtctcccaaggaacccaatcgctatcacatttgctttaaatatttagagacgccg

SEQ ID NO: 62334 - DNA, 375 bp, Homo sapiens
cgaacgcgcgggaggcgggaagttaatcctcttccaatcagctccccatctcgccctctggcggctccggaccacaggccgagttactctgattaccgccatgctccaagacccgcactgacagtccccacctcccgttctctgtcatcggttccctcaatggagtccacatgtttgggcagaatctggaggtgcagctgagctctgcgaggaccgagaacacgactgtggtgtggaaaagcttccatgacagcatcaccctcattgttctgtcatctgaggtgggcatctctgagctgaggctggagagactactccaaatggtgtttggagccatggtccttcttgtgggacttgaagaactgaccaatatcg

SEQ ID NO: 62335 - DNA, 1200 bp, Homo sapiens
  misc_feature (1)...(1200): n = a,t,c or g
ccagagatttcttttgcctccagcttctgtttcaaactatttatttgtgattcataataagctcgaagatctgctatgtgtcgagcatgcttttccttcagattctgcctaatccttattcagtgagaataaaaaatatatattaggaaagctatcttcagtctccatcccacaagagaaaccaagaacacaatgattctcatgggcaaaaatatagcatatttcctttgcatactacaaaatatatagattaatacacaaaaagttaacaatcaagtgaaaaagtttttatatgctccatcttaaaaatgctaaatctctaagactttatgcaatactgaagttcaataaagatcattttcaatcagatatcacagaaaatctattaacattacaagccattcactgaaatacatacttagacaatatcacaggatcttccaaggaagtcaatgaaatgcattctgggacactgttggctgtacctggaagctgggactgactgactgaggccgaagcaaccatgacagtgttttcttcatctacagtgttgaccgagatatcattactagtaatggtatatactgacggaaacgtggaactggtcctactttcgttttggaatgtctgatttttccaagagtccaccggagaagcttttgtgtgtgagggatattttggaaatccaggtaactgagaagtgacattacttgcttgtgaaaatgagtctatgtcagagggactagacatactaggctctagaacagagtccggggaaaaggatattctgtcatcaagggcattcggaaggccgtgaggttgaatccctgaaatctgctgctttggcttcatgtgtaacgtaggatctagagtcaggacctggaaaccagacaacaacgaagtcttaccctcagaactcggctttgttttgcttgttttgaagtgagtaggctttagatctcctagggaaaatgaagcttgaggtaaaagttagagtcaggaagcattgttcacgttcactcggcagaatgtggacaactttacctctggtggatgatttgggttggaagcagaagtgagattcctctcaggtaactgcttgttttccctttgttttatataataaatatccttcagtgacggtagcttcatctacgaaatcgtcgacccgggnnnnccggacaggtcttcgatcgcacg

SEQ ID NO: 62336 - DNA, 415 bp, Homo sapiens
tttcgtggggcagacttgtactcagagccacctgagggacttggcggtggcgcccagcactgtcccctcccctcgtagagacacggttgtcgtttgggagtagggaacactgtgttggggtgggttgtcggcaggacatctctctggctgctcttggggcgaggtgtggaggggcagggctgggggtggagccgggtcgccagggcgtcggtagggaagacccccgcccctcgcccccccaccgaacctctacactggctggctggacactaagatggctgccgttgccatgacacccaaccctgtgcagacccttcaggaggaggcggtgtgcgccatctgcctcgattacttcacggaccccgtgtccatcggctgcgggcacaacttctgccgagtttgtgtaacccagttg

SEQ ID NO: 62337 - DNA, 458 bp, Homo sapiens
ttcgtgagagctggaatctctgcacgggccttggaaaacgactgtcttcttctgccaaaatgtcaggaattggaaataaaagagcagctggagaacctggcacctccatgcctcctgagaagaaggcagctgttgaagattcagggaccacagtggaaacaattaagctaggaggtgtctcttcaacggaggaactagacattagaacactgcaaaccaaaaatcgcaagctggcagaaatgttggatcagcggcaggccattgaagatgaacttcgtgagcacattgaaaaactggaacgacgacaggccactgatgatgcctcactattgattgtcaaccgatactggagtcagtttgatgaaaacatccgtatcatccttaaacgttatgatctggagcagggcttgggagacctactcacagaacgaaaagcccttgttgtgcctgaaccagaa

SEQ ID NO: 62338 - DNA, 501 bp, Homo sapiens
tttcgtgcaatggggcctgcctgacacttgggcgctccttcagtctcgatgttgatggcaggacaaaggggcgcctggaccatgggtgatgtggtcgagaagagtttggaagggcccctggcaccttctacagatgagccctcccagaaaacaggagacttggtcgagatcttaaatggggaaaaggtcaaatttgacgacgcgggactctccttaattcttcagaatggcctggaaaccctgcgaatggaaaacgctctgacagatgtcatcttgtgtgtggacattcaggaattctcctgccaccgcgtggtgcttgccgcagccagcaactatttcagggccatgttctgcaacgatttaaaggaaaagtatgagaaaaggatcattattaaaggggttgatgctgagaccatgcacactctgttggactacacgtacaccagcaaggcgctgatcaccaagcagaatgtccagcgggtcctggaggctgctaacctc

SEQ ID NO: 62339 - DNA, 867 bp, Homo sapiens
tttcgttggagatttaggagaggggttgagcgggataaacaggacctggagaagcaaatgtcagatttgagagtgcagctgaacttcagcgcaatggcatctgagttagaggaagtgaaacggtgcatggagagaaaagacaaggagaaagcacatttggcatcacaagtagagaatttaacacgtgaactggagaatggggaaaaacagcaactgcagatgttggatcgacttaaggagatccagaatcactttgacacatgtgaggccgagcgtaagcatgctgaccttcagatctcagagctgactcgccatgcggaggatgcaaccaagcaggctgagcggtacctcagtgagctccagcagtcagaggctctgaaagaggaggcggagaagaggagggaagacctgaaactgaaagctcaagaatccattatgcagtggaagcttaagcataagaagttagaacgagcgttggagaaacaatctgaaactgttgatgaactgacaggcaagaataatcagattttaaaagaaaaggatgaattgaaaacccagctgtatgcagcattacaacaaatagagaatcttcgaaaggaattgaatgatgtcctaacaaagcgtgcccttcaggaggaggagcttcactccaaggaggagaaattacgtgatattaagtctcatcaagctgaccttgaattggaagttaagaattccctggataccatccatagactggagagcgaattgaaaaagcagagtaagatccaaagccagatgaaagttgagaaagctcacttggaggaagaaattgcagagctcaagaagagccaggcccaggacaaagctaaacttcttgagatgcaa

SEQ ID NO: 62340 - DNA, 647 bp, Homo sapiens
ggcaatgcaagtgtgtgttcagttaccaagcccaaaagtcaaaagaacagccagagccaagctggcttttgaggagagaggccggctcctccagcctggctgcatttgcctgaggtagatcgtgagtgctctgccccagcctctccgccctcctgtgtcctttctcagcggctgctctaaagtataacttcacgtagtggtgacttaacttgaaaggagccgcagggggcgtgagagcagcttggagaggtgggagcctgggccgccgatggctccagcctgtgaaagtgtggaaagctcgttccaggaaaattggaataatcacctcattggctggctttcaggcggggtccttggtgaattttgtcatggttatttaaggaaccttgcctagaagtcccaacttgcagttccccatcgacgggaaggcttggactccaagatgattataaaggaatatcggattcctctgccaatgaccgtggaggagtaccgcatcgcccagctgtacatgatacagaagaagagccgtaacgagacatatggcgaaggcagcggcgtggagatcctggagaaccggccgtacacagatggcccaggcggctctgggcagtacacacacaaggtgtgtcatgtgggcatgcaca

SEQ ID NO: 62341 - DNA, 667 bp, Homo sapiens
  misc_feature (1)...(667): n = a,t,c or g
accctttattctgtgatattttgagctgttctgcgtctcgcaggcccttctgaatttcctggacctactctcggaaccctcaacgagctagcgatagatttagaggaaaggaagcaccgtcggaaagcaaaggcatgatttcaccttcacttgaactgcttcattcaggactctgcaaattccctgaagtagaaggaaaaatgaccacattcaaagaggcagtgacattcaaggatgtggctgtggtcttcactgaggaggagctggggctgctggaccctgcccagaggaagctgtaccgagatgtgatgctagagaacttcaggaacctgctctcagtagggaatcaaccattccaccaagatactttccacttcttagggaaggaaaagttttggaagatgaagacaacaagccaaagagaagggaattcaggaggcaagatccaaattgagatggagactgttccagaagcaggaccacatgaagagtggtcctgtcagcaaatatgggaacaaattgcaagtgacctaaccaggtctcaaaactccataaggaacagctctcagttcttcaaagaaggtgatgtcccctgccagattgaggcaagactatctataagtcncgtgcaacagaanccttaccgttgtaatgaatgtaaacagtc

SEQ ID NO: 62342 - DNA, 1452 bp, Homo sapiens
tttttttttagaatcaggtggctcactgagctctgtattttgtttcctggagctttcactggtttcttcccctgagataccccaagtgacatgaaaagcatactcagggcctagagacactttactggggatgggcttctgtcacaggtcagaggtctgagaagaggggcaggcccacatcctctccactagtagagaaaggttgacagagaatcatttcttgcttctcttggccgtagttttggttgtgctgggggcctcagccacagaggccttgggggctgtggcgtctcgtgcccccttccttccccagaaagagctttggtggcccctgggaatcagactgcatggtttcttggtgggagaggaggcctggggtgaggagacggcctcagggactgtctcctccccttgcgcaggagtggcagaagggctgctgtccccagccatgggcaccccaggtagcaggggcaggtcggtgagggtgggctgcatctccatcctcagcaggtgctctgtcggggccgtctgttgccggtgctccctgtgcctgctcagctcctgctccagctccttgaggaagcctcgttctgagcagaatgggccactcagctctgggaactcctcatcgcttgaggcttcatcctcctcatccgaaatccagcgctccaccacaggctgcccgtccaggtccaggagaagtggcagggcttctgtcaccagctcgcggtagccatcctggttggtgcagctgtttccagacaggttgaggatgagaaggctctgggggaactcatccagcttcaatgtttctatcaggttctcagaaaggtccagaaactggaggcatgggaggtcgaggaggttttccacctgcctgatttggtttcctgccagagacaggaagcgcaaggaggggatgcaagccaggttctcaatttgctggatcttattcccttgcagatagagactgtgaagattctggaggccttctaagttcctgatagtagtaatcccctcccggtccaggcggacagtctgcagttcatcaagagtgtgaaacatcttctctgacagttccccatcttcagggaaagtcaagttccgcttagtgataagggcttcagtgatgcagacgcccccttcctctggaccctgggctgacttccctccagacatgatctaaaataaaaggctgctggtctgaggcgggagaggaacgaaaagagaggtcttggcggcccctaaggatggcagaactcaggatggcaggaggagagagaaactcagagacttaggagaggaggaaagggggttgattcagagaaaattgctggggtgaggtcgaagaaaacagtaaattgatgtgaagggtctggagtttgaggggtgtggaggggctttgctggcagcaagctggggtgttgtgggcaggaatggttgagaaaggag

SEQ ID NO: 62343 - DNA, 929 bp, Homo sapiens
attgaattagattagcatgaaggaccttttcacgcggagactaaaagtactgcgcataacttcctgctcagaaatatatgcaaataagaagacagatcctgaaagagcaagctaggagagtacaggtcgtgctgcagttagttcattgaaaactcatttgctcttggagcagtcaggcagtgactgccttcggctttttttctgctgactaagatctcctatagagagctacaacaatgcccaaaagaaaggctgcaggtcaaggtgatatgaggcaggagccaaagagaagatctgccaggttgtctgctatgcttgtgccagttacaccagaggtgaagcctaaaagaacatcaagttcaaggaaaatgaagacaaaaagtgatatgatggaagaaaacatagatacaagtgcccaagcagttgctgaaaccaagcaagaagcagttgttgaagaagactacaatgaaaatgctaaaaatggagaagccaaaattacagaggcaccagcttctgaaaaagaaattgtggaagtaaaagaagaaaatattgaagatgccacagaaaagggaggagaaaagaaagaagcagtggcagcagaagtaaaaaatgaagaagaagatcagaaagaagatgaagaagatcaaaacgaagagaaaggggaagctggaaaagaagacaaagatgaaaaaggggaagaagatggaaaagaggataaaaatggaaatgagaaaggagaagatgcaaaagagaaagaagatggaaaaaaaggtgaagacggaaaaggaaatggagaagatggaaaagagaaaggagaagatgaaaaagaggaagaagacagaaaagaaacaggagatggaaaagagaatgaagatggaaaagagaagggagataaaaaagaggggaaagatgtaaaagtcaaagaagat

SEQ ID NO: 62344 - DNA, 556 bp, Homo sapiens
attacttttccaagaccagaaaaaaatattacatgaacaggaactacttctccttcagataagaattcaagctttgacattgtaaaccacagacgaattggagcttggcattgaaaggaggtgttctgcaatgattttttttcttgtttagagaagtttacttctacaagaagaaatctgaaaaatgacaggagcaaagaggaaaaagaaaagcatgctttggagcaagatgcataccccccagtgtgaagacattatacagtggtgtagaaggcgactgcccattttggattgggcaccacattacaatctgaaagaaaacttgcttccagacactgtgtctgggataatgttggcagttcaacaggtgacccaaggattggcctttgctgttctctcatctgtgcacccagagtttggcttatatgggtctctgtttcctgccataatttatgccatatttggaatgggacatcatgttgccacaggcacctttgccttgacatccttaatatcaggcaacgccgtggaacggattgtccctcacaacatgcag

SEQ ID NO: 62345 - DNA, 1486 bp, Homo sapiens
cgaggtatataatctaccatagttggtactttatataggcctcgggtacctatttgaggcgttctatgatcatacccatcctcgagacctataaatggttattaggtgaatgttacccaggttctcctcagttcataagcaattctttctttactgattattatttatctttgtttattaactttacccacagttgcttacatttgtagcaggctgaactgtaatctttcctgactgatcttttccagagcctggcccaactagagaatctgtgcaaacagctgtatgaaaccacagacacaaccactcgactccaggcagagaaagccttggttgaatttaccaacagccctgattgcctgagcaagtgccagctactcctcgaaagaggaagttcctcttactcccagttactggcagctacatgccttaccaagcttgtatcacgcacaaacaaccccctaccattggaacagcgaatagatattcggaactatgtgctcaactaccttgccactcggccgaagttggctactttcgtgacacaagcacttattcagttatatgccagaatcacaaaactgggctggtttgactgtcagaaggatgactatgtcttcagaaatgcaatcacagacgtcacaaggtttttacaggatagtgttgaatactgcatcattggtgtcacaattttatctcagctaaccaatgaaattaatcaagcagacaccacccatcctttaaccaagcacagaaaaatagcctcttcttttcgcgattcatcattatttgatatcttcacactttcctgcaatttactaaaacaggcttcaggaaagaatctaaacttgaatgatgaaagtcagcatggcttgctcatgcaactgctcaagctcactcataactgcctcaactttgacttcatcggcacttccactgatgagtcctcagacgacctgtgtacagtgcagattcccaccagctggagatcagccttcttagattcttcaaccttgcagctgttttttgacctgtatcattccatccctccttcattttcacctctggtattatcctgcttggtacagatcgcttcagtcagaagatccctgtttaacaatgcagagagggccaagtttctctctcatcttgttgatggtgttaaacgaatactggaaaacccacagagtttatcagacccaaacaattaccatgagttttgcagactactggcccgattgaagagtaactatcaactgggagaattggtaaaggtggaaaactaccctgaggtcatccgattgatagccaacttcacagtgaccagcctacagcactgggaatttgctccaaatagtgtgcactatcttcctgagcctgtggatgcggctgggcagcatctgtgccgtatgtcaaagccacagagccccacatgctggaaacttacactccctgaggtcaccaaaagccctaacatcacatcccg

SEQ ID NO: 62346 - DNA, 568 bp, Homo sapiens
ggcacgagcccgcgctcgccgcacgcacgcgcactgcgcccagcatgagggtcgcggctctgatcagtggtgggaaggacagctgctataatatgatgcagtgcattgctgctgggcatcagatcgttgctttagcaaatctaagaccagctgaaaaccaagtggggtctgatgaactggatagctacatgtatcagacagtggggcaccatgccattgacttgtatgcagaagcaatggctcttcccctctatcgccgaaccataagaggaaggagcttggatacaagacaagtgtacaccaaatgtgaaggtgatgaggttgaagatctctatgagcttttgaaacttgttaaggaaaaagaagaagtagaggggatatcagtaggtgctatactttctgactatcagcgtattcgagtggaaaatgtgtgtaaaaggcttaatctccagcctttagcttatctttggcagagaaaccaggaagatttgctcagagagatgatatcatctaacattcaagcaatgatcatcaaagtagcagctttgggtttagatcctgataagca

SEQ ID NO: 62347 - DNA, 540 bp, Homo sapiens
cgttgctgtcggaagaggcgggagtggacctggtcagccctaccccactgaccccaccggacccaggcgcggcctccgccacagccacagcccctgcccctgctgcggcgcggcgaggcgaggcgatggccaaggtgtcggtgctgaacgtggcggtcctggagaacccgagccctttccacagccccttccggttcgagatcagcttcgagtgcagtgaagccctggcggacgacctggagtggaagatcatttatgttggctcggctgagagtgaggaatttgatcagatcctagactcggtgctggtgggccctgtgccagcagggagacacatgtttgtctttcaggccgacgcccccaacccatccctcatcccagagactgatgccgtgggtgtgactgtggtcctcatcacctgcacctaccatggacaggagttcatccgagtgggctactacgtcaacaacgagtacctcaaccctgagctgcgtgagaacccgcccatgaagccagatttctcccagctccagcggaaca

SEQ ID NO: 62348 - DNA, 831 bp, Homo sapiens
gccgagagcgggtggctgagccgggacctcgcgtgattctcggaacccgaggagaagcggcgtccggggctatggctgtgactctggacaaagacgcttattatcggcgagtgaagagactgtacagcaattggcggaaaggagaagatgagtatgccaacgttgatgccattgttgtatcagtgggtgttgatgaagaaattgtttatgccaaatcaactgccttacagacatggctctttggttatgaactaactgatactatcatggtcttttgtgatgacaaaatcatctttatggccagcaagaaaaaagtggagttcttgaaacagattgccaacactaagggcaatgagaatgctaatggagcccctgccatcacactgctaatacgagaaaagggcaggattaataaagaatgtgtcataaatgtggaagaatcttcaaaagggatgaacagaaatgccttataggagtttgaaagaatgcgcaggggaaattataggtggctgtggttgtaattacaaagttctgtcacgtcttcattgttaggaggaaaagaattcaataatcctatcagttctgctgtaaaacaaatgagctatgaaattctggtgaacactgattttatgtctccattcttgaggacactgttagtttgttttcatctgtatgccttgattagagcaaataaccttaaatatccttaaggaaacttagatatacatcatttccagtttttatcaaatgtgaattttttttgtcatactgcccacctaacatgggatgttttctcagaatattgttcacttatgtgtttgagtttcttaa

SEQ ID NO: 62349 - DNA, 718 bp, Homo sapiens
gtttgcctttagctctctttccagctcctccacagaggggccagacaattttgccttaatggtaccagagtcagcactttgaccagttttagcatgaagctgcagctgaatagagtgcagctgtaaaagctgatcatgtacttctttctccaaaacaactttctctgcttgggtttctgtcagttcagatttcagatccaccaactgtgcctccagcttgtggttgatttgagacacagactgggctttgtggcaaagctgtgcaaagcaggagctcaggctggtcatcttctgtcgcccctcataagtgatgtccgcttggtctggatcgatctctcccaggagcagatccacatccacaaaagctttgtcgaactccttctccagcacctccagccaccggaacatggataccccgccaggggcccccacggagcaggaggcgccccctgggccccctccggctgctgctgggcatggaccgcccgccgacatggcgccgtcaagggcctctcccgactgctgaagaccctcgccgccccccgcgcacgaagggaactgctgggactgaggggacccccgcgcgcgcgggcacactccgtcacctcccttcacctcgcgccgttaacgccagcagcacagccacagaaccgcaggagtaacgaggctgaagctgaggcggcaacggcggcgacacacggaagactcagtcagtccc

SEQ ID NO: 62350 - DNA, 397 bp, Homo sapiens
aatacaatgctggctgtcactggtctcattttggaaataggagaaggttcttcttttatggggagggagatctctccactcttaatgaggatatcaaagaggtcatccatctgctgactgtgagcgttggaaatctctggcagaggggcctgtgtgctgcgtgtctgcttgatggcctcctcataacgggggggatcttttgtcttggcgactggactcccaaatagagagtgctggacgacaaattgctggggtggcgggggtgaactaggcttgttgggtgtgttaggtccattttgcagggatggaagcggagcatttctggattgaagaacactgttggaggccttattgataaagggctgctggacagctggggcaggatgtctctgatatg

SEQ ID NO: 62351 - DNA, 583 bp, Homo sapiens
gcggccgccaggggtccccgctcggctgtccccgcgagacagtcgagccccggccggctgtgcggcgcgctgggtgcatgagggggctgctccggagcgacggcggctgcagctggagtcaggcgctcgcccgtccgccggttggctcgccgggacctcgcgcaccggcggcagagtcccttgcgtggattggcaagcgacgccccacctgccccgagctcaccattttctttcgcgctggctgcagctgacccggcgaagggagccgaccgggccctgggctggaggtaaaaccccacggaaagaacatgaggttcccttggaaatcattcaagaggaagatggaaggggctgtttagaagagcttaaaagctacaggctgtaagactggggcctgagtgctggcagtggaaaacactgttgggctgtgatctctccctgaaaagttccaggtgccttttcgcttcctgcaaaagaaaggaagcgaaagagaagaccatgtccatagccctgaagcaggtattcaacaaggacaagaccttccgacccaagaggaaatttgaacctggcacacagaggtttg

SEQ ID NO: 62352 - DNA, 523 bp, Homo sapiens
  misc_feature (1)...(523): n = a,t,c or g
aattcccgggtcgacgatttcgtgcgggagcagagatctgcgggcgnttgcagcttgcggtagggaggcgtggtggtctgaagcctccgagcagccgcggccatggcggatgtaaccgcccgtagtctgcaatacgagtacaaggcgaactcgaatcttgtgctccaagctgaccgttctctcattgaccggacccgccgggatgaacccacaggagaggtgctgtcccttgttgggaagctggagggcacccgtatgggagacaaggctcaacggaccaaaccgcagatgcaggaggaaagaagagccaagcgaagaaagcgtgatgaggaccggcatgacatcaacaagatgaagggttatactctgctgtcggagggcattgatgagatggtgggcatcatctacaagcccaaaactaaagagactcgggagacctatgaggtgctactcagcttcatccaggctgctcttggggaccagccacgtgatatcctttgtggggcagctgatgaagttctag

SEQ ID NO: 62353 - DNA, 1273 bp, Homo sapiens
aagggtcctccgattgctagcacacagcggtgagcagagaaggtaggtgaggaactgcactgactcagctgcagagggcggcggcagcccgcccctggggcgggagaagggcaggagccgggagacaccaggaagctcttccccgcccgggcacgtaacagagctgggagcctggctgccaggggcgtgttatcgcgggggcagcctgggagcgctgctgcgccgcggcaggagaaacagccgaggacaccctggaagagcaggagcacgtgggcctgcgagaatggcgccaacaccagccctgcaaagccacattccaaagccgggccaaggacagccaccgttgccccgcaggcctcaaggatgacggtcaagccagccaaggccgcctccctagccaggaacctcgcaaagcgcaggcgcacctacctgggtggcgcggctgggcggagtcaagagccggaagtcccttgtgccgcagtccttcccgggaaacctggggaccggaactgcccggagttcccgcccccagacagaaccctgggttgctgggcaaccgatgcggcccccgcagctggtctctgtggtgctgggagcgagcccagtatagctcccacctcctgcgctggtaacctcccgtcccgcccgcctcccttgttgtcgcctctcctcgcgtcgcggaatccttgcccttggcactacttacatctctccgggtcccacaacaccttagcgcccacctgcttcaaagccaagctccaccgaaagcgaggcagtcagcccccggacatggcctcagcgctgactgatcgcacctctcgggccccgagcacctacacctacaccagccggccccgagcactgccctgccagcgcagccgttaccgggacagcctgacgcagccagatgaagaacctatgcattatggaaacataatgtatgacagaagggtaattcgaggtaacacttatgcactccagacagggccactgctcggacggcctgattctctagagctccagagacaacgggaggctaggaagagggctcttgccagaaaacaagcccaagagcagctcagaccacaaacacctgaacctgtggaaggcagaaagcatgtcgatgtgcaaacagaattataccttgaagaaattgctgatcgcataatagaagttgatatggaatgccaaacagatgcatttttggacagaccaccaacaccactctttattcctgccaaaactggcaaagatgtggccacccaaatactag

SEQ ID NO: 62354 - DNA, 426 bp, Homo sapiens
tttcgtgtgagtcccgaaggcccggagccaagtgggtctgggcaagcggggccttacctagggataccaccggacttggatcggagcagccttcaggggacgtggcgcagtcgaacagagccaccatggggacgacggccccagggcccattcacctgctggagctatgtgaccagaagctcatggagtttctctgcaacatggataataaggacttggtgtggcttgaggaaatccaagaggaggccgagcgcatgttcaccagagaattcagcaaagagccagagctgatgcccaaaacaccttctcagaagaaccgacggaagaagagacggatttcttatgttcaggatgaaaacagagatcccatcaggagaaggttatcccgcagaaagtctcggagcagccagctgagctcccgacgcc

SEQ ID NO: 62355 - DNA, 1341 bp, Homo sapiens
ttttttttttttaaccagattatttcacttattatttattttatcttccaatttcctcttgccagactcccatccaaagagtcataagcagccttcttcccaccttcttacatgaaatacatccccacctgaacaaaggcacacggacaggaggaaggggaataggacttcgcaaaactggacacggcatcgcttcagatcttggactctgaggttccgttgttactggtttcacagttacaggcttcggatggtctgcacgtgctgtttcaagactaatggtagtctctattgcttctgttatgtccttatccaacctgttcagcctgtcctctgactcaaatatggagtaatcaatggtgaaatctgcactaaagtcatcataactgggggtgactgtataataatagaccacctgataatattcatcctctcccagtctttcttcatcctcatattcttgtcccaggataagtggcacagcaaagatggctacaaagaggacatccattctggattctgcactattgcatcaccacccagagttgcctttctctctgaggcttcatcagtctcttttcgtcacagtggaaatgttctgaggaaggggtgagcatttttctagactgaaaagaatccctttcttctgtctgtctggagcagccatgggggctgcggtgtttttcggctgcactttcgtcgcgttcggcccggccttcgcgcttttcttgatcactgtggctggggacccgcttcgcgttatcatcctggtcgcagggtgagtagagggcccgggagacgcgggagagcgtcgaagagagaggtgcggaaggggctggaggaactggggcaagcctgggagcctgaattggggacgataagtcggaggtgaagtttgggcggaggtgaggggttgggtctgggagatttgtcctttcccgcagttggtttccaccttccaaggatctcacagattcctcctatattcctcccagcgacgtcagagaaggcccaaggccgagactcgtgagggggctgtgctgacctaggcaggccgagtcaggtgccttaggggaggatccaggaacggatacctcgcccttccgtgctcgcacactctggctgtcatcgctctgaagactctttaattagatttctcccctttccagtgcgttcacttttctacagatgagtctcctggtggagacagttaccctacctggtccatgtctccctaaccatccggaaggctaacttccacttttcaagcagctttggctggtttccctccttgatttctctggctcccactactattgcttgtctcactgcccctgtatt

SEQ ID NO: 62356 - DNA, 1076 bp, Homo sapiens
  misc_feature (1)...(1076): n = a,t,c or g
cctccaagggacgggtttctagagctccgacgcctctcggtgcccctctgctccggcccttgccctttgacctcgctctcgcggcagggtgagaggtcgggtggccatcttgtggcggcggcgcgggcggctgttactgcggagacccatcccctcccccttctcgcacccctggcagtctgtcagtcggtaaaaagtcccgcagcctgtcaggtgaggccccggcctcgtgccgtcgctcttcccgccgcactgggcggcccaggccgctccctgccgggcctcactgccgccaccatgtcctccttctctgagtcggcgctggagaagaagctctcggagctgagcaactctcagcagagcgtgcagaccctgtccctttggctcatccaccaccgcaagcacgcgggacccatcgtctccgtgtggcaccgcgagctccgcaaagccaaatcaaatagaaagcttacttttctgtatttagcgaatgatgtcatccaaaacagtaaaaggaaaggacctgaattcactagagaatttgaatctgtccttgtggatgctttttctcatgttgccagagaggcagatgaaggctgtaaaaaacctttagaaagattgctgaacatctggcaagaacgaagtgtgtatggcggcgagttcatacagcagctgaagctgtctatggaggactccaagagccctccccccaaagcaacagaagagaagaaatctctgaaacgaacttttcagcaaattcaggaggaggaggatgacgactaccctggcagctactctcctcaggatccttctgcaggacccctcttgactgaggaactaatcaaagctttgcaggatctggaaaatgccgcatcaggggatgctactgtccgacagaaaattgcttctctgccccaggaagtgcaagatgtttctctattggaaaaaataacagacaaagaggcagctgaacgtctttcaaaaacagtagatgaagcatgtctacgaaatcgtggacccgggacttcaagnccggtggttctgctggcncngagggtttcaaannccggctccctctc

SEQ ID NO: 62357 - DNA, 624 bp, Homo sapiens
aatacatgccggcgttgttgatctggttgttctgcaggtagagggtggtggcatcatcagggatatctgcggggatggatgtgagtccccggtcgttgcagtagatgaagccgttgtcgcagcggcacaccgaggggcaggtggtgctgtcgatgacctccgtcaggaaggcgatgagcccgtagcagaggaacagccagtcccgcaggtccatggtggccgtggtcatcacaacggtggccgtgacagtggcagtgggcgtggtggtggcagtggcggtggggtgtgccaccaccatggtggatggctgggggcgtccggccccacctggcctggagcctgaatacctccttcgtcgctgccgcccaagaccctctgggtttgactggggtcactggtccggaggcccctgccaaagtcacgaagccgcgactcaggacaccgtgagctcagatggcgctcacattacctgccccgtggtcctaccaggccttgcaccactagggacgcagacctcagccctggggtgactgggcagcactggggctccccagggcacagagaggggatccggtgcctcggtatcctggtctcctggcgttcagctcgtgccgagttcctgcg

SEQ ID NO: 62358 - DNA, 1416 bp, Homo sapiens
cccggaattcccgggccgacgatttcgtgcgagcggcagcagctccgggctcgagagcccgcgcccatgccagtgcccatgcggggccgccgccagtgacgccggagaggtgttccccccacactggggctcccactactgcgaggagtgacccacgaaggccacagagatggccggggcttcggtgaaggtggcggtgcgggtccgccccttcaattcccgggaaatgagccgtgactccaagtgcatcattcagatgtctggaagcaccaccaccattgttaaccccaaacagcccaaggagacgcccaaaagcttcagctttgactactcctactggtcgcacacctcacctgaggacatcaactacgcgtcgcagaagcaggtgtaccgggacatcggcgaggagatgctgcagcatgcctttgagggatacaacgtgtgcatcttcgcctatgggcagacgggtgccggcaagtcctacaccatgatgggcaagcaggagaaggaccagcagggcatcatcccacagctctgcgaggacctcttctctcggatcaacgacacgaccaacgacaacatgtcctactccgtggaggtcagctacatggagatttactgtgagcgcgtccgtgacctcctgaaccccaagaacaagggcaaccttcgcgtgagggagcacccactgctggggccctacgtggaggacctctccaagctggctgtcacctcctacaatgacatccaggacctcatggactcagggaacaaggccaggaccgtggcggccaccaacatgaatgagaccagcagtcgctcccacgccgtcttcaacatcatcttcacccagaagcgccatgacgcagagaccaatatcaccacggagaaggtgagcaaaatcagcctggtggacctggctgggagcgagcgggctgactccacgggagccaagggcacgcgcctcaaggagggagccaacatcaacaagtcgctgaccaccctgggcaaggtcatctccgccctggctgaaatggactccggacccaacaagaacaagaaaaagaagaagacagatttcattccgtaccgagattccgtgttgacctggctcctccgggaaaacctgggcggtaactcaaggacagctatggtggcagccttgagtcctgcagacatcaactacgatgagacccttagcacgctgaggtatgctgaccgggccaagcagatccgctgcaatgctgtcatcaatgaggaccccaacaacaagctgatccgcgagctgaaggatgaggtgacccggctgcgggaccttctgtacgcccagggtcttggcgacatcactgacatgaccaatgccctggtgggtatgagcccctcatcctcgctctcagccctgtccagccgcaatgtatt

SEQ ID NO: 62359 - DNA, 717 bp, Homo sapiens
ctgggaagcataatgcccctctgcagctttgtcttcatgcccttcgtattccctgctggatagttgcctgttagcagtctctagtcgatctcggaggtctctgttgaaatcatgaagtcttctaatctcgccttccaatttgtttctcatggccttgtccagcgattctcgcttggtggtagacttgaccagactttcataggcttccgaaattctctgaagttctttttcaaacttgtggagcttgtcggcattgtcgtagtaaccctgaagttcctggtgaagcacccggttctcctctgttaatatctccaccatttgctgggctcgctccacaatcgcaaaggcatctggaccaagctgctggctgggggaggcggcaggcgggggctgtggagcacccagggccatcgggagtggaagcggcagggagacagagtgcagtggcccgctggcggaagaggtctgggaggacatggggctgtgctgctgcatggttgatgggaacggaagttggcatgggcggctcgttaccccatactcagggggtggctggtaccgcaggacggccacatctgttctcacaggctgaggagcagggtagggcttgaccatctcgtggagcatcccggggtgctggtcaccataaaaaagtccgtgctcctgggtcttgctgactggggacatcatttgcttggtcttgaaggggtactcagg

SEQ ID NO: 62360 - DNA, 582 bp, Homo sapiens
aagacaccgggttgttaataaaacttctactgagattctgaggcttttgctgcatgaggacatctaggtgcccaccctgggctgaggggccggccttgtacatgtagttagccattactttcgactggccgctgccgccagctaccccaggcatgggggagctctgtgggctgaatgtctgctgaccaaaagaagggctggggattttctcctgcccaaatggacctggtgatggtccagcagaggagggcaaggctgaccagttggtaggctggtgctgctgctggtgctgctgcatccgggcatgctgctgacgattagcagctatctgtttgagctgctgggcatgggatacttcctgccagcttggcaaggcccggcttgctccggagcctgtctgaggctgagcctggctctgagggactgaagggattggagacgaagtggagagggcagagttggccatggagaatgcggggccagctgatgggggcctcagctgaggagagcctgaggggccctgagtcaagcccggtgagtattcacttttgatcactattttctccatgggtaaggagggcc

SEQ ID NO: 62361 - DNA, 1292 bp, Homo sapiens
gcggccgcagcgggcatcacaaacaccgcggggctgatgcaggaccagccccggcaggaactctgcctgactcctcactccagcacccccttcttccaaggcaggggacacggtgggcgtggtacggcgggaggacgggactctccacttctttgtcaatgggatgactcagggccctgctgcctggaacgtgcccccgggcgtctatgctgtcgtcgatctctatggccaggcggcccaggccaccattgtggacgacgtggaggtggctccagttcctgaaccactccctgaggggaacaaccaggtgtctccaagctctccgtcctcaggggccgggggctctgacctgcgcttccatcagctgcacggcagtaacgcagtcatcactaacgggggccgcaccgccctccgccacaactgtcgcagcgagtttaatgacgccatcgtcatctccaaccgggccctgcgggatggagagctgtttgaaattgtcattcagaagatggtggaccgctggtcaggctccattgaggctggagtgactgctattcggcctgaagacctggaattccccaacaccatgacagacattgactatgacacatggatgctgagtggtacagccatcatgcaagacggtaacacgatgcgcaacaattatgggtgtgacctggatgcgctgggcacaggtgcacgcattggcatgatgcgaactgccaagggcgacctgcactacttcatcaacggccaggaccaaggcgctgcctgctcgggcctgcctccgggtaaagaggtgtatgcggtagtcgatctctatggccagtgtgtccaagtgtccatcaccaatgccaccggccccatggacaacagcctggcgaccagcaacactgccaccgagaagtccttcccactgcactccccagtggctggcgtggctcaccgattccacagtacttgcggcaagaacgtcactctagaggaggatggcacgagggcagtgcgtgccgctggctatgctcatggccttgtcttcagtaccaaggagctgagggctgaggaagtctttgaggtgaaagtggaagagctagatgagaagtgggcaggttccctgcggctggggctgaccacactagcaccgggggagatgggacccggggcaggcggtggtggcccagggctgcctccttccctgccagagctccggacgaagaccacttggatggtatccagctgtgaagtgaggcgtgatgggcagctccagaggatgaactatggccggaacctgtagt

SEQ ID NO: 62362 - DNA, 1196 bp, Homo sapiens
gaagtaagaagctttatgccaggcactattcaaagcactttgtggcttcatggaagcaaagagaaaaatgtttttctttttttcctccctttccagtctctcctgtgactttcacccctttaggcttaaacaagatacgcaggcatacaggaagcccttcttatgcgttcgctactagcggtactgatcttaatttttttgaagccgtgccggctccggcactttatttttggtgtgctcctccaaccaaccaagtttcgcagaattctgttgttgcctggtctgagtacctcccggcggccaggacccgccgttttcggtatagggaacaccagataacaatatataacgctacctaacaaacgtttctccacccacagcgccattagcggttaggtttgcagtgccgaagagcgcgccgactatttcttccgccgtccgccggtggcgaggcccaggctgtcgccgggtgtgcagcggcgtcgcggccagtagagggattctgggtaacggcccggacccccggctgggcttctggctcggcgcagcaggttccattcacgccaagtctgttggcagtggcagttgtagggccaagggcggttgtaggacccggagcagccggacatggaacaaccgtggccgcctccgggaccctggagcctccctcgggccgagggtgaggctgaggaagagagtgacttcgacgtgttccccagttctccccgctgcccgcagctgccaggcggcggcgcccagatgtatagccatggaattgaattggcttgccaaaagcagaaagagtttgtgaagagctctgtggcgtgcaaatggaatcttgctgaagctcaacagaaacttggtagcttagcactgcataattctgagtccttggatcaggagcatgccaaagcacaaacagcagtatcagaactgaggcaacgggaagaagagtggcgacagaaagaagaagctctagtacaaagagagaagatgtgtctgtggagcacggatgccattagcaaggatgtttttaataagagttttattaatcaagataaaagaaaagacacagaagatgaagataaatcagaatcatttatgcaaaaatatgagcaaaaaatcagacattttggtatgttgagtcgatgggatgatagccagagatttttgtctgaccatccataccttgtatg

SEQ ID NO: 62363 - DNA, 2303 bp, Homo sapiens
ccaagatggcggagacagagtgaagaaactgtgttccccccttgggttgctatcgatcaagggtaaaattccattctgatatcaaaatgcagtattcgcaccactgtgagcaccttttagagagactgaacaaacagcgggaagcaggttttctctgtgactgtaccatagtgattggggaattccagtttaaagctcataggaatgtgctggcctcctttagtgagtattttggtgcgatctacagaagcacttctgagaacaatgtctttcttgatcagagtcaggtgaaggctgatggatttcagaaactgttggagtttatatacacaggaactttaaatcttgacagttggaatgttaaagaaattcatcaggctgctgactatctcaaagtggaagaggtggtcactaaatgcaaaataaagatggaagattttgcttttattgctaatccttcttctacagagatatctagtattactggaaacattgaattgaatcaacagacttgtcttcttactctgcgagattataataatcgagagaaatcagaagtatctacagatttgattcaggcaaatcctaaacaaggcgcgttagcgaaaaagtcatctcaaacgaaaaagaagaagaaggctttcaactccccgaaaacagggcagaataaaacagtgcaatatcccagtgacatcttagagaatgcatctgttgaattattcctagatgcaaataaactgcccacacctgtagtagaacaagttgcacaaataaatgataattcagaactcgagttgacatcagttgtggaaaatacttttccagcacaagatattgtgcacactgttacagtgaaacggaaacgtggaaaatcacagccaaactgtgctctgaaagaacactctatgtctaatatagccagcgtcaagagtccttatgaggcggagaactccggggaagagctggatcagaggtattccaaggccaagccaatgtgtaacacatgtgggaaagtgttttcagaagccagcagtttgagaaggcacatgagaatacataaaggagtcaaaccttacgtctgccacttatgtggaaaggcatttacccaatgtaaccagctgaaaacgcatgtaagaactcatacaggtgagaagccatacaaatgtgaattgtgtgataaaggatttgctcagaaatgtcagctagtcttccatagtcgcatgcatcatggtgaagaaaaaccctataaatgtgatgtatgcaacttacagtttgcaacttctagcaatctcaagattcatgcaaggaagcatagtggagagaagccatatgtctgtgataggtgtggacagagatttgctcaagccagcacactgacctatcatgtccgtaggcatactggagaaaagccttatgtatgtgatacctgtgggaaggcatttgctgtctctagttctcttatcactcattctcgaaaacatacaggtgaaaaaccatttatctgcgaattatgtggaaattcttacacagatattaaaaatttaaagaagcacaaaacaaaagtccattctggtgcagataaaactctagactccagtgcagaggatcatactttgagtgaacaggattccatacaaaaaagtcctttatcagaaactatggatgtgaagccttctgatatgactttaccattagctcttccacttgggactgaggaccatcacatgcttctgcctgtcacggatactcagtctcctacatcagatacattgttgaggtcaactgtgaatgggtattcagaaccacagttgatttttttacaacaattatactgactttgtaaggaatatggaattgctaagatatcattggtagcaaacatctctggtaaggtgcatatattcatattaaattcccattcatttgagttgtgaccattatttttcattcactgaagtaaaagcacctgatgctgcatcacaactgcaatgtttgtttttatttttggctttatgtctatactccacagagagctttttaagtaatgaattatgtagcactattttgggtggatgagttttattttcttttaaagctgccttaattccatttttattttgcattttagaattgcccttcatttactaaatcagccagttaatgtgattcagttgtgacctgtgggattttaaaattttcctgccctcataatttaagcaaaatccacgatagtatcagcccaagagtgtgttgctatttgtaagccccatggatcaatacataaactatgcataaaaataaaa

SEQ ID NO: 62364 - DNA, 880 bp, Homo sapiens
ctaaatatttcagcaacttcagaggcacttaattttcctccttttgtaaactggcaatcttgactctaacattgctaggaattacttatctatatttgtccttaaatacaagactattaaaaaaaaatcaagggctgctttctgcccgtggataccgctgaggaagcctcgttaaagtctctcttcccagggccgtcctgtcctaaagagccggaacagctgcggaagctcttcatgggagggctgagctttgaaacaaccgatgagagcctgaggagcccttctgagcagtggagaaggctcacagattgtgtggactccaagtgaaggtgaaagagaccagacgagacctttcctaattccattcatctctgagggatttataaggaagttaccaacccctggtctaaataatcaaacagagaaaagaagaaaaggaaaaaaggatcagaggacacagaagaatttctggacacacttccatctgctaattaaatggaagaagcaagtttgggtttttttgtttttcctctacctcaatcaaagactatgaatctttcttttaatctctggagctaacttctctaattagtttcctagaggaagaggatgctttactattggcatttcacactctgcacaatggtatgaacttggacatacctcagctgatccagcagaaagagctctaaaactcaaaagttatgtcatcagtaactgtcaatagatagaagtgttcgcaggtactactagttccaatactcattgactttgtaacaactggtatattagctacaatcaaacaaaatgaggtattctttacaagaattacataagccctttccaataaattttctgtaacgatggaaaaaaaataaaa

SEQ ID NO: 62365 - DNA, 395 bp, Homo sapiens
ggccctgtcacttctctgatagctcccagctcgctctctgcagccatgattgccagacagcagtgtgtccgaggcgggccccggggcttcagctgtggctcggccattgtaggcggtggcaagagaggtgccttcagctcagtctccatgtctggaggtgctggccgatgctcttctgggggatttggcagcagaagcctctacaacctcagggggaacaaaagcatctccatgagtgtggctgggtcacgacaaggtgcctgctttgggggtgctggaggctttggcactggtggctttggtgccggcggcttcggagctggtttcggcactggtggctttggtggtggatttgggggctccttcagtggtaagggtggccctggcttccccgg

SEQ ID NO: 62366 - DNA, 1580 bp, Homo sapiens
cgctccgaatgtggcctggctgcttctcaatgatcttgacggcgtactcctggctggtgatcaggttgatgcaggtctgcactcgggcatgagcgccctcccccagcacatcttcctgcaggtggtagacgtcttcaaacctgcccgagaagctgtcggtggctcggccgcccgccctcgggcctccccccgggccctcggtcccctcccccgctggcggggcccggacagaagatggtgcagaagaaaccagccgaacttcagggtttccaccgttcgttcaaggggcagaaccccttcgagctggccttctccctagaccagcccgaccacggagactctgactttggcctgcagtgctcagcccgccctgacatgcccgccagccagcccattgacatcccggacgccaagaagaggggcaagaagaagaagcgcggccgggccaccgacagcttctcgggcaggtttgaagacgtctaccagctgcaggaagatgtgctgggggagggcgctcatgcccgagtgcagacctgcatcaacctgatcaccagccaggagtacgccgtcaagatcattgagaagcagccaggccacattcggagcagggttttcagggaggtggagatgctgtaccagtgccagggacacaggaacgtcctagagctgattgagttcttcgaggaggaggaccgcttctacctggtgtttgagaagatgcggggaggctccatcctgagccacatccacaagcgccggcacttcaacgagctggaggccagcgtggtggtgcaggacgtggccagcgccttggactttctgcataacaaaggcatcgcccacagggacctaaagccggaaaacatcctctgtgagcaccccaaccaggtctcccccgtgaagatctgtgacttcgacctgggcagcggcatcaaactcaacggggactgctcccctatctccaccccggagctgctcactccgtgcggctcggcggagtacatggccccggaggtagtggaggccttcagcgaggaggctagcatctacgacaagcgctgcgacctgtggagcctgggcgtcatcttgtatatcctactcagcggctacccgcccttcgtgggccgctgtggcagcgactgcggctgggaccgcggcgaggcctgccctgcctgccagaacatgctgtttgagagcatccaggagggcaagtacgagttccccgacaaggactgggcccacatctcctgcgctgccaaagacctcatctccaagctgctggtccgtgacgccaagcagaggctgagtgccgcccaagtcctgcagcacccctgggttcaggggtgcgccccggagaacaccttgcccactcccatggtcctgcagaggtgggacagtcacttcctcctccctccccacccctgtcgcatccacgtgcgacctggaggactggtcagaaccgttactgtgaatgagtgaagatcctggaggaccctgggccccaggccagctcccatcgctgggggacggtgaacggccatgtgttaatgttacgatgtttttaaaagacaaaaaaaaaa

SEQ ID NO: 62367 - DNA, 778 bp, Homo sapiens
ggtcgacccacgcgtccggcgagtcgccggtcgccggtcgcggcggagcctgggcgctgaagtaccggggcctggacgagggggccgcggtctggctagggagccgcgcgggctcatggcgaagggacttggagggaagcgggcctggagctgctgccgccgcccctgagctcggacgcgaaggctggccccgtccccgggctgccgccgtggtcctgcagtgaagaaaatgaggcacgaggaattgttaaccaagaccttccaaggcccagctgttgtgtgtgggactccgaccagccacgtatacatgtttaagaatggcagtggggactcgggggactcttctgaagaagagtctcaccgtgtggttttgcggccccggggcaaggagcgccacaagagcggtgtccaccagcctccccaggcgggagcaggtgacgtggtgctgctgcagcgggagctggcccaggaggacagcctcaacaagctggcgctgcagtatggctgcaaagttgcagatatcaagaaagtcaacaacttcatcagagaacaagacttatatgctttgaaatctgttaagattccagtgagaaaccatgggatcctgatggagacccacaaagaactgaaaccccttctgagcccgtcttccgagaccacagtgaccgtggaactgccagaggcagacagagcaggcgcgggcaccggtgcccaggccggccaactgatgggcttctttaaggggattgaccaggatattgagcgtgcagtgcagtca

SEQ ID NO: 62368 - DNA, 1007 bp, Homo sapiens
  misc_feature (1)...(1007): n = a,t,c or g
gaggagctgaggttcggtccccgccggggaggtcgggacgggcaggggctgaggaccccgcgccagcttgggagccctggagttctggcgggagggaagctgtcaaatggaagccggtagaaatgagacagacgcccggagaagcggggagccccgcccctccgccatagcagcctcgggcgccgcctcttcctttccagcctcccgccctcgtctgcttccggccctgtggcctggtggggctctgcaggctccctcgggagtggtccttgggccgtggcccctctgggaggcctgagggagctcaatcctggtagcaacacccctgaattcctggtggtgaaaggatgtggccccaggacccatcccggaaggaggtgctgaggtttgcagtcagctgccgtatcctgactctgatgctgcaggccctcttcaatgccatcatcccagatcaccatgcagaagccttctctcctcctcgcctggccccctcaggctttgtggaccaactcgtggaaggtcttctgggcggcctgtctcactgggatgctgaacacttcttgttcattgctgagcatggctacctgtatgagcacaactttgccttctttcctggtttccccttggccctgctggtggggactgaactgttgagacccttacgggggttactgagtctacgcagttgcctgctgatttcggtagcatcactcaatttcttgttcttcatgttggctgcagttgcacttcatgacctgggttgtctggttttgcactgtccccaccagtccttttatgcagctctgcttttctgtctcagccctgccaatgtcttcctggcagctggttactcagaagctttgtttgccctcctgacattcagtgccatggggcagctggagaggggccgagtctggactagtgtactcctctttgcctttgccactngggtacgctccaacgggctggtcagtgttggcttcctcaatgcattctcaatgccaagg

SEQ ID NO: 62369 - DNA, 565 bp, Homo sapiens
atggcggcggctgccgccgagacccccgaagtccttcgggaatgcggttgcaagggcatccggacctgtctgatctgcgagcggcagcgcggcagtgacccgccctgggagctgcccccagcgaaaacataccgtttcatttactgctccgacaccggctgggccgtgggcacagaggagtctgactttgagggctgggccttccccttcccaggagtgatgctgatcgaggactttgtgacccgggaggaagaagccgagttggtgcggctcatggaccgtgacccctggaagctctcccagtctggacggaggaagcaggactatggccccaaagtcaactttcggaaacagaagctaaagaccgagggcttctgcggcctccccagcttcagccgggaggtggtgcggaggatgggcctctacccggggctggagggcttccggcccgtcgagcagtgcaacctggactactgccccgagcggggctctgccattgacccccacctggacgacgcctggctgtggggggagcggctggtcagccctcgtgccgaagtcctca

SEQ ID NO: 62370 - DNA, 1296 bp, Homo sapiens
tttcgtccgggatgggaggtgagttgcttgtggtgatgtcgctcgtctcggctcggcctcggcggtggttccccgggtcgttctgtgccgagtcggggctagagtgcgcgtttgttaaaggggcctcgagggcagaccatgagccctgtcccttctcactctggcctgatcctctcctcgggggacgcggttgtgccacgggcggggtggtcgcggggttctgggccagtgccccgagcgcggcagaatttgtccaaactcctgatgccccagcgtcacctcttccaggcgcccggttcccccagggacagcttcaagcggtagggacagacatctgaggacccagcctcagggatgctgtccccgggcttccaggctccagcgccgtaggactgaggcagactccacggtgagaaagagacccgatctaacccaggcctttcatcagagcccaggagggaaggcaggaagtgggaccacgaggcccggggggcttctaactcgtctggccagggagatctgaattggggtgaagagcagaatctccagaacaaggaggaggtggtgatcatggagacagatttggctgaaatgcctgagaaaggagctctgtcttcccaggattctccccatttccaagagaagagcacagaagagggagaagtggctgctctgcgcctcacggccagatcccaggaaacagtgacattcaaggatgtggccatggactttacaccagaggagtgggggaagctggatcctgcacaaagggatgtgatgctggagaactataggaacctagtctcactttggcttccagtttccaaacctgagagccacaacttggagaatggaaaagaaccattgaagcttgagagaaaagcccccaaaagcagctattcagacatggagactagaccacagagcaaggattcaacttcagtgcaagatttttccaaagcagaatcatgcaaagttgcaataatagacagactgacacggaatagtgtctatgactctaacttggaagcagcccttgaatgtgaaaattggttagagaatcagcaaggaaatcaggagagacatttgagagaaatgttcactcacatgaattcactctctgaggaaacagaccataagcatgatgtatactggaaaagcttcaatcagaaatctgtccttatcactgaagacagagttcccaaaggatcttatgccttccatacacttgaaaaaagcttgaaacaaaaatcaaacttaataaaaagcagagatgtattgcggccgctctagagg

SEQ ID NO: 62371 - DNA, 591 bp, Homo sapiens
tttcgtcttccccaccttcctccactccctcccttcccctccccttctacctcctcctcggccagctcaggttgcagcttctctggggaactgctcacctttccggagcaggggaagctgccccgtgcccgggagggagcgggcgcaccgcggcccccaggacacgcgctgacccggctgcccagtccctcatgatcatgaacaagatgaagaactttaagcgccgtttctccctgtcagtgccccgcactgagaccattgaagaatccttggctgaattcacggagcaattcaaccagctccacaaccggcggaatgagaacttgcagctcggtcctcttggcagagaccccccgcaggagtgcagcaccttctccccaacagacagcggggaggagccggggcagctctcccctggcgtgcagttccagcggcggcagaaccagcgccgcttctccatggaggtgagggcctctggagctctgccccggcaggtggcaggatgcacgcacaagggtgtgcacaggagggcagctgccttacagccagactttgacgtcagcaagaggctctctctgcccatggatatcg

SEQ ID NO: 62372 - DNA, 454 bp, Homo sapiens
tttcgtgccggagcacacgtgtttcgtgtttcggtgagtgtggcggagatggagagccgggatcccgcccagccgatgtcgcctggagaagcgacgcagagtggcgcccggcctgccgaccgctatggcctattgaagcacagtcgcgagttcttggacttcttctgggacattgcgaagcctgagcaggagacgcgacttgcggccacggagaagctgctggagtatctgcgtggcaggccgaaggggtccgagatgaaatatgccctgaagcgtctaatcacgggactcggggtcgggcgagaaacagcccggccctgctacagtttggccctggcacagctgttacagtcttttgaagacctccccttgtgcagcatcctgcagcagatacaagaaaaatatgacctgcatcaggtgaagaaggcaatgctgagacctgctctctttgcag

SEQ ID NO: 62373 - DNA, 615 bp, Homo sapiens
tttcgttgggatcccctcgggctcccgccttagcatgctggccgggacatctggtgaacatggcctctgctactgcggcagcagcacgacggggcctcggccgggctctccctctcctctggcgtggctaccagaccgagcggggcgtttacggctaccggccgaggaagcccgagagccgcgagccccagggcgccctggagcgccccccagttgatcatggccttgccaggttggtgacagtatattgtgagcatggtcataaagctgccaaaatcaaccccctcttcaccggacaagccctgctggagaatgtgcctgaaatccaagccctggtgcagacactgcagggacccttccacacggcaggattattgaacatggggaaggaagaggcctcacttgaggaagtgttagtctatctcaatcaaatctactgtgggcagatttctattgaaacctcccaacttcagagccaggatgagaaagactggtttgccaagcggtttgaggaactgcaaaaggagacgtttaccacagaagagcgaaaacatctgtcgaaactaatgctggaatctcaggagtttgaccactttctggccaccaagttctcga

SEQ ID NO: 62374 - DNA, 475 bp, Homo sapiens
ggcattgggcctggaaccccgggtcgacgatttcgtctgagagggacgcgtgccgcggagccaggcttactacgtgacccggacaccaggcatacgctaggggcagtcagctgtgccttctctttcggagttgttccgtgctcccacgtgcttccccttctccactggctgggatcccccgggctcggggcgcagtaataatttttcaccatgcatcggaaaaaggtggataaccgaatccggattctcattgagaatggagtagctgagcggcaaagatctctctttgttgtagttggggatcgaggaaaagatcaggtggtaatacttcatcacatgttatccaaagcaactgtgaaggctcggccttcagtgctgtggtgttataagaaagagctggggtttagcagtcaccggaagaaaagaatgcgacagctgcagaagaaaataaagaatggaacactgaacataaagg

SEQ ID NO: 62375 - DNA, 755 bp, Homo sapiens
tttcgtgggcacagcagccaggctgccggagagctgatctcggggattcgggtgcggagcccttggcctggaggcgatatgggtggtccgtggcccggttcagtcgcttgcagcagcccggggaacaggcctgtctggccctgagggagtcccctttctgaagctgtggtgcttggacgacctgctctctacattgctgggcacctgtaggtgtccctcgagagctcagttttgaggttcaagtcagtgtggccatgaaggggctgcctattgggctgatgctgtgaccctggagtctgcctctcctgccagtccccctgcccggaacatgtggctgcggcttggcccgccctcgctgtccctgagccccaagcccacggttggcaggagcctgtgcctcaccctgtggttcctcagtttggcgctgagggccagtacccaggccccagcacccacagtcaacactcactttgggaagctaaggggtgcccgagtaccactgcccagtgagatcctggggcctgtggaccaatacctgggggtgccctacgcagctcccccgatcggcgagaaacgtttcctgccccctgaaccacccccatcctggtcgggcattcggaacgccacacactttcccccagtgtgcccccagaacatccacacagctgtgcccgaagtcatgctgccggtctggttcactgccaacttggatatcgtcgctacttacatccaggagcccaacgaagactgtctct

SEQ ID NO: 62376 - DNA, 433 bp, Homo sapiens
tttcgtgtcatccgcggagcgacgaccggaggctgcggcggagccccggcggggcgtttggtttcggtttggccctgactgggattagtgttgacgatcgaaatgggagtccccaagttttacagatggatctcagagcggtatccctgtctcagcgaagtggtgaaagagcatcagattcctgaatttgacaacttgtacctggatatgaatggaattatacatcagtgctcccatcctaatgatgatgatgttcactttagaatttcagatgataaaatctttactgatatttttcactacctggaggtgttgtttcgcattattaaacccaggaaagtgttctttatggctgtagatggtgtggctcctcgagcaaaaatgaaccagcagcgtgggaggcgttttaggtcagcaaaggtcgacgcggccg

SEQ ID NO: 62377 - DNA, 515 bp, Homo sapiens
gtcgacgatttcgtgccttccggagcgtagcggcctctagctcgagcagcaggagcagcccgcaccggacaacttgcgagccatggggctggcggatgcgtcgggaccgagggacacacaggcactgctgtctgcaacacaagcaatggacctgcggaggcgagactaccacatggaacggccgctgctgaaccaggagcatttggaggagctggggcgctggggctcagcacctaggacccaccagtggcggacctggttgcagtgctcccgtgctcgggcctatgcccttctgctccaacacctcccggttttggtctggttaccccggtatcctgtgcgtgactggctcctgggtgacctgttatccggcctgagtgtggccatcatgcagcttccgcagggcttggcctacgccctcctggctggattgccccccgtgtttggcctctatagctccttctaccctgtcttcatctacttcctgtttggcacttcccggcacatctccgtgg

SEQ ID NO: 62378 - DNA, 443 bp, Homo sapiens
attcgtctggctgtggggctgcggcggtggggacgggccacggcgtcctgtgacatccccccgcctcccctcgtcttctcccggctggcggcgaccggcctcagctgcagcgggcccggggcgtggggcctgggttttttgtgacatcgtaaacatgagccccacacagtgggacttccctgtggaattatgttgccggcctatggcctttgttactctaacgggcctggatgtagtttataatgcagtccatcgagctgtctgggacgccttctgtgcaaatcggagagctgatcgagtaccaatttctttcaaggtgctcccaggtgaccatgagtatcccaaatgtagacccaagagaacttcatatgagtggtacattcctaaagggatcttaaagactggctggatgaataagcatctgaatctggtgccagccctgg

SEQ ID NO: 62379 - DNA, 703 bp, Homo sapiens
tttcgtgagaggcccaggtgaggagcaagcgcccgcgttccggaagcccgctcccggggccatgggggcacaggtgaggctgccgcccggagagccctgccgagaaggatatgtgctgtctctggtctgtccaaactcctcccaggcttggtgtgagatcacaaatgtgtcacagctgctggcttctcctgtgctctacacggacctgaattacagcataaacaacttgagcatttcagcaaatgtagaaaacaaatacagtctttatgtgggcttggtactggcagtaagctcaagtatttttattggctccagcttcatactgaaaaagaagggcctcttgcaactggccagcaagggctttactagagctggacaaggtggacattcttacctgaaggaatggctctggtgggtaggattgctgtcaatactgtcctggaatgcaagggaaaaagttgacctttgaaatattacattttaaccacagacttcttgtattttcttcaccataacaatagagaaaagtacttttctttcatattttcccacctcctaatttgaacaactattgtagctgcatattttctcaagaaagagtacagtttccttgccaggacaacacggataagtgaaaggcttctgtggctgcttggtactgaacaaatggagaagaaatgaagggtgtcagcactctccttcc

SEQ ID NO: 62380 - DNA, 798 bp, Homo sapiens
tttttttttgaggcaaggtctagctttgttgcccaggctggggtgcagtagcgcgatcgcagttcactgcaacctccgcctccctgactcgagcgattctcccacctcagcctctggagtgctgcgaccccaggcgccgccacctaattaatagacgcgttgcctccgtttttcaaatgtccctttcaggacgccgtccccttcctggtacgcgaagcgctgggagcgaaagggacttccgggagatctaggaagtcgcttctttttctggtagaaggcggggttctcctcgtacgctgcggagtctctgcggggtgtagaccggaatcctgctgacgggcagagtggatcagggagggagggtcgagacacggtggctgcaggtctgagacaaggctgctccgaggtagtagctctcttgcctggaggtggccattcattcctggagtgctgctgaggagcgagggcccatctggggtctctggaagtcggtgcccaggcctgaaggatagccccccttgcgcttccctgggctgcggccggccttctcagaacgaagggcgtccttccaccccgcggcgcaggtgaccgctgccatggcttttccccatcggccggacgcccctgagctgcctgacttctccatgctgaagaggctggctcgagaccagctcatctatctgctggagcagcttcctggaaaaaaggatttattcattgaggcagatctcatgagccctttggatagaattgccaatgtctccatcctgaagcaacacgaagtagacaagctatact

SEQ ID NO: 62381 - DNA, 1544 bp, Homo sapiens
tgtcccaagccttccttaccctccgcagaaagtggtggcccacacagagttcacgacctcgtcggacagcgagactgcaaacgggatagcaaagccagaccctgtgatgccaggtggagaggaaaaagcctcaccgtttggaataaaattgagaaggaccaactattccttgcgcttcaactgcgaccaacaggcagaacagaagaagaagaagaggcacagcagcaccggagacagcgcggatgcagggccgcctgcagcggggagcgctcgtggagagaaagagatggagggtgtggccctcaagcatggtccatccctcccccaagagcggaagcaagccccttccacccggagggactccgctgaaccttccagcagccgctctgttcctgtggcccaccctgggcctccaccggccagcagccagaccccggctccggagcacgacaaggcagcaaacaaaatgccactggcacaaaagccagcactggctcccaagcccaccagtcagaccccaccagcatccccactttccaaactgagcaggccctacttggtagagctgctgtctcgccgagcagggaggccggacccagagccaagtgagccgtccaaggaggaccaggagagcagtgaccgccggccaccctcgcccccaggccccgaggaaaggaagggacagaagagggatgaggaggaagaggcgacagagaggaaacctgcttccccacctctgcctgccactcagcaagagaaaccttctcaaacacccgaggccgggaggaaagagaagccgatgcttcagagcagacactccttagatggctccaaacttacagagaaagtggaaactgctcagccgctgtggataacgttagcactgcaaaagcaaaaggggtttcgggagcagcaggcgacgcgggaggagagaaagcaagccagagaggccaaacaggcagaaaagctctccaaagaaaatgtcagtgtcagcgtgcagcctggaagcagcagtgtcagcagagcaggttccctgcacaagtccactgctctgccagaagagaagagacccgagactgcagtgtccaggcttgagcgcagagaacagctgaaaaaggccaatactcttcctacgtctgtgacagtggagatatcctactcgtctcctgcagcgccgttggtaaaagaagtctccaagaggttttcctcgccggatgatgcccccgtgtcatcagaaccagcctggctggctttggccaaaaggaaagcaaaggcttggagcgactgtcccctgattattaagtaaagagtgactctcacccatccgtactgccagttattggctcctctcttgccctttttatttatttattttttatatggggtaaagaaatctagctagggaaaagaagcatgttttataggctccaaaataatgtttagaaactgatctggtggtgttcattgtaaagagtggatttgcacatcccatgtattgcggccgctctgattatcacgcaacgtcgcgtgcatggccacgtaca

SEQ ID NO: 62382 - DNA, 774 bp, Homo sapiens
tttcgtgggaccccggcaacgggggcggacacgaccccgggctgggaggtggctgtgcggcccctgctgtccgcgtcctactccgccttcgagatgaaggagttgccgcagctggtggcctcagtcatcgagagtgaatcagaaatcctgcaccatgagaagcagtacgagccattctactcatcttttgttgcactttccacacactatattacaacagtttgcagtctcattccccggaaccaacttcagtcagtggcagcagcctgtaaagttctaattgagttttctctcctgcgtctggagaatccagatgaggcttgtgctgtgtcccagaaacacttgattctcctaatcaagggcctgtgcactggctgtagccgactagatagaactgaaattatcacatttacagcaatgatgaaatccgccaagctgccccaaacagtgaagacactttcagacgtggaagatcagaaagagctggcctcaccagtaagccctgagttgaggcaaaaggaggtacagatgaattttttgaaccagctgacctcagtttttaaccctagaactgtagcatcacaacctatcagtacacagactctggtggaaggagaaaatgatgagcagtcatctacagatcaagcctcagctatcaaaaccaagaatgtgttcatagctcagaacgtggctagtcttcaagagcttggtggctcggagaagctactgcgtgtatgtttgaacctgccatatttcctacgctatatcaatcgg

SEQ ID NO: 62383 - DNA, 412 bp, Homo sapiens
tttcgtgcgcaggcggcggaggcggctggggggtccggaagtcaacaccatgtcaagtctgcacaagagccgaattgcagatttccaggatgtcctgaaggagccctcaattgcattggaaaagctgcgggaactcagctttagtggcatcccctgtgagggcggactgcggtgcctctgctggaagattctcttgaactaccttcccttggagagagcctcatggacctccatcctggccaagcagagggagctgtatgcccagttcctgagggaaatgatcatccagcctggcattgccaaggccaacatgggtgtgtccagggaggatgtgacttttgaggaccatccactcaaccccaaccctgacagccggtggaacacgtacttcaaggacaacgaggtgctgctg

SEQ ID NO: 62384 - DNA, 721 bp, Homo sapiens
gaattcccgggtcgacgatttcgtggccaaaatggcggcctacctgcagtggcggcgcttcgttttcttcgacaaggagctggtgaaggagccgctgagcaatgatggggccgctcccggggccacacctgcttctggatccgctgcttccaagttcctttgcctccctcctggcatcactgtctgcgactcaggccgagggagcctggtctttggagatatggaaggccagatctggttcttgccacgttccctacagcttacaggcttccaagcctacaaactacgggtgacacacctgtaccaactgaagcagcacaatattctggcatctgttggagaagatgaagagggcatcaaccccttggttaagatctggaacctggagaagagagatggtggcaatccactctgcactcgaatcttccctgctattccaggaacagagccaactgttgtatcttgtttgactgtccatgaaaatctcaactttatggccattggtttcacagatggcagtgttacattgaacaaaggagacatcacccgggaccggcatagcaagacccagattttgcacaagggcaactatcctgtaactggattggcctttcgccaagcaggaaagaccactcacttgtttgttgtgacaacagagaacgtccagtcctatatagtttctggaaaagactaccctcgcgtggagttggacacccatggt

SEQ ID NO: 62385 - DNA, 626 bp, Homo sapiens
gctagacagctccggaattcctgggtcgacgatttcgtggcggcgccgctcatccccctctcccagcagattcccactggaaattcgttgtatgaatcttattacaagcaggtcgatccggcatacacagggagggtgggggcgagtgaagctgcgctttttctaaagaagtctggcctctcggacattatccttgggaagatatgggacttggccgatccagaaggtaaagggttcttggacaaacagggtttctatgttgcactgagactggtggcctgtgcacagagtggccatgaagttaccttgagcaatctgaatttgagcatgccaccgcctaaatttcacgacaccagcagccctctgatggtcacaccgccctctgcagaggcccactgggctgtgagggtggaagaaaaggccaaatttgatgggatttttgaaagcctcttgcccatcaatggtttgctctctggagacaaagtcaagccagtcctcatgaactcaaagctgcctcttgatgtcctgggcagggtctgggacctcagtgacattgacaaggatgggcacttggttcgagatgagttcgctgtggccatgcacttggtgtaccgagccctggagaa

SEQ ID NO: 62386 - DNA, 596 bp, Homo sapiens
tttcgtctggatctctggcagcagcttcactaaggtgggatggatagcagggtctcaggcacaaccagtaatggagagacaaaaccagtgtatccagtcatggaaaagaaggaggaagatggcaccctggagcgggggcactggaacaacaagatggagtttgtgctgtcagtggctggggagatcattggcttaggcaacgtctggaggtttccctatctctgctacaaaaatgggggaggtgccttcttcatcccctacctcgtcttcctctttacctgtggcattcctgtcttccttctggagacagcactaggccagtacactagccagggaggcgtcacagcctggaggaagatctgccccatctttgagggcattggctatgcctcccagatgatcgtcatcctcctcaacgtctactacatcattgtgttggcctgggccctgttctacctcttcagcagcttcaccatcgacctgccctggggcggctgctaccatgagtggaacacagaacactgtatggagttccagaagaccaacggctccctgaatggtacctctgagaatgccacctctcctgtcatcgagtt

SEQ ID NO: 62387 - DNA, 1173 bp, Homo sapiens
gaattcccgggtcgacgatttcgtagccgctgctccttttgttttgtgggcctggctctggtcccggagcagcacctccctggggaggccgcctttccttccgcggcttcttccgtctcctcctgaccccaaggtgcctccggcctctgcctccagctaaggacctctggccaagcctcctgcccagggagaggtgaagctgccgtgcctgggtgccccgtggtggccggacactcctggcggctgctcagtcttgcacgtggctgtgccaagcgggccaggcagctgctatttccctcagagaagttgctggcggcgctcaaggaaggaagcacccgaggaggcggagcggcatctcagccacagagcaatatgtcggacgccttggccaacgccgtgtgccagcgctgccaggcccgcttctcccccgccgagcgcattgtcaacagcaatggggagctgtaccatgagcactgcttcgtgtgtgcccagtgcttccggcccttccccgaggggctcttctatgagtttgaaggccggaagtactgcgaacacgacttccaaatgctgtttgctccgtgctgtggatcctgcggtgagttcatcattggccgcgtcatcaaggccatgaacaacaactggcacccgggctgcttccgctgcgagctgtgtgatgtggagctggctgacctgggctttgtgaagaatgccggcaggcatctctgccggccttgccacaaccgtgagaaggccaagggcctgggcaagtacatctgccagcggtgccacctggtcatcgacgagcagcccctcatgttcaggagcgacgcctaccaccctgaccacttcaactgcacccactgtgggaaggagctgacagccgaggcccgcgagctgaagggtgagctctactgcctgccctgccatgacaagatgggcgtccccatctgcggggcctgccgccggcccatcgagggccgagtggtcaacgcgctgggcaagcagtggcacgtggagcactttgtctgtgccaagtgtgagaagccattcctggtgcaccggcactatgagaagaagggcctggcctactgcgagactcactacaaccaggtgagccctgtgcagaaccttcagggatgctgttctggaggggtggcatgagagctgccgaga

SEQ ID NO: 62388 - DNA, 401 bp, Homo sapiens
tttcgtctggcgtggacgtttgtggtggggcgtgttggtccgcgctctcagaactgtgctgggaaggatggtagggcgactggggctcacctccgcaccgttgtaggacccggggtagggttttgagcccgtgggagctgccccacgcggcctcgtcctgccaacggtcggatggcggagacgaaggacgcagcgcagatgttggtgaccttcaaggatgtggctgtgacctttacccgggaggagtggagacagctggacctggcccagaggaccctgtaccgagaggtgatgctggagacctgtgggcttctggtttcactagggcatcgggttcccaaaccagagttggtccacctgctaaagcatgggcaggagctgtggatagtgaagagaggcct

SEQ ID NO: 62389 - DNA, 571 bp, Homo sapiens
tttcgtccgcggagccgctttgtgtgcagcccttctaggtgcggcggcgcaaccacctgacagaggcccgggcgctcgatgcaccttccgcccgcatgaggaggagaggccggtagaggactgtgaaccaaaagttgtcccccaggatggacttcaccgcgcagcccaagcctgccactgccctctgtggcgtcgtgagtgccgacgggaagatcgcttaccctccgggggtaaaagagatcaccgacaagatcaccacggacgagatgatcaaacgcctgaagatggtagtgaaaacctttatggatatggatcaggactcagaagatgaaaaacagcagtatctcccactagccttgcatcttgcatctgaattcttcctcaggaaccccaataaagatgtgcgtctccttgtagcatgttgtttggctgatatctttcgtatctatgccccagaagctccatatacttcccatgataaacttaaggacatatttgtgtttatgaccagacaattaaagggtttggaggatacaaagagtccacagtttaatagatactttgattaatg

SEQ ID NO: 62390 - DNA, 793 bp, Homo sapiens
tttcgtgcggcggggcggccggcggcggccatgggagatatcccagttgtgggcctcagctcctggaaggcttctccagggaaagtgaccgaggcagtgaaagaggccattgacgcagggtaccggcacttcgactgtgcttacttttaccacaatgagagggaggttggagcagggatccgttgcaagatcaaggaaggcgctgtaagacgggaggatctgctcattgccactaagctgtggtgcacctgccataagaagtccttggtggaaacagcatgcagaaagagtctcaaggccttgaagctgaactatttggacctctacctcatacactggcccatgggtttcaagcctcctcatccagaatggatcatgagctgcagtgaactttccttctgcctctcacatcctcgagtgcaggacttgcctctggacgagagcaacatggttattcccagtgacacggacttcctggacacgtgggaggccatggaggacctggtgatcaccgggctggtgaagaacatcggggtgtcaaacttcaaccatgaacagcttgagaggcttttgaataagcctgggttgaggttcaagccactaaccaaccagattgagtgccacccatatcttactcagaagaatctgatcagtttttgccaatccagagatgtgtccgtgactgcttaccgtcctcttggtggctcgtgtgagggggttgacctgatagacaaccctgtgatcaagaggattgcaaaggagcacggcaagtctcctgctcagattttgatcc

SEQ ID NO: 62391 - DNA, 1820 bp, Homo sapiens
tttcgtggaggctagggatgggtgctgaagtatcaggctctggctctagctttagctctggcactggaactgcgtcggagtctgggtctgagtctggcagcccgaagcctggacaccttttcttgattctctaggcgggggctgcctgcgtccaagcagctggtttgcagcgttccaacgctgggagggagttcccttacctggggtccagtctgtaaagttgtcgccgctttctagggaccccgccccaccggctgggactcttccatgcagttgaaactggttgacaaccattaacctgggttgcaactacaggtggcactggaagcagactggttcctggacatgcccggtggaaggaggggccctagtcggcaacagctaagccgttcagctttaccttctttgcagactttggttggtggaggctgtggcaatggaacaggcttgagaaacaggaatggtagtgctattggccttccagtcccacctatcacagccttaatcaccccaggtcctgttcgtcattgccaaattcctgacttgcctgtggatgggagcctactctttgaattcctttttttcatctacctgttggttgctcttttcattcagtacatcaacatttataaaacagtgtggtggtatccttacaatcatcctgcttcttgtacatcactgaattttcatctcattgattatcatctggcagcattcatcacagtgatgcttgcgaggaggcttgtatgggctctcatctcagaggctactaaggcaggtgcagcatcaatgattcactacatggttctgatatcagctcgcttggtactactcactttgtgtggatgggtactttgttggaccctcgtcaatctctttcgaagccattcagtcctcaatctccttttccttggctacccgtttggtgtttatgttcctctttgctgttttcatcaagatagtagagcacatcttcttctcacagactacaactatgtggttcagcacgaggcagtagaggaaagtgcctcgactgtgggaggcttggccaaatccaaagactttctctccttgttgctggagtcgctaaaagaacagtttaataatgccacacccatccccacccacagttgtcccctatctccagacctcattcgcaatgaagtagaatgtctgaaagcagatttcaaccacagaatcaaggaggttctcttcaactccctcttcagtgcctactatgttgcatttctccccctgtgttttgtgaaggtaagtggttatcttacttttatgtgcttcctggatttgtgtgtgaattacataaactgggtatttcttgtttaatcccccttttctctgtctcccctttggcagcctggatggtggagttcggctgcatctggagtgcactaataccgctcctggttggcggataggtatttccatatatgtgatgcccccgtggtggttccctctttttttctttttttcttttttttttaagtatttttagtttctggggagaatcaaaatgtacttataatagaatcagtatgtagtagcttaagaggaccaaggtttcagtaaacctcagcctactgtggttgatcttaacatggttatcaggagtttccttgaatttaatctagcccttatctaaacttcagtttactttaatagaaaagaaaaatggtctggatgtcacttgggcccaaaatcttttggtacattttagtgccctttcttcacccattcagaagtacttctgcagctggaatggtccttcagagaacactcagttcttctagaaaggagacact

SEQ ID NO: 62392 - DNA, 547 bp, Homo sapiens
cccgggtcgaggatcgacgatttcgtcggaggctttgtctcgtgggctggtccccagcggctccctccccgaacagctgctgctccagggaggaagcggcgcgggtgctgtccagcttcccggtgctgaaaaccggagggctcgtcatccaccactaccatgtaagggccatgagaagggctcatcctggcgcagcgcggacatggaggaggacttattccagctaaggcagctgccggttgtgaaattccgtcgcacaggcgagagtgcaaggtcagaggacgacacggcttcaggagagcatgaagtccagattgaaggggtccacgtgggcctagaggctgtggagctggatgatggggcagctgtgcccaaggagtttgccaatcccactgatgatactttcatggtggaagatgcagtggaagccattggctttggaaaatttcagtggaagctgtctgttctcactggcttggcttggatggctgatgccatggagatgatgatcctcagcatcctggcaccacagctgcattgcgagtgg

SEQ ID NO: 62393 - DNA, 933 bp, Homo sapiens
agcggccgctcgcccgtgttgtgtgtccccggtgtcaccgagcgtgttgtgtgtccgtgcggcgcggcgctcgtgtggctccctcgcgcccaccacgctggcccccgggccccggctcgcccttcccaggcgccggctgcagcagagtttcagaacaagcttcctggaacccatgacccatgaagtcttgtcgacatttataccgtctgagggtagcagctcgaaagtagaagaaagtgttgccagggacggcagtatctctttgtgtgaccctggcggcttatgggacgttggcttcagacctttgtgatacaccatgctgcgtgggacgatgacggcgtggagaggaatgaggcctgaggtcacactggcttgcctcctcctagccacagcaggctgctttgctgacttgaacgaggtccctcaggtcaccgtccagcctgcgtccaccgtccagaagcccggaggcactgtgatcttgggctgcgtggtggaacctccaaggatgaatgtaacctggcgcctgaatggaaaggagctgaatggctcggatgatgctctgggtgtcctcatcacccacgggaccctcgtcatcactgcccttaacaaccacactgtgggacggtaccagtgtgtggcccggatgcctgcgggggctgtggccagcgtgccagccactgtgacactagccagtgagtctgctcctttgcctccctgccatggtgcggtccctcctcatctctcccaccctgaagcccccaccattcatgctgcctcttgttactcttagcataaaatgggccttaactgcagaaatgtcaaatcagaacagtagctgccttagtaatgcccagtgatgggggaccccttgtgcccttggaaaacctcactccaagtagaggctgtatctggagtgagtgtctacagagaggg

SEQ ID NO: 62394 - DNA, 580 bp, Homo sapiens
atttcgtgccgcggcctttgtctcgcagtcaggaggagcagggccagccgttcctgccagaagccagggcatgacccctggggtgcgcgtctccacagacccggagcaagtgacatttgaggacgtggtagtggacttcagccaggaggagtgggggcagctgaagcctgcccagaggaccctgtaccgtgatgtaatgctggacaccttcaggcttctggtctctgtgggacattggttaccgaagccgaatgtcatctccctgctggagcaagaggcagagctgtgggcggtggagtctagacttccccaaggcgtgtacccaggtgagatgggagcccttcggggcagagagaagcctgtccatgcttgcttcctggtttctccctctgcatctgctctctaattcttcagagcaaatttactactcagtcttagtgaagatttaccaagcacccattttgctgtgagtgacgacaccacgtcctcatctccactgaatttatattcttggtgagggagtgggggaaacaaacaataaatcggtaaaataataataataaaacaagttggatgatta

SEQ ID NO: 62395 - DNA, 432 bp, Homo sapiens
gtcctgtcgtgctcacctgcgccggtcgctggaccgcggggcgctaaccctggagagcccaggagcgggcgggacatggactgcgtgatctttgaggaagtggctgtgaacttcaccccagaagagtgggcattgctggatcatgctcagaggagcctctacagagatgtgatgctggagacctgcaggaaccttgcctccttggattgttacatttatgttagaaccagtggatcaagttctcagagggacgtttttgggaatggaatatccaatgatgaagaaattgtaaagttcacaggaagtgattcctggtctatttttggagaaaattggagatttgataacactggagatcagcaccaaatcccacagaggcatctgagaagtcagctggggagactctgtgaaagtatgaaggtcatcatgcga

SEQ ID NO: 62396 - DNA, 889 bp, Homo sapiens
cctgaattctcgggtcgacgatttcgtggccgtgccgggcgccatcatggacgaggactactacgggagcgcggccgagtggggcgacgaggctgacggcggccagcaggaggatgattctggagaaggagaggatgatgcggaggttcagcaagaatgcctgcataaattttccacccgggattatatcatggaaccctccatcttcaacactctgaagaggtattttcaggcaggagggtctccagagaatgttatccagctcttatctgaaaactacaccgctgtggcccagactgtgaacctgctggccgagtggctcattcagacaggtgttgagccagtgcaggttcaggaaactgtggaaaatcacttgaagagtttgctgatcaaacattttgacccccgcaaagcagattctatttttactgaagaaggagagaccccagcgtggctggaacagatgattgcacataccacgtggcgggaccttttttataaactggctgaagcccatccagactgtttgatgctgaacttcaccgttaaggtaggaagagttctagagttaaggagaaaagtgtttatgaatgtttatttttggttgttggtctgtttcctttgacagttcatatttgctttttttccataaaggtctttattgttttattttcataagccttacactgagaaagaaaagtgtaaaatttgtatctgtttttgggtcagtgttgactgtgttttaggatttagcagggatacaagaattctcttgtggttggagaggagctttaggcgtgcctgcttgatcttcctcttgcatatgaagaaacgatggagaggtggtcagcccagggcacacacctaggtgatagcagggtgagggcgg

SEQ ID NO: 62397 - DNA, 452 bp, Homo sapiens
tttcgtcgcctttgtcctggtggtccacggccgtgcctctcggcagttgcagcgcatgttcaaggccatctaccacaaagaccacttctactacatccacgtggacaagcgctctaattgcctgcatcggcaagtgctccaggtctccaggcagtacagcaatgtccgcgtcaccccctggagaatggccaccatctggggaggagccagcctcctgtccacctacctgcagagcatgcgggacctcctggagatgaccgactggccctgggacttcttcatcaacctgagtgcggccgactaccccatcaggacaaatgaccagttggtggcgtttctctcccgataccgagatatgaatttcttgaagtcacacggccgggacaatgcaaggttcattcggaagcagggcctggatcggctcttcctggagtgcgacgctcacatgtggc

SEQ ID NO: 62398 - DNA, 416 bp, Homo sapiens
acgatttcgttgcggcctgcgggggaggctgcccggaggaggcagcggcggcggcagcgcgtcctcggtccccaggaccacggcttctttcctgccagagcgactctaccttggaaaccagggattccccttcccgtcgcccgccccatttgatatatgggcctgaaatgtatgccatcccatcaccatcggactggactgttcacagcactggagagacagaggtccttcattcactccaggtcacaggctgtgcgtgtgcatgccgaacacccacatgcacacagttggtggctcagtctgatgtacctgacttctcacgccttcccccagtcctccagtaccgtgcctctacatgggctgggcagccccaaactgaaatgtgagtgccagagtgcatcctttaagcgaggtct

SEQ ID NO: 62399 - DNA, 423 bp, Homo sapiens
tttcgtctagggtatcgcggccctgcgtcctcttgtctggactaaaagtccgggcagttctccccggacctggattgtgggcccagcgacaggtgcttggcgatctgtgcccgctgtgcctgcggggctgtggtgggagtcctgtctgcacggtattctgtgtggctgtgcataacccacaagaggagagaactgctgtgcgtctgaagtgatggcggagatgtgatcttgtttaatccacataacaaccctattagacagggcttgaagttcaaagatgtggtcatttacttctctcaaaaggagtgggaatgcttgcactctgctcagaaggatttgtaccgagatgtaatgttggaaaattacggcaacctggtcttactggggctttctgatactaagccaaatgtgatctccttattg

SEQ ID NO: 62400 - DNA, 656 bp, Homo sapiens
tttcgtcggaaactgcacagccagtcggcttcctgagcttcttccggcgttctgtgtgctgccgtggaaaccgtttggacgaatccaaacctggaggggcgtcgcctccgtaaggctggtcggcttcttccgcgcgttccgctttgcttcactgctttctcccccattcttgggcctagggacctgtcctgaggcagaggccgagatgcgcgcaaccgcgggagcagccaagtggactggactcttttcttgacttagctaccaggagctagagatgctgttattctatcgtatgtgagaagtcggcccagagatggaaaactttattctgtatgaggagatcggaagaggaagcaagactgttgtctataaagggcgacggaagggaacaatcaattttgtagccattctttgtactgataagtgcaaaaggcctgaaataaccaactgggtccgtctcacccgtgaaataaaacacaagaatattgtaacttttcatgaatggtatgaaacaagcaaccacctctggctagtggtggaactctgcacaggtggttccttaaaaacagttattgctcaagatgaaaacctcccagaagatgttgtgagagaatttggaattgacctgattagtggattacatcatcttcataaag

SEQ ID NO: 62401 - DNA, 407 bp, Homo sapiens
tttcgtccggtcttggctgccgcggcacaggcggcggcgtctccagggggagccaaggacctgttcgttcttctttgggctataagaaggcagaggatgagatgtcccgggccacgtctgttggagaccagctggaggcacccgcccgcaccatttacctcaaccaaccgcatctcaacaaattccgcgacaaccagatcagtacggccaagtacagcgtgttgacatttctacctcgattcttgtatgagcagattagaagagctgctaatgccttctttctcttcattgccttattacagcaaattccagatgtatctccaacaggaagatataccaccctggtgccattgatcattattttaacaattgcaggcatcaaagagattgtagaagattttaagcga

SEQ ID NO: 62402 - DNA, 631 bp, Homo sapiens
tttcgtctcctgaggagactgctgcagcgcgagaggccttcggcggcctctggccgccccgtaggacggcgcgaggccaacctgggcactgatgccggggttgcggtgcgagtgcggttcgctcccagccccacaggcttcttgcacctgggtggcctccgcactgccttgtacaactacatctttgctaagaagtaccaggggagcttcatcctgaggctagaggacacagatcagactcgcgttgtgcctggggcagcagagaatattgaggacatgctggagtgggcaggcatcccgcctgatgagagcccccgccggggcggtcctgctgggccctaccagcaatctcagcggttggagctgtatgcccaggccacagaagcgctgctgaagaccggagctgcttacccctgtttctgctcaccccagcggctggagctcctgaagaaggaggccttgcggaaccaccagacgccccggtatgacaatcggtgcaggaacatgagccaggagcaggtggcccagaagctggccaaggaccccaagcctgcgatccgcttccgcctggagcaggtggtgccagccttccaggacctggtgtatggctggaataggcatgaagtggccg

SEQ ID NO: 62403 - DNA, 582 bp, Homo sapiens
tttcgtgttgtcctccgagccttccgattggcggagaggaccatgggacctggaagttgtctttgtccggccagggctgcccttccggttccgttgggtccccctttggctcgggttccttgcccctcccccttcccggagccccgaggggccggagctcctggcggtgccggatcctgacggcggccttcccccgggtctgtctgccaaaatgtctgaaagatcagatctccttcacttcaagtttgaaaattatggagattcaatgttacaaaaaatgaacaaattaagagaagagaataaattttgtgatgttacagttctcatagatgatattgaggtacagggacataaaattgtgtttgctgcaggttcccccttcttaagagaccaatttttactgaatgattccagagaggtgaaaatctccatattacagagttccgaagtggggagacaattgctcttatcctgttatagtggtgtgctggaattccctgagatggaactggtaaattacttgactgctgcaagttttcttcagatgagccacattgtagaacggtgcacacaggccctgtg

SEQ ID NO: 62404 - DNA, 420 bp, Homo sapiens
ctggggtcggcggagacagctggtgtctgaagccgctcgcgcccagggtgaccctgtttgcagcacgatgtctgaagaagaggcggctcagatccccagatccagtgtgtgggagcaggaccagcagaacgtggtgcagcgtgtggtggctctgcccctggtcagggccacgtgcaccgcggtctgcgatgtttacagtgcagccaaggacaggcacccgctgctgggctccgcctgccgcctggctgagaactgcgtgtgcggcctgaccacccgtgccctggaccacgcccagccgctgctcgagcacctgcagccccagctggccactatgaacagcctcgcctgcaggggcctggacaagctggaagagaagcttccctttctccagcaaccttcggagacggtggtgacctcagc

SEQ ID NO: 62405 - DNA, 785 bp, Homo sapiens
tttcgtgcgggtcgcaccccgcccaggcccctctcccgccccaggtctctcagtcttttttctcagggcgtgtagcttcctgcacacccggaagcagatcgcgcggggaaaagatcacagcgctgcgcgtcagtttccgtctacctggactaaacatttgcttcgccccgtctgcctgaatcgaacgtgcacttggcagtcttcccttgtccatacccgtttcctggggatcgctacggaccttaaaataccagcaacagccccttcgccccaaggtcttgctctgtcagactagagtacagtgccatgatctccgctcactgcagcctcaacctcctgggctcaagcagtctttctgcctcagagtgctgggattacagacgggagccaccacgccaggcctacgagatttgacttgtaaagaattaattatattgactgagagagaagcccagaagaggaagaagaggaaagaaaaggagtcagggatggctcttacacagggacctttgacattcagggatgtagccatagaattctctcaggaggagtggaaatccctggaccctgtgcagaaagctttgtactgggatgtgatgttggagaactacaggaacctggtcttcctgggtaaggataattttgctctagaagttaagatctgccctcgtgtatttttgtattttctctgttgtctttcttgggagcccttccattatttgactgagactgaagccttgttgactcacaaataaaaagcttcataatgctgaaaaaaaaggggg

SEQ ID NO: 62406 - DNA, 495 bp, Homo sapiens
tttcgtggcgaaggcagcggcaggtcgggagcaagatggcgctgcggccaggagctggttctggtggcggcggggccgcgggagctggcgcggggtccgccgggggaggcggcttcatgtttcctgttgcaggtgggataagaccccctcaagcaggcctgatgccgatgcagcaacaaggatttcctatggtctctgtcatgcagcctaatatgcaaggcattatgggaatgaattacagctctcagatgtcccaaggacctattgctatgcaggcaggaataccaatgggaccaatgccagcagcgggaatgccttacctaggacaagcacccttcctgggcatgcgtcctccaggcccacagtacactccagacatgcagaagcagtttgccgaagagcagcagaaacgatttgaacagcagcaaaaactcttagaagaagaaagaaaaagacgccagtttgaagagcagaagcaaaagctcagacttttga

SEQ ID NO: 62407 - DNA, 580 bp, Homo sapiens
tttcgtgctgggggccgtggggcccccgggcgcggccgggacgagcctccggagagctacccgcaacgacaggaccacgagctacaggccctggaggccatctacggcgcggacttccaagacctgcggccggacgcttgcggaccggtcaaagagccccctgaaatcaatttagttttgtaccctcaaggcctaactggtgaagaagtatatgtaaaagtggatttgagggttaaatgcccacctacctatccagatgtagttcctgaaatagagttaaaaaatgccaaaggtctatcaaatgaaagtgtcaatttgttaaaatctcgcctagaagaactggccaagaaacactgtggggaggtgatgatctttgaactggcttaccacgtgcagtcatttctcagcgagcataacaagccccctcccaagtcttttcatgaagaaatgctggaaaggcgggctcaggaggagcagcagaggctgttggaggccaagcggaaagaagagcaggagcaacgtgaaatcctgcatgagattcagagaaggaaagaagagataaaagaagagaaaaaaaaaa

SEQ ID NO: 62408 - DNA, 713 bp, Homo sapiens
ttcctcttgtccttgagcgtcaaccttctttccctgaagtggctggggttcctgtttccttctttgattgacaacttgtgttaaccctcgcacatctctgggccaatttttgcttgtaagtctttccggagacccctggaatttaaatcattagcaccgcgcccttccccgaagagtcttcgaagggttgccgcttttcggtggcgcagttctcgcgagaaggtgactttctttctcggtatttcctggtttccagaatccttagcgcgaggcggaaaaaatatttctcccagcttgtgttgatgccgcgattttgactgagacttcttcccacgatttctgtttttgcttctccaaggaaaatggcagctcccgagcagccgcttgcgatatcaaggggatgcacgagctcctcctcgctttccccgcctcggggcgaccgaacccttctggtcaggcacctgccggctgagcttactgctgaggagaaagaggacttgctgaagtacttcggggctcagtctgtgcgggtcctgtcagataaggggcgactgaaacatacagcttttgccacattccctaatgaaaaagcagctataaaggcattgacaagactccatcaactgaaacttttaggtcatactttagtcgttgaatttggcaaaagagcaagatcgagttcactccccatgtcccacttcaggctctgaaaa

SEQ ID NO: 62409 - DNA, 1248 bp, Homo sapiens
tttcgtagcgagtaaagaagcagatttgctctccctcccgcttcctccctcccatcttcccacccgggctgtgcccaggccacagagcagctgcaggccttgggagaggacccacacagcctcctgtaggtggcaacagtgccacctgtttgactcatagggctgaaccgaggactgaaaaagggaggaggcagaccactcggagaggagctgggaagcagtgcagagaggagagcggagcggagctgccgctgagcaaaggccttcaccatggccgagtcccccggctgctgctccgtctgggcccgctgcctccactgcctgtatagctgccactggaggaaatgccccagagagaggatgcaaaccagcaagtgcgactgtatctggtttggcctgctcttcctcaccttcctcctttccctgagctggctgtacatcgggctcgtccttctcaatgacctgcacaacttcaatgaattcctcttccgccgctggggacactggatggactggtccctggcattcctgctggtcatctctctactgggcacatatgcatccttgctattggtcctggccctgctcctgcggctttgtagacagcccctgcatctgcacagcctccacaaggtgctgctgctcctcattatgctgcttgtggcggctggccttgtgggactggacatccaatggcagcaggagaggcatagcttgcgtgtgtcactgcagactgcaggtagctctgaactccagcagtcaggccctaagaggaaagcggggaggggcactggagaagagcccacctcaccagctcttgtccacaggccacagccccattccttcatattggagcagccgctggaattgccctcctggcctggcctgtggctgataccttctaccgtatccaccgaagagagcccaagattctgctactgctcctattttttggagttgtcctggtcatctacttggcccccctatgcatctcctcaccctgcatcatggaacccagagacttaccacccaagcctgggctggtgggacaccgaggggcccccatgctggctcccgagaacaccctgatgtccttgcggaagacagctgaatgcggagctactgtgtttgagactgatgtgatggtcagctccgatggggtccccttcctcatgcatgatgagcacctcagcaggaccacgaatgtagcctctgtattcccaacccgaatcacagcccacagcagtg

SEQ ID NO: 62410 - DNA, 625 bp, Homo sapiens
tttcgtcgggcggtggaaaagcgagtgaagagagcgcgacggcggcggcggcggcggcgcagctattgctggacggccagtgggagagcgaggcctgagcctctgcgtctaggatcaaaatggtttcaatcccagaatactatgaaggcaagaacgtcctcctcacaggagctaccggttttctagggaaggtgcttctggaaaagttgctgaggtcttgtcctaaggtgaattcagtatatgttttggtgaggcagaaagctggacagacaccacaagagcgagtggaagaagtccttagtggcaagctttttgacagattgagagatgaaaatccagattttagagagaaaattatagcaatcaacagcgaactcacccaacctaaactggctctcagtgaagaagataaagaggtgatcatagattctaccaatattatattccactgtgcagctacagtaaggtttaatgaaaatttaagagatgctgttcagttaaatgtgattgcaacgcgacagcttattctccttgcacaacaaatgaagaatctggaagtgttcatgcatgtatcaacagcatatgcctactgtaatcgcaagcatattgatgaagtagtctatcc

SEQ ID NO: 62411 - DNA, 643 bp, Homo sapiens
tttcgtggcgtttttttggtcttacgccctagggtggggtgaggactccggtgcctccgggtctgggctgggccgcaaagggcggggcctgggcccggcgcgggccgggagcagaggccgagaccctgcaggtgattcctggggctgccagctaaggtcccttatgatttctgctctggctttgcagttttcagcctttcccaagagcagcagaaaatgaacaagttccagggacccatgacattaaaggatgttattgtggaattcaccaaggaagaatggaagttactgacccctgctcagaggactctgtataaggatgtgatgctggaaaactatagtcaccttgtctcagtgggttaccatgtgaataagccaaatgcagtcttcaagttgaagcaaggaaaagagccatggatattagaagtagaatttccacatcggggcttccctgaagacctatggagcattcatgatctagaagcaagataccaggaaagccaagctggaaattcaagattgagtctcgctctattgcccaggctggagtgcagtggcacaatcttggctcactactacaacctctgcctcccaggttaaagcgatgctcctgcctcagcctcctgagcagctgggattacag

SEQ ID NO: 62412 - DNA, 419 bp, Homo sapiens
tttcgtgctggacaaagctggccgtgcaggcgctcatgcgtgcagggtagccagtgccccggccaggaatggacagcctccaggacacagtggccctggaccatgggggctgctgccctgccctcagcaggctggttcccagaggctttgggactgagatgtggactctctttgccctttctggacccctgttcctgttccaggtgctgacttttatgatctacatcgtgagcactgtgttctgcgggcacctgggcaaggtggagctggcatcggtgaccctcgcggtggcctttgtcaatgtctgcggagtttctgtaggagttggtttgtcttcggcatgtgacaccttgatgtctcagagcttcggcagccccaacaagaagcacgtgggcgtgatcctgcagcggggcgcgctg

SEQ ID NO: 62413 - DNA, 571 bp, Homo sapiens
cccttccttcccctttcccgcagtcgttgcctcctcctcccctgcctcctcctccccttcctcctcctggccgcttagtctcacacccgccgggccgttgttcccgagacgttgttgagtcccctgtgtcctcttctgggtggaggaactgcaatgtctggtggagaacagaaaccagagaggtactatgtgggtgtggacgttggaacaggcagtgtccgtgcagctctggtggaccagagtggggtcctgttggcttttgcagaccagccaattaagaattgggagccccagttcaaccaccatgagcagtcctccgaggacatctgggctgcgtgctgtgttgtcacaaagaaagttgtacaagggattgatttaaaccaaattcgaggacttgggtttgatgccacgtgttctctggttgttttggataagcagtttcacccattaccagtcaaccaggaaggggattcccatcgaaacgtcatcatgtggctggaccatcgagcagtcagtcaagttaacaggatcaatgagaccaagcacagtgtcctccagtacgtcggggggg

SEQ ID NO: 62414 - DNA, 458 bp, Homo sapiens
aaattcccgggtcgaggctccagaggcacactccagagagagccaaggttctgacgcgatgaggaagcacctgagctggtggtggctggccactgtctgcatgctgctcttcagccacctctctgcggtccagacgaggggcatcaagcacagaatcaagtggaaccggaaggccctgcccagcactgcccagatcactgaggcccaggtggctgagaaccgcccgggagccttcatcaagcaaggccgcaagctcgacattgacttcggagccgagggcaacaggtactacgaggccaactactggcagttccccgatggcatccactacaacggctgctctgaggctaatgtgaccaaggaggcatttgtcaccggctgcatcaatgccacccaggcggcgaaccagggggagttccagaagccagacaacaagctccaccagcaggtgctctggc

SEQ ID NO: 62415 - DNA, 412 bp, Homo sapiens
cccacgcgtccgggctttcacaaatacagctctgcaacgcgtttgccctgataccatgtctcttcgactttccagtgcatccaggaggtcctgtcctcgtcccaccactggatcactcagactctatggtgggggaaccagctttggtactggaaattcttgtggcatttcagggattggaagtggcttctctagtgccttcggaggcagctcatcgggaggaaacacagggggaggtaatccctgtgctgccttcactgtgaatgagcgggggctcctttctggcaatgagaaggtgaccatgcagaacctcaatgaccgactggcatcctacctggacagtgtgcatgctctggaggaggccaacgctgacctggagcagaagatcaagggctggtatgagaaatttggg

SEQ ID NO: 62416 - DNA, 467 bp, Homo sapiens
tcccgagtcgacccacgcgtccgcaagcaacctaactcttaacccaacttctgacaccatgacctgctgccagaccagcttctgtggatatcccagcttctccatcagtgggacctgtggctccagctgctgccagccaagctgctgtgagaccagctgctgccagccacgcagctgccagactagcttctgcggatttcccagcttctcaaccagtgggacctgcagctccagttgctgccagccaagctgctgtgagaccagctgctgccagccaagctgctgtgagaccagctgctgccagccaagctgctgccagatcagctcctgcggaactggctgtggcattggtggtggcatcagctatggccaggagggcagcagtggagctgtgagcacccgtatcaggtggtgccgcccagacagtcgtgtggagggcacctacctacccccctgctgtgtggtgc

SEQ ID NO: 62417 - DNA, 754 bp, Homo sapiens
gagccagcctctggcttctctctgcaatggccatgtgctgcagacccggagtgggtagttagttggttaatgccagtcttcctcccctggacactgagttctgctgacagcccccgcccagccagagctctgctgtataccaccgggagtggggctggtgtggagcctggaggtcgcccgctgccctcctagggctgctccagacagcattaaaacgctgcaggtcgcaggtgagactaacagctgggagagctgctccaggcatttaggaccctgactggggcagatgagtcagcccagtgggggcagggctcctggaacgaggatctacagttggagttgccccactgtcatgtcacctggagaaaaactggacccaattcctgacagcttcattctgcaaccaccagtcttacacccggtggttccttatgtcacgacgatttttggaggcctgcatgcaggcaagatggtcatgctgcaaggagtggtccctctagatgcacacagtaggtttcaggtggacttccagtgtggctgcagcctgtgtccccggccagatatcgccttccacttcaaccctcgcttccataccaccaagccccatgtcatctgcaacaccctgcatggtggacgctggcaaagggaggcccggtggccccacctggccctgcgaagaggctccagcttcctcatactctttctcttcgggaatgaggaagtgaaggtgagtgtgaatggacagcactttctt

SEQ ID NO: 62418 - DNA, 411 bp, Homo sapiens
cggacgcgtgggctgctcctctacctgctccaccctcaacccaccaaaaccatgggctgctctggctgctctggaggctgtggctccagctgtgggggctgtggctccagctgtgggggctgtggctccggctatgggggctgtggctccggctgctgtgtacctgtctgctgctgcaagcccgtgtgctgctgtgtgccagcctgttcctgctccagctgtggctcctgtgggggctccaagggggtctgtggctcttgtgggggctgcaaggggggctgtggctcctgtggaggctccaaggggggctgtggctccagctgctgtgggcccgtctgctgctcctccagctgtggctcctgtgggggttccaagggggtctgtggatttcgtggggggctccaagggggg

SEQ ID NO: 62419 - DNA, 938 bp, Homo sapiens
cagggaccatgtttcctcacagtcttggagttgtgatggaggcgttctctgtcctgaagttttgcctccctttgtaattgcatttatatgttggcctgaactgatcagtaagtttagatactgttttggatgggccaggtgagactgaatgcaacctcaggcgttcacatctcgaggtggcctttggggaagagctgcctcgtgctgggtcctgcctctttcagagcaggccagcacagctccttggagcaggaagacccttctggcagacgccaggccgcggcgtcttgctgcctctgggcaggagactgaagttaaaaacagacttgcaaggctcggccatggctgggttttacaagaatgatggcccggtgtttggcgagctgaggagtggatcctccccctgccagcgatattagggacgatgaggagcacgtggcaataagacggcaagggtttggtcccctcacacccaataaaaaaacgcctttcatgagagaaagcagttgcaggggcagctttagacttgaagcttttggaggccacatctacacagacaggtgacggtgacgttgtaaataatatgtatgagcccaaccgggacctgctggccagccacagcgcggaggacgaggccgaggacagtgccatgtcgcccatccccgtggggccaccgtcccccttccccaccagcgaggacttcacccccaaggagggctcgccgtacgaggcccctgtctacattcctgaagacattccgatcccagcagacttcgagctccgagagtcctccatcccaggggctggcctgggggcctgggccaagaggaagatggaagccggggagaggctgggcccctgcgtggtggtgccccgggcggcggcaaaggagacagacttcggatgggaacaaatactgacggacgtggaagtgtcgc

SEQ ID NO: 62420 - DNA, 790 bp, Homo sapiens
cccccacgcgtccgcgcgagggagcacgccccggcaggcaagcgtttgcctccgccatgaaccccaggggcctgttccaggacttcaaccccagtaaggttctcatctacacctgcctgctgctcttctcggggctgctgccactccgactggacggcatcatccaatggagctactgggccgtctttgcccccatatggctgaggaagcttctagtcgtcgcaggcgcctccgtgggcgcgggcgtttgggcccccaaccctcgctaccgcaccgagggagaggcctgtgtggagttcaaagccatgctgatcgctgtgggcatccacctgctgctgctcatgttcgaagtcctggtctgcgacagggtggagaggggcacccacttctggctgctggtcttcatgcctctcttcttcgtgtcccccgtgtccgtggctgcctgcgtctggggctttcgacacgataggtcgctggagctggagatcctgtgctcggtcaacatcctgcagttcatcttcatcgccctaaagctggacaggattattcactggccgtggctggtggtgtttgtgcccctgtggatcctcatgtcgttcctttgcctggtcgtcctctattacatcgtctggtccctcctgttcctgcggtccctggatgtggttgccgagcagcggagaacacacgtgaccatggctatcagttggataacgattgtcgtgcctctgctcacttttgagggcctgctggttccagaatggatgggcccaaaacattctcctacgctcct

SEQ ID NO: 62421 - DNA, 465 bp, Homo sapiens
cggtgccccacgggcttgagccggggtgaatctggaggggccgggccgagcccgggggcgctttcgcacgcgaagcaaccgctagagcaggacctggtctcccgagaggtgagccggagaggcaggcctggagccacgcggaccccgggcagtagcccgagcgggactacttgttgatatttgaggagggaagtgtcttacctgagagcctggctggagaagactgaggtccaaggcttgaagcctaagtgattgccccaggactgtggatgatggctgcagacatcccgagagtgaccactccgctgagctccttggtccaggtgcctcaagaggaagatagacaggaggaggaggtcaccaccatgatcctggaggatgactcctgggtgcaagaagctgtgctgcaggaggatggccctgagtctgagccctttccccagagtgctggcaagggcggccccc

SEQ ID NO: 62422 - DNA, 559 bp, Homo sapiens
ggaaccaaacagcgagcttcccgccttgtccaaagacgacaagatgatattaaagatgaatcttcggagttttcaagccattcaagtcagtccatcttgaagacaaagctctgatggcaccaaatcttgactcctttggacgcgatcgggcactgtatcaagagcatgcaaaacgtcgcattgcagagcgggaggccaggaggactcgtcgtagacaagccagagaacaaaccggtaagatggcagatcaccttgaaggcctttccagtgatgatgaagaaacttctacagatattactaatttcaatctggaaaaagatcgaatttcaaaagaatccggcaaagtttttgaagatgtccttgaaagtttctattcaattgactgtattaaatcacagtttgaagcatggcgttcaaaatactacacatcctacaaagatgcttacattggcctttgtttgccaaaattattcaaccccctcatacgacttcagctcctcacttggactcctcttgaggcaaaatgtcgtgactttgagaatatgctgtggtttgaatc

SEQ ID NO: 62423 - DNA, 633 bp, Homo sapiens
tgccgaacagccaggctgcccaattgcaactgtagaccaatgaactaatccatcgcccgcagcccgactctcagcagcggttcgtcccggtgcccacccccgcgaagcggagcgcccgggcacctagcctccctgccggccacctagcctccctgccggccacgatgccgaacgtgctgctgccgcccaaggagagcaacctcttcaaacgcatcttgaaatgttatgaacagaagcagtacaaaaatggcctcaagttttgcaagatgattctgtcgaacccaaaatttgctgaacatggagagactttggctatgaaaggattaacactgaactgtttaggaaaaaaagaagaagcttatgagtttgttcgtaaaggacttcgtaatgatgtcaagagtcatgtctgttggcatgtatatggactcttgcagcgttctgataaaaaatatgatgaagctataaaatgttaccgaaatgccctcaaattagataaagataacctgcaaattttgagggatctctcactgttgcagatccaaatgagagaccttgaaggttaccgagagacaagataccagcttcttcagttgcgccccacacagcgtgcctcctggattggatatgctattg

SEQ ID NO: 62424 - DNA, 545 bp, Homo sapiens
tttcgttgtctgggagggagggaagatggcagccgtggcggcaggcggcctggtgggaaaggggcgcgacatcagcctagcggccctgcagcgccacgacccctatatcaaccgcatcgtggacgtggccagccaggtggctctgtacaccttcggccatcgggccaacgagtgggagaaaactgatgtggaaggaaccttatttgtttatacaaggtctgcttctccaaagcatggattcaccattatgaataggctgagcatggaaaataggacagaacctattactaaagacttggatttccaactccaggaccctttccttctctacagaaatgccagatgtgagtctttcttactacagtgggttgttttacttctgaagtttggccaagtgtttaaaattgtacagtgtttgccattgtgtttgcatttggtatcagtggctatggggggtgtcagcattttaacaaatgttaatgtttaggaaatgcatgccctaatgatggaatagattcttccttggaagagtttaagtgaatata

SEQ ID NO: 62425 - DNA, 1211 bp, Homo sapiens
cccacgcgtccggctgctgcacgctggaaccatgtgtgggtcggcaccgagactgggatcttgaaaggggtaaatcttcagcgaaaacaggcggcgaacttcacggccggaggacagccgcggcgcgaggaggcagtgagcgccctgtgttggggcaccggcggcgagacccagatgctggtgggctgcgcggacaggacggtgaagcacttcagcaccgaggatggcatattccagggtcagagacactgcccgggcggggagggcatgttccgtggcctcgcccaggccgacggcaccctcatcacatgtgtggattctgggattctcagagtctggcatgacaaggacaaggacacatcctctgacccactcctggaactgagagtgggccctggggtgtgtaggatgcgccaagacccagcacacccccatgtggttgccacaggtgggaaagagaatgctttgaagatatgggacctgcagggctctgaggaacctgtgttcagggccaagaacgtgcggaatgactggctggacttgcgggttcccatctgggaccaggacatacagtttctcccaggatcacagaagcttgtcacctgcacagggtaccaccaggtccgtgtttatgatccagcatccccccagcgccggccagtcctagagaccacctatggagagtacccactaacagccatgaccctcactccgggaggcaactcagtgattgtgggaaacactcatgggcagctggcagaaattgaccttcggcaagggcgtctactgggctgtctgaaggggctggcaggcagtgtgcgtgggttgcagtgccacccttcaaagcctctactagcctcctgtggcttggacagagtcttgaggatacacaggatccagaatccacggggtctggagcataaggtttatctcaagtctcaattgaactgcctcctcttgtcaggcagggacaactgggaggatgagccccaagagcctcaagaacccaacaaggtgcccctagaagacacagagacagatgaactttgggcatccttggaggcagctgccaagcggaagctctcgggtttggagcagccccaaggagctctccaaacgagacggagaaagaagaagcggcctgggtccaccagcccctgacgcccctgtgcccactttgtaaataaactgctgaacacccaaaaaaaaaa

SEQ ID NO: 62426 - DNA, 487 bp, Homo sapiens
gattttcggtcgacctacgcgtccgcagccctgtatcaccactcttaaaaggctcccacagcctctcctagcaccagttgttgaccagcctgccacttgcctccctgcctgcttctggctgccttgaatgcctggtccttcaagctccttctgggtctgacaaagcagggaccatgtctacctttggctaccgaagaggactcagtaaatacgaatccatcgacgaggatgaactcctcgcctccctgtcagccgaggagctgaaggagctagagagagagttggaagacattgaacctgaccgcaaccttcccgtggggctaaggcaaaagagcctgacagagaaaacccccacagggacattcagcagagaggcactgatggcctattgggaaaaggagtcccaaaaactcttggagaaggagaggctgggggaatgtggaaaggttgcagaaaacaaaggaagagaacggaggaggaacgaaat

SEQ ID NO: 62427 - DNA, 516 bp, Homo sapiens
accacgcgtccgctggaagcctagaaatgagaccattgatatttatggatgtggccatagaattctctctggaagagtggcaatgcctgaacacagcacagcagaatttatatagaaatgtgatgttagaaaactacagaaacctggtcttcctaggtattgctgtctctaagccagatttaatcacctgtctagagaaagaaaaatatccctggaatatgaagagacacaagatggtagatgaatccccagttatctgttctcattttgccaaagacctctgcccggaacaagacagaaaatgttatttccctgaagtgatactgaggagatatgataaatgtgaacatgagaacttacaattaagaaaagtctgtaaaagtgtagatgagtgcaaggtgcacaaacaaggttataatggacttaaccaacatttgacaactacccagagcaaacttcatcaatgtaatgaagatgggaaagtctttcataaattttcaaatttaaatacacaca

SEQ ID NO: 62428 - DNA, 1008 bp, Homo sapiens
gcatctggaccggaactcccgggtcgacgatttcgtgatcgagctccctggctgccggctcgccttctgcgtggagttctcgcggtctgggtttcgctgtctgctcttggcccggggtcattttgtcggcgtcgggtgccctctcttgcccagctggggcacagcgaggcggccccttctcccgacgacgttcgatggagtagggtcccagaccgttgtcccgaagagcgagatcgagcttggccccctcccccccctccttccctccctccttccttccgccgcaacatggctaacaacagccccgcgctgacaggcaactcgcagccgcagcaccaggcggctgcagctgcggctcagcaacagcagcagtgcggcggcggcggcgctaccaagccggcggtctccggcaagcagggcaatgtgctcccgctctggggcaacgagaagaccatgaacctcaaccccatgatcctgaccaacatcctgtcgtcgccttacttcaaagtacagctctacgagctcaagacctaccacgaggtggtggacgagatctactttaaggtcacgcacgttgaaccatgggagaaaggaagcaggaaaacagcgggccagacagggatgtgcggaggggttcgaggtgttggaacaggaggaattgtttctacagcattttgcctgttatacaaattatttaccctgaagttaactcgaaagcaagtgatgggtcttataacacacacagactctccatatattagagcgcttggatttatgtatataagatatacacagccccctacagatctgtgggactggtttgaatccttccttgatgatgaagaggacctagatgtgaaggctggtggaggctgtgtaatgaccattggagaaatgctacgatcttttctcacaaaactggagtggttttctaccttgtttccaagaattccagttccagttcaaaagaatattgatcaacagattaaaacccgacctagaaaaatc

SEQ ID NO: 62429 - DNA, 427 bp, Homo sapiens
gccccttcccttgacagaacctgggatgagatcctcgtttcagaaaatgatttgatcctcctgaaggcgctccctgctaaggatctaaactcaggagacgaggtttcaccgtgctggccaagctggtctccacctcaggtgatctgccccgctaagcctccgcaagtgctgggattacaggtgcggagctgtacttcaacgtggaccatggctacctggagggcctggttcgaggatgcaaggccagcctcctgacccagcaagactatatcaacctggtccagtgtgagaccctagaagacctgaaaattcatctccagactactgattatggtaactttttggctaatcacacaaatcctcttactgtttccaaaattgacactgagatgaggaaaagactatgtggagaatttgagtatttccg

SEQ ID NO: 62430 - DNA, 830 bp, Homo sapiens
acccacgcgtacgcggacgcgtgggttgggtcctgccgcacagagcggcctgtctttatcagaggtccctctgccagggggagggccccagagaaaaccagaaagagggtgagagactgaggaagataaagcgtcccagggcctcctacaccagcgcctgagcaggaagcgggaggggccatgactacgaggccctgggaggtcactttagggagggctgtcctaaaaccagaagcttggagcagaaagtgaaaccctggtgctccagacaaagatcttagtcgggactagccggccaaggatgaagcctcacttcagaaacacagtggagcgaatgtatcgagacacattctcctacaacttttataatagacccatcctttctcgtcggaataccgtctggctgtgctacgaagtgaaaacaaagggtccctcaaggccccctttggacgcaaagatctttcgaggccaggtgtattccgaacttaagtaccacccagagatgagattcttccactggttcagcaagtggaggaagctgcatcgtgaccaggagtatgaggtcacctggtacatatcctggagcccctgcacaaagtgtacaagggatatggccacgttcctggccgaggacccgaaggttaccctgaccatctttgttgcccgcctctactacttctgggacccagattaccaggaggcgcttcgcagcctgtgtcagaaaagagacggtccgcgtgccaccatgaagatcatgaattatgacgaatttcagcactgttggagcaagttcgtgtacagccaaagagagctatttgagccttggaaaa

SEQ ID NO: 62431 - DNA, 813 bp, Homo sapiens
tacggctgcgagaagacgacagaagggacttcgcaacagaaagttaaggaaggaaatggaaaaacagtgcctggagagacaggtcttccaggttccatgaaagatacatgtaaaattgtacttgcaacaccaagacttcatataacaatacctcggaggtcaaaaagaaatatttcaaagctttctcctccaagaatatttcaaactgttacaaatggacttaaaaaaaatcaggtagttcagctacaggaatggatgattaaaagcatcaataataatactgctatatgtgtagaaggaaaattgatagacgtcactaacatatattggcacagtaatgtaattatagagcggattgagcacaacaaacttaggactatatcaggcaacgtttatatattaaaaggcatgatagaccaaatttccatgaaagaagcaggatatccaaattatctcataaggaaatttatgtttggatttccagaaaattggaaagagcacattgataattttctggaacaattaagggctggtgaaaagaacagggaaaagaccaaacaaaaacagaaaactggaagatctgtccgtgacataaggaaatcaatgaaaaatgatgcacgagaaaaccaaacagatactgctcaaagagccaccaccacttacgattttgattgtgataatttggaactgaagagtaataagcacagtgagtcaccaggagctacagaattaaacatgtgccacagtaattgccaaaataaaccaacattaaggttcccagatgaccaagtaaataatactattcaaaatgga

SEQ ID NO: 62432 - DNA, 1743 bp, Homo sapiens
ctcgaaacggcttcgtgaggagaatttgagttaaaattataagatttatttattattgatcaaattaaattcattatggacagtctcaataaggagccctttaggaagaactataatttaatcacgtttgattccttggagccaatgcaactattacaagttctcagtgatgttctggctgagattgacccaaagcaacttgtggatatcagagaggagatgccagagcagacagccaaacgaatgttgagccttcttggtattcttaagtacaaaccttcaggaaatgccacagatatgagtacttttcgtcagggtttggtgattggaagtaaacctgtaatttacccagtgctccactggcttcttcagaggactaatgaactgaagaaaagagcatatttagctcgttttttaataaaacttgaggtaccaagtgagtttcttcaggatgaaactgtggctgacaccaataaacagtatgaagagttaatggaagcctttaaaactttgcataaagaatatgagcagctcaagatatctggattttctacagcagaaataagaaaggatatcagtgcaatggaagaagaaaaggatcagctcattaagagagttgaacatttgaagaaaagggttgagacagctcagaatcatcaatggatgcttaaaatagcaaggcaacttcgagttgaaaaagagagagaagaatatcttgcacaacagaaacaggaacaaaagaatcagctatttcatgcagtgcaaagattgcaaagagtacaaaaccagctgaaaagcatgcgccaagctgcagcagatgcaaagcctgaaagtttaatgaagaggctagaggaggagataaaatttaatttatatatgggaactgaaaaatttcctaaagaattagaaaataagaaaaaggaattacattttttacaaaaagtagtttcagagccagctatgggccattctgatcttcttgaacttgaatctaaaataaatgaaataaacacagaaattaaccagttgattgaaaagaaaatgatgagaaatgagcccattgaaggcaaactctcactgtataggcaacaggcatctatcatttcccgtaaaaaagaagccaaagctgaggaacttcaggaggccaaggagaagttagccagcctagagagagaagcatcagtaaagagaaatcagacccgtgaatttgatggtactgaagttttaaagggagatgagttcaaacgatatgtcaataaacttcgaagcaagagtacagttttcaaaaagaagcatcagataatagctgaacttaaagctgaattcggtcttttgcagaggactgaagaacttcttaagcaacgtcatgaaaatattcaacaacaactgcaaactatggaggagaaaaagggtatatctggatatagttacacccaagaagagctagaaagagtatctgcactgaagagtgaagttgatgaaatgaaaggacgaacattggatgatatgtctgaaatggtgaaaaaactgtattcattggtatctgaaaagaagtcagctcttgcctcagttataaaagagctacgacagttgcgtcaaaaatatcaagaactgacccaggagtgtgatgaaaagaaatcccagtatgatagctgtgcagcaggcctcgaaagcaatcggtccaaattagaacaggaagttagaagactccgtgaagaatgtcttcaagaagaaagtagatac

SEQ ID NO: 62433 - DNA, 2609 bp, Homo sapiens
gcgcccacgcgttcgcgcaggaaacatggcgtcggcgggtgttgtgagcgggaagattatatatgaacaagaaggagtatatattcactcatcttgtggaaagaccaatgaccaagacggcttgatttcaggaatattacgtgttttagaaaaggatgccgaagtaatagtggactggagaccattggatgatgcattagattcctctagtattctctatgctagaaaggactccagttcagttgtagaatggactcaggccccaaaagaaagaggtcatcgaggatcagaacatctgaacagttacgaagcagaatgggacatggttaatacagtttcatttaaaaggaaaccacataccaatggagatgctccaagtcatagaaatgggaaaagcaaatggtcattcctgttcagtttgacagacctgaaatcaatcaagcaaaacaaagagggtatgggctggtcctatttggtattctgtctaaaggatgacgtcgttctccctgctctacactttcatcaaggagatagcaaactactgattgaatctcttgaaaaatatgtggtattgtgtgaatctccacaggataaaagaacacttcttgtgaattgtcagaataagagtctttcacagtcttttgaaaatcttcttgatgagccagcatatggtttaatacaaaaaattaaaaaggacccttatacggcaactatgataggattttccaaagtcacaaactacatttttgacagtttgagaggcagcgatccctctacacatcaacgaccaccttcagaaatggcagattttcttagtgatgctattccaggtctaaagataaatcaacaagaagaaccaggatttgaagtcatcacaagaattgatttgggggaacgccctgttgttcaaaggagagaaccggtatcactggaagaatggactaagaacattgattctgaaggaagaattttaaatgtagataatatgaagcagatgatatttagagggggacttagtcatgcattgagaaagcaagcatggaaatttcttctgggttattttccctgggacagtaccaaggaggaaagaacccaattacaaaagcaaaaaactgatgaatacttcagaatgaaactgcagtggaaatccatcagccaggaacaagagaaaagaaattcgaggttaagagattatagaagtcttatcgaaaaagatgttaacagaacagatcgaacaaacaagttttatgaaggccaagataatccagggttgattttacttcatgacattttgatgacctactgtatgtatgattttgatttaggatatgttcagggaatgagtgatttactttcccctcttttatatgtgatggaaaatgaagtggatgccttttggtgctttgcctcttacatggaccaaatgcatcagaattttgaagaacaaatgcaaggcatgaagacccagctaattcagctgagtaccttacttcgattgttagacagtggattttgcagttacttagaatctcaggactctggatacctttatttttgcttcaggtggcttttaatcagattcaaaagggaatttagttttctagatattcttcgattatgggaggtaatgtggaccgaactaccatgtacaaatttccatcttcttctctgttgtgctattctggaatcagaaaagcagcaaataatggaaaagcattatggcttcaatgaaatacttaagcatatcaatgaattgtccatgaaaattgatgtggaagatatactctgcaaggcagaagcaatttctctacagatggtaaaatgcaaggaattgccacaagcagtctgtgagatccttgggcttcaaggcagtgaagttacaacaccagattcagacgttggtgaagacgaaaatgttgtcatgactccttgtcctacatctgcatttcaaagtaatgccttgcctacactctctgccagtggagccagaaatgacagcccaacacagataccagtgtcctcagatgtctgcagattaacacctgcatgatcactgttcttgcttttttgggaagagacactttgttgcaaccctttttcaagtacttgaaagttgaaaatttgaaatcttggtattgatcatgctttaaggtttatgtaaagaaagtgtactgatgttcttacattaaagctttacaaagatttaaactaattatttttgtagttacttctaccaaatagcctttccttttcgataacattcctcagtatttttatagccaagtacattttattttcttgctgatgaactggaattggataaatattgcaagtggatgagttggaaattatgcactttgaaaaacattcactttgtttaagcttattgggtttcagatttgattaaattaaatgtggaggctttctatagcattctaagctgagaagtagattgttacccagtaatgaaataaaaaataaaaataaaaggatttttttctctattgtttacgacagtactcagcttaaatatttatgctggtcaaatgtgatttaaattggacattttcatcaatgcagtctaatgtgtagataaatatttcaaccat

SEQ ID NO: 62434 - DNA, 531 bp, Homo sapiens
cgcggggtggcaatgatagccttgtaaaacgcttacaccaagcttggcacgaggccggaagaaggtccgggggctggagtcctgggacctagctcgggaccggcctggagatggagttcgactgcgagggcctgagacggctgcttggcaagtacaagttcagggacctaactgtggaagaactaaggaatgtaaatgtatttttcccacatttcaaatattccatggacacctatgtttttaaagatagttctcagaaagacctgctgaattttactggcacaattcctgtgatgtatcagggtaatacatataacataccaattcgtttctggattttggattctcaccctttcgctccccctatttgcttcttgaagccaactgcaaatatgggaatcttagtcggaaaacatgtggatgctcaaggcagaatatatttgccctatctccaaaactggagccatcctaaatctgtcattgttggattaattaaagaaatgattgccaagtttcaagaggaacttcctt

SEQ ID NO: 62435 - DNA, 622 bp, Homo sapiens
gtcctgatcgattcggcacgagcgacagccgcgggtgcgtggtcgtgcggcaagtgagcgatttggtgaacagacactcccttctgtagccatggattgttacagaacttcactaagcagttcctggatttaccccactgtgatcctctgcttatttggttttttctccatgatgagaccctcagaaccattccttatcccatatttatctggaccagataaaaacctgaccagtgcagagataacaaatgagatcttccccgtttggacatactcctacctggtgctgctgctgcctgtgtttgtcctcaccgattatgtccgctacaagccagtcatcatcttgcaaggtatcagtttcatcattacctggctgctgctgttgtttggccaaggagtgaagaccatgcaggttgtagagttcttctatgggatggtcaccgccgccgaggtggcctactacgcctacatatacagcgtggtcagccccgagcactaccagagagtgagcggctactgcaggagcgtcacgctggccgcctacacagcagggtcggtgctggctcaactcttggtatccctggcgaacatgtcgtacttttacctcaacgtcatatccttg

SEQ ID NO: 62436 - DNA, 1775 bp, Homo sapiens
ggagcaatagcagcagccgtggcggccacggggcgacggcgcggcggtcggtgaccgcggccggggctgcaggcggcggagcggctggcttgccaacacttggtgtcacatgtgagcctcccacatgtattcactctccattccagctctgtgattgaactctgctcttattgactagggggcagttgggcaggcatgcctcattcctggaattgacagtcattcctaataagaagttggattccatgggttccaagagaagaagagctacctccccttccagcagtgtcagcggggactttgatgatgggcaccattctgtgtcaacaccaggcccaagcaggaaaaggaggagactttccaatcttccaactgtagatcctattgccgtgtgccatgaactctataataccatccgagactataaggatgaacagggcagacttctctgtgagctcttcattagggcaccaaagcgaagaaatcaaccagactattatgaagtggtttctcagcccattgacttgatgaaaatccaacagaaactaaaaatggaagagtatgatgatgttaatttgctgactgctgacttccagcttctttttaacaatgcaaagtcctattataagccagattctcctgaatataaagccgcttgcaaactctgggatttgtaccttcgaacaagaaatgagtttgttcagaaaggagaagcagatgacgaagatgatgatgaagatgggcaagacaatcagggcacagtgactgaaggatcttctccagcttacttgaaggagatcctggagcagcttcttgaagccatagttgtagctacaaatccatcaggacgtctcattagcgaactttttcagaaactgccttctaaagtgcaatatccagattattatgcaataattaaggagcctatagatctcaagaccattgcccagaggatacagaatggaagctacaaaagtattcatgcaatggccaaagatatagatctcctcgcaaaaaatgccaaaacttataatgagcctggctctcaagtattcaaggatgcaaattcaattaaaaaaatattttatatgaaaaaggctgaaattgaacatcatgaaatggctaagtcaagtcttcgaatgaggactccatccaacttggctgcagccagactgacaggtccttcacacagtaaaggcagccttggtgaagagagaaatcccactagcaagtattaccgtaataaaagagcagtacaaggaggtcgtttatcagcaattacaatggcacttcaatatggctcagaaagtgaagaagatgctgctttagctgctgcacgctatgaagagggagagtcagaagcagaaagcatcacttcctttatggatgtttcaaatcctttttatcagctttatgacacagttaggagttgtcggaataaccaagggcagctaatagctgaacctttttaccatttgccttcaaagaaaaaataccctgattattaccagcaaattaaaatgcccatatcactacaacagatccgaacaaaactgaagaatcaagaatatgaaactttagatcatttggagtgtgatctgaatttaatgtttgaaaatgccaaacgctataatgtgcccaattcagccatctacaagcgagttctaaaattgcagcaagttatgcaggcaaagaagaaagagcttgccaggagagacgatatcgaggacggagacagcatgatctcttcagccacctctgatactggttgtgcc

SEQ ID NO: 62437 - DNA, 1160 bp, Homo sapiens
cggccgctgcagcgggaggagccccccaggaggaggactgtgatccatgtgtccttcctggtgactaggatgtcgtcggaggaggacatagagcgtggagcagccgcagccgccgccaccaccccccgaggagcctggagccccggccccgagccccccagccgcagacaaaagacctcggggccggtctcgcaaagatgggcgcttcccctttccagagagccagaaagaaaccttcgaagtagggggaaaactgcagtggaagatgaggacagcatggatgggctggagacaacagaaacagaaacgattgtggaaacagaaatcaaagaacaatctgcagaagaggatgctgaagcagaagtggataacagcaaacagctaattccaactcttcagcgatctgtgtctgaggaatcggcaaactccctggtctctgttggtgtagaagccaaaatcagtgaacagctctgcgctttttgttactgtggggaaaaaagttccttaggacaaggagacttaaaacaattcagaataacgcctggatttatcttgccatggagaaaccaaccttctaacaagaaggacattgatgacaacagcaatggaacctatgagaaaatgcaaaactcagcaccacgaaaacaaagaggacagagaaaagaacgatctcctcagcagaatatagtatcttgtgtaagtgtaagcacccagacagcttcagatgatcaagctggtaaactgtgggatgaactcagtctggttgggcttccagatgccattgatatccaagccttatttgattctacaggcacttgttgggctcatcaccgttgtgtggagtggtcactaggagtatgccagatggaagaaccattgttagtgaacgtggacaaagctgttgtctcagggagcacagaacgatgtgcattttgtaagcaccttggagccactatcaaatgctgtgaagagaaatgtacccagatgtatcattatccttgtgctgcaggagccggcacctttcaggatttcagtcacatcttcctgctttgtccagaacacattgaccaagctctctggggctccatggtcggctgctccccggcctccggccgaacgcccggactcctaacgcctctcagccaggtccgcgtcgctac

SEQ ID NO: 62438 - DNA, 576 bp, Homo sapiens
ggtggacttctaactttttctgcacaggaatttggaagactttgttatggcaggtgccgtactcttactttacaaacaaacattaggggcagcccaggcagcacacctttctggatttaccaaaaatacacattttcctattctactgttgctttaccacatggttcagttgtagcctcagaattactttatggaagaaactgagtgtagacagagagtatgaggtctgatggtcatggaataattgttttgagtccacagcatcatggaaacctcttgggaatagagtataggcttcccagtgatgttagtcttatccatcctcctctatacatgtgagatgtttcaggactcagtggcctttgaggatgtggctgtgaacttcacccatgaggagtgggctttgctgggtccatcacagaagaatctctacagagatgtgatgcgagaaaccattaggaacctgaactgtataggaatgaaatgggaaaaccagaacattgatgatcagcaccaaaatctcaggagaaatccaaggtaaggtgtgatgtggtagacagatttggtaaaagtaaa

SEQ ID NO: 62439 - DNA, 1220 bp, Homo sapiens
ggacccaagagatagcatctagggattcaggggtcccagggttagaagctgatacaacagggatccaggtgaaagaggttgggggttcagaggttccagagatagcgactgggacagcagaaactgagatattggggacccaagagatagcatctaggagttcaggggtcccagggctagaatctgaggtagctggggcccaggagacagaggtcgggggttcagggatctcagggcccgaggctggaatggcagaggcccgagtactgatgacccgtaagacagaaattatagttccagaggctgagaaggaagaggctcagacttcgggggtccaggaagcagagactagagttgggagtgctctcaaatatgaggctttaagggccccagtcactcagccaagagttttaggatcccaggaagcaaaagcagagatttcaggagtacaagggtcagagactcaagttctgagagtccaggaggcagaggctggggtttgggggatgtcagagggcaaatctggggcttggggggcccaggaagcagagatgaaggttttagagtctccagagaacaaatctggtacttttaaggcccaggaagcagaggctggggtcttgggaaatgagaaggggaaagaagctgagggaagcctcacagaggccagcctgcctgaagcacaggtggccagtggggcaggggctggggcgcccagggcctcttccccagagaaggctgaagaggacaggaggctgccgggcagccaggcaccacctgccctggtcagctccagccagtccctgctggagtggtgccaggaagtcaccactggctaccgtggcgtccgcatcaccaacttcaccacatcctggcgcaacggcttggccttctgtgccatcctgcaccgattctacccagacaagattgactatgccccgctagacccactcaacatcaagcagaacaacaagcaggccttcgatggcttcgcggctctgggcgtgtcgcggctgctggagcccgcggacatggtgctactgtcggtgcccgacaagctcatcgtcatgacgtacctgtgccagatccgcgccttctgcaccgggcaggagctgcagctggtacaactggagggcggcggcggcgccggcacgtaccgcgtgggcagcgcccagcccagcccgcccttccccgtatagggcagggcggatccccgaccc

SEQ ID NO: 62440 - DNA, 1573 bp, Homo sapiens
gaattcccgggtcgacgatttcgtcgcctgccccggagagccaggcgctaaccagccgctctgcgccccgcgccctgcttgcccccattatccagccttgccccggcgccctgacctgacgccctggcctgacgccctgcttcgtcgcctcctttctctcccaggtgctggaccagggactgagcgtcccccggagagggtccggtgtgaccccgacaagaagcagaaatggggaagaaactggatctttccaagctcactgatgaagaggcccagcatgtcttggaagttgttcaacgagattttgacctccgaaggaaagaagaggaacggctagaggcgttgaagggcaagattaagaaggaaagctccaagagggagctgctttccgacactgcccatctgaacgagacccactgcgcccgctgcctgcagccctaccagctgcttgtgaatagcaaaaggcagtgcctggaatgtggcctcttcacctgcaaaagctgtggccgcgtccacccggaggagcagggctggatctgtgacccctgccatctggccagagtcgtgaagatcggctcactggagtggtactatgagcatgtgaaagcccgcttcaagaggttcggaagtgccaaggtcatccggtccctccacgggcggctgcagggtggagctgggcctgaactgatatctgaagagagaagtggagacagcgaccagacagatgaggatggagaacctggctcagaggcccaggcccaggcccagccctttggcagcaaaaaaaagcgcctcctctccgtccacgacttcgacttcgagggagactcagatgactccactcagcctcaaggtcactccctgcacctgtcctcagtccctgaggccagggacagcccacagtccctcacagatgagtcctgctcagagaaggcagcccctcacaaggctgagggcctggaggaggctgatactggggcctctgggtgccactcccatccggaagagcagccgaccagcatctcaccttccagacacggcgccctggctgagctctgcccgcctggaggctcccacaggatggccctggggactgctgctgcactcgggtcgaatgtcatcaggaatgagcagctgcccctgcagtacttggccgatgtggacacctctgatgaggaaagcatccgggctcacgtgatggcctcccaccattccaagcggagaggccgggcgtcttctgagagtcagggtctaggtgctggagtgcgcacggaggccgatgtaaaggaggaggccctgaggaggaagctggaggagctgaccagcaacgtcagtgaccaggagacctcgtccgaggaggaggaagccaaggacgaaaaggcagagcccaacagggacaaatcagttgggcctcttcccccaggcggacccggaggtaagactatcccccagaggtctcagcaggaccctgcagaggtaggggcagggatggacagtcccagctggcagccaccctccccagggaggcagcacccacaggagcacaccaagggcccttgatggggtctgcagg

SEQ ID NO: 62441 - DNA, 590 bp, Homo sapiens
ctgaggcaccgccgcttcgctgacagccggccaccagatgttcatgcattctagagaaagtggaaaacttagaagcctaattaatgactgtcttctggacctctgagaccatgtttctagtgttttccgtggaatattatcaggaaatctaaactcagcagaatcagcttggacaggtgcagattcattgaagtgaagaaatacactgtggtgaaatgcttccacctcttgctaaaatgaacactgagaaaaaatgaagaagactgacaagcaccagcgaaaagttgcagaatagaaatagccacactcctctggagtctttaattcatccacagccatcatataaaggttttggcatcatgtttgggaagaaaaagaaaaagattgaaatatctggcccgtccaactttgaacacagggttcatactgggtttgatccacaagagcagaagtttaccggccttccccagcagtggcacagcctgttagcagatacggccaacaggccaaagcctatggtggacccttcatgcatcacacccatccagctggctcctatgaagacaatcgttagaggaaacaaaccctgc

SEQ ID NO: 62442 - DNA, 477 bp, Homo sapiens
atggttgtcccgggtcgacgatttcgtcgggaccgggagcagcggctctggcggtcgtggcggtcggagatccgagagctctgcttctctgaaaagcgtgtggctttctggacttggccacccacgagccagcgggaaaggattgccagccagagaaagacgaactccgaagtcccaatgcacagatcagcccccagtcaaaccaccaagaggagccgatcgccattttccactactcgtcgtagttgggacgacagtgagagttcgggaaccaacctgaatattgataatgaggactattccaggtatccgccaagagagtacagagcttcgggtagcagaagaggaatggcctatggacatattgactcttatggggcagatgatagtgaggaggagggggctggtcctgttgagcgaccgccagtgagagggaaaactggcaagtttaaagatgataagctgtatgacccagag

SEQ ID NO: 62443 - DNA, 867 bp, Homo sapiens
tttcgtaactacattcagtcaatgggcatgaaaatgaattttagctgctttgtgcaaaaaccctaggtgtgcggacgaaagagagccaggcagaaggttacaacaggtcaggaataaataaccaccaggcggaggatccaagattctgtccttccttttgttggatgaggagcgccaggcaaacgcgtccacaaaggcttcggaaggaagcggctcgcccgcccacacccggctcctgccccggtggtacaggcatggatgggaagaaatgcagcgtatggatgttcctacctcttgtatttactttgtttacttcagctggattgtggatagtatacttcatagctgtggaagatgacaaaattttaccattaaattcagctgaaaggaaacctggtgtgaagcatgcaccatatataagcattgcaggtgatgatcctcctgcaagctgtgtgtttagtcaagttatgaacatggcagccttcctagcccttgtggtagctgttctgcgcttcatacaactgaaaccgaaggttttaaacccgtggctgaatattagtggattggtggctctgtgtctggcttccttcggaatgaccttacttggtaattttcagctcacaaatgatgaagaaatccataacgtcggaacttccttgacctttggatttggcacattgacctgctggatccaggctgcgctgacactcaaggtcaacatcaagaatgaaggacggagagttggaattccacgggttattctgtcggcatctatcactctctgtgtgggtcctctacttcatcctcatggcccaaagcatccacatgtatgcagccagggtccagtggggcctggtcatgtgcttc

SEQ ID NO: 62444 - DNA, 655 bp, Homo sapiens
tttcgtggttgcctgtgtcgccgcctagtctccggtcttggtgctctcccgggggtgccccaaggagccagtgcgcgctgcgggctgggaaggaggcgccgctcagctagtcctcctcctcctcctcgtctttctcctcctcctgctgctgctgccgccgccgccgtgggtgccgggtccgcgcgcaccccaacacccccaccagctgggcctcggggcacatctccagacttcaatttggctgaaataattcatgccacggacctgtgcacatgcctggaattgagagacacagttaaaagactccaagttgctttctgccttttgaaaactcctgaaaaccatccctctggactctggaattctacacagctcaaccaagactttgcttgaatgtttacattttctgctcgctgtcctacatatcacaatatagtgttcacgttttgttaaaactttggggtgtcaggagttgagcttgctcagcaagccagcatggttaggatgagctttgttatagcagcttgccaattggtgctgggcctactaatgacttcattaaccgagtcttccatacagaatagtgagtgtccacaactttgcgtatgtgaaattcgtccctggtttaccccacagtcaacttacagagaagccc

SEQ ID NO: 62445 - DNA, 507 bp, Homo sapiens
tttcgtgcgcagcatgcactggggggttggctttgcttcgtccaggccgtgcgtggtggatctgagctggaaccagagcatctccttcttcggctggtgggccgggtccgaggagcccttctccttttatggggacatcatcgctttccctttgcaggattacggtgggatcatggcagggctgggctccgatccctggtggaagaaaaccctttacttgaccgggggagctttgctggccgcagctgcgtatctgctccacgaactcctggtcattaggaaacagcaagagattgactctaaagatgctattattttgcatcagtttgcaagacctaacaatggtgttccaagtttatctcctttctgtttaaagatggaaacttatttaaggatggctgacttaccgtatcagaactattttggtggaaaactctctgctcaagggaaaatgccttggattgaatataatcatgaaaaagtttctggcacagaattcataattga

SEQ ID NO: 62446 - DNA, 709 bp, Homo sapiens
gtccggcattcccgggtcgacgatttcgtcgtccgggttctgaggcatagtggccgagggctcgaggtgccacggcgtccaggagcgaggacagggccaggcagggtgtcactcccgggtcggggagcaggcggggaggggcgatgacttttcaggtttgggggtggcggagggaagacgcatctcaggttttggcctgggtgcctgacgccgagggcgggagacggggaatgctgacgcgcaggagcctggctacaaaagaccccacagctgtagagagagcaaacttgttaaacatggctaaactgagtatcaaaggactcattgaatctgctctgagctttggccgcactttggattctgactatccccccttgcagcaattctttgttgttatggaacattgcctgaaacacggtcttaaagtaagaaaatcatttttgagttacaacaaaaccatctggggccctttggaactggtggagaagctgtaccccgaagcagaggaaataggagctagtgtccgggatctacctggtctgaagacccctctgggtcgagcaagagcgtggcttcgattagccctcatgcaaaaaaaaatggccgattacttacgttgcttaattattcagagggatctcttgagtgagttttatgagtatcacgcactaatgatggaagaagaaggagcagtaattgttgggctgct

SEQ ID NO: 62447 - DNA, 500 bp, Homo sapiens
  misc_feature (1)...(500): n = a,t,c or g
gtggcggaattcaagagccgaccttctgagccctcaagaaagatcagaacagattcatgggtgatttagcctatctgtcccaggccagcgtggctgagtgtgctggctggaggcctctctctctgcttcgagggtagctgagatccaccccggaaaccggcaggatgaagggggcaagtgaggagaagctggcatctgtgtccaacctggtcactgtgtttgagaatagcaggaccccagaagcagcacccagaggccacaggctagaggacgtgcatcaccgccctgagtgcaggcctcccgagtccccaggaccacgggagaagacgaatgtcggggaggccgtggggtctgagcccaggacagtcagcaggaggtacctgaactccctgaagaacaagctgtccagcgaagcctggaggaaatcttgccagcctgtgaccctctcaagatcggngacgcacgtgcctgagggctgaggtagaggtgtggggtgctgg

SEQ ID NO: 62448 - DNA, 1310 bp, Homo sapiens
ttttttttttttgtcttttgtctctctgtttttggtacatgatacatggcttccctcagtcagtctctgctctttctctcagtccgagataggccaggaaggagtgtttgggtgaggggatgctgggaggcgcagtctgaggtcggggagggtggaatgtgagatccaagtggttcttggggtataacattgtcaagggaatgagatgggcaaaatctgagttccggtacttgtcaaagcgcaaaggggagccgttgaaggccaaagccttgagtgccaggttgggctctgagctgctgccgtgggctgcccgacacggccacggtctgcagagcctgggaggcagacataactgacaggggagacaggagattccgggagctcccgaccaccaggagcggggcccccgggccggcccggttccttgggggctggacacaggcccttcttgtcctcctcggggcagtccccactctggtgcttcttgacgtggcggctgaagacgaaagggtgtgtggtcttgaacaggcactcttcgcagctgaaggtctggcgtggggcgtgcttcagcttcttgtgcaggttgagattgtccttgcgcttgcagctgtagctgcactggtcacagtggaagggccgctccccggtgtggacgcgcacgtgctcgatgagcttgttggcggtcttggacaggtagccgcactggtcgcacttgtagtggttgcccaggcggtgctcccgggtgtgcgtctccagctccagctggttggccttcaccgtctggcagatccggcacttgtactccatcttgtagtgggtcttgaggtggcactccatggcagcggggcggttggtggaataaatgcagaatgggcacctgccggggaaagcaacgcaagggaggttcagccgggaaggttcggaggcagccgcgcttctcgccgcctcaccagccttccctcacaccaccccccagtgtctgaggcctggcctgcccagcccagcccagccctgccgcctctcaggggtggaacggccctttttggctctccctgctgacagagcagtccccgctgacaagcagctctggcaaggtccgctcagcctattctgggtctcttggccgatacaggcaaggccagccctcaccaaggggagcagagaaagtgccaggaatcaatttgctggtgctcccctccagcccccgcccggcccctcggagccctccccactcccgaccagacagcgcagaggtctaaacctcctgacctcccctctagatgggagcaacacgaattccgccacgtgga

SEQ ID NO: 62449 - DNA, 418 bp, Homo sapiens
tgtggctcagcatggtcagtgccgtttaacctttattgtggtggagtccaccccgctgtgggcctcagataaccctgtacaaaggggaatggagattgcctgtatccacctagattcataagctgccctgaggcgatcttggcatcaagaaagacagcattgaggcacatctcaccatcagcttcagaggatgtcagcctttgatatgtcccatgggttttttcccagggaaccaatctgtccttttgaagaaaagacaaagataggaacgatggtagaggaccaccggtcaaattcttaccaggattcagtgacgtttgatgatgtggctgtggagttcaccccagaggagtgggctttactggacacaactcagaaatacctctacagagatgtgatgctggagaactacatgaag

SEQ ID NO: 62450 - DNA, 425 bp, Homo sapiens
gaccgcgagcacaggccgctccgcgggcgcttcggatcctcgcgggaccccaccctctcccagcctgcccagcccgctgcagccgccagcgcgccccgtcggcagctctccatctgcacgtctctccgtgaaccccgtgagcggtgtgcagccaccatgttcagctggctgaagcggggcggggcacggggccagcagcccgaggccatccgcacggtgacctcggccctcaaggagctgtaccgcacgaagctgctgccgctggaggagcactaccgctttggggccttccactcgccggccctggaggacgcagacttcgacggcaagcccatggtgctggtggccggccagtacagcacgggcaagaccagcttcatccagtacctgctggagcaggaggtgcacggctcccgcgtggggcc

SEQ ID NO: 62451 - DNA, 837 bp, Homo sapiens
gagatgagtcccagggagtacggagtcagctctgagccgaggtcaccgcagaagggagctcggtcttcggccaggaccggagcagttggaacaaagggaatgtggaaatgaaagagagagggagagagaggctggcagatgtaatgagacgcggtgaaggtgtacgcagactggcactcccactcctcccttctgctctcactgcagccctgggtaactcgcaggctaacacaaacagcttttctcccgcagcctgccctctgtcactgtcactttcatgaattcaaaggcaatttaccagtgatttctgggtgctggggctgatattttttgtgcatatttaagaatgtcttccaagcaagccacctctccatttgcctgtgcagctgatggagaggatgcaatgacccaggatttaacctcaagggaaaaggaagagggcagtgatcaacatgtggcctcccatctgcctctgcaccccataatgcacaacaaacctcactctgaggagctaccaacacttgtcagtaccattcaacaagatgctgactgggacagcgttctgtcatctcagcaaagaatggaatcagagaataataagttatgttccctatattccttccgaaatacctctacctcaccacataagcctgacgaagggagtcgggaccgtgagataatgaccagtgttacttttggaaccccagagcgccgcaaagggagtcttgccgatgtggtggacacactgaaacagaagaagcttgaggaaatgactcggactgaacaagaggattcctcctgcatggaaaaactactttcaaaagattggaaggaaac

SEQ ID NO: 62452 - DNA, 942 bp, Homo sapiens
agaagcgtacaccgagtagcttgagcgcctcttccggttaccttttcccagtgccagaggcgcctagggttggggtcctcgctcaggcacagagacccgacaccgagcggcggcttccccgggatcgagggacgcgcacgccagaggagacgaaaggaacccgggtcggaccagatcggaaccactgaccattgcccatggcggccctaggccctagcagccagaatgtcactgaatacgtcgttcgagttcctaagaatacaaccaaaaaatataacatcatggcttttaatgcagccgacaaagtcaactttgctacgtggaatcaggctcggctggagcgggacttgagcaacaagaaaatctaccaagaggaggagatgcccgaatcgggcgcgggcagtgagttcaaccgcaagcttcgggaggaggctcggaggaagaagtacggcatcgtcctcaaggagttccggcccgaggaccagccctggctgctccgggtcaacggcaaatcaggcaggaagttcaagggcatcaagaagggaggcgtaacagagaacacgtcctactacatcttcacccagtgccccgacggggccttcgaggccttccccgtgcacaactggtacaatttcacaccgctggcccggcatcgcacgctcactgccgaggaggccgaggaggagtgggagaggaggaacaaggtgctgaaccacttcagcatcatgcagcagcggcggctcaaggatcaggaccaggacgaggatgaggaggagaaggagaaacgtggccgcaggaaggcgagcgagctgcgcatccacgacctggaggacgacctggagatgtcgtccgatgccagtgatgccagtggtgaggaggggggcagagtccccaaggccaagaagaaggcgccgctggccaagggcggcaggaaaaaaaaaa

SEQ ID NO: 62453 - DNA, 1013 bp, Homo sapiens
  misc_feature (1)...(1013): n = a,t,c or g
gatgtggcgggatttgaccgcttctttgtctctggctgccgttggaactccgggtctcgtcttcactgctctgtgtcctctgctcctagaggcccagcctctggtcctgtgacctgcaggtattgggaatccacagctaagacgccgggacaccctggaagcctagaaatggacaacctgaggtatggagtgtatcctgtcaagggggcaagtggataccctggggctgagaggaatcttctggagtactcttattttgaaaaggggccgttgacatttagggatgtggtcatagaattctctcaggaggagtggcaatgcctggacactgctcagcaagatttgtataggaaagtgatgttagagaacttcagaaacctggtgttcttgggtattgatgtctctaagccagatctgatcacctgtctggagcaaggaaaagatccctggaatatgaagagacacagtatggtagccacacccccagaaagtggggtattgaaatttcctactataattatattgctgtctaggtgtttcttccagtctgtcaatatttgctttatatatttggaacgttagtgtgacatacacacagacacacagacgtgcacacacacacacacacacacacaaaatttgtcataggttcccagttaataaatctattattgtttaatgtctttctttgtctctttgcagttttgacttaaagtactttatgtaagatatgacagtttttgacttaagatgtagcttttgtaatactattttgacctcttctgctctcatttgggttaatatttgcatgcaatgtctaaatctatcttgccaccttcagtatgtttttaatcattaggatgtcagctggacccttgtaggaaagggcaaattgggatcttggggttttttaantaattttaaaatnaaatttcttttattggaaagtatgtcctcttggattgggaaagttttctggaaaccaagggggacttaccaatttttttttgttg

SEQ ID NO: 62454 - DNA, 560 bp, Homo sapiens
cggcggcggcacgggtcttgggtcctccgagagcagcagcgattttctattttgtacatacattattttgtatatactgtatatgatgacttcagtgagcagtgaccattgtcgaggtgctcgggaaaaaccacagatttcagcagcacaatcaacgcaaccacagaaacaagtggtacaggcaacagctgaacagatgcgtctcgctcaagtgatctttgataagaatgattcagattttgaagctaaagttaagcagcttatggaagtgacagggaaaaatcaggatgaatgcatagtggccctacatgattgtaatggagatgtgaacaaagctatcaatatattgctggaagggaattcagacacaacttcatgggagactgtagggtgtaagaaaaagaattttgcaaaagaaaattcagaaaacaaagagaatagagagaagaaaagcgagaaagaatcgagtcgtggacgtggaaacaacaaccggaaaggaagaggcggcaatcgtggcagagaatttagaggtgaagaaaatggaattgattgcaatcaag

SEQ ID NO: 62455 - DNA, 1601 bp, Homo sapiens
gccggtccggaattcccgggtgtcctgccagggtagaatcggaaccgtaggaggggtacttaaccggacggcctaccaggcctgtggccgtgcgcgggaagagcactgcagatctcaggatgatggggcgcagccctgggtttgccatgcagcacatcgtgggtgtgccccacgtactggttcggaggggcctccttggaagggacctcttcatgaccaggactctctgcagcccaggcccaagccagcccggagagaaaagacctgaggaggtggccctggggctgcaccaccgcctcccagcactgggaagagccctggggcacagcattcagcaacgagcgacctccacagccaagacttggtgggacagatatgaagagtttgttggactcaacgaggttcgagaggcccagggaaaggtgacagaggctgagaaagtgttcatggtggctcgagggcttgtccgagaggctcgggaggacttggaagttcaccaggccaagctgaaggaggtgagggaccgcttggaccgtgtctccagggaggacagtcagtacttggaactggctactctcgagcacaggatgctgcaggaggagaagaggcttcgcacagcctatctgcgtgcagaagactctgagcgagagaagttctccctcttctctgcagctgtgcgggaaagtcatgagaaggagcgcacaagggctgagaggaccaagaactggtccctcattggctcagtcctgggggccctgattggtgtggctggctccacctatgtgaaccgtgtgcgactacaggagctgaaggctttactcctggaggcgcagaaggggcctgtgagtctccaagaggccattcgagaacaggcgtctagctactcccgccagcagagggacctccacaatctcatggtggacttgaggggcctggtacatgctgctgggccagggcaggactctgggtcacaggcaggtagtcccccgaccagagacagagatgtagatgtcctttcagctgccttgaaagagcagcttagtcattccaggcaagtccattcatgtctagaaggcttacgagagcagcttgatggcctagaaaagacttgtagccaaatggctggggtggttcagcttgtaaagtctgcagcacacccaggcctggtggaaccagcagacggggctatgcccagcttcttgctggagcaggggagcatgatcttggcactgtcagacacggagcagagactagaagcccaagtcaacaggaacaccatctatagcaccctggtcacctgtgtgacatttgtggccacactgcctgtgctctacatgctattcaaagccagctaacccctggcccctcctccagagggtctgaggcaatagctgtgaatgtggatttaagtagagaatcgtagcaatgaagcgagcctttgggggcatgtacaacctcaatctgaaggagcagtatctgtgtggctcaccagcaggcatgcttcgctttgtagacaaggttcatttacattaattatcaaaactttgtgctaatgtccaattaaaatatcctgagttttattatttaaaacaaaaaaaaaa

SEQ ID NO: 62456 - DNA, 597 bp, Homo sapiens
cgaaaacataattttcattccttggatggaacttcaaccagagcctttcatcctcaaactggattgcctcttctttcaagccctgttcctcaaagaaaaacacaatcaggttgctttgatctggattcttcattactacatctgaaaagcttctcatctagaagtcctcgaccatgtttaaacattgaagatgatccagatattcatgaaaaaccatttttgagttctagtgctccacctataacaagtcttagtctcctaggaaattttgaggaatctgtcttgaactatcgtttcgatcctctcggcattgttgatggttttactgccgaggtaggggcaagtggtgctttctgccccacacatttgactcttccagttgaagtgtcattctacagtgtttcagatgacaatgctccctctccttatatgggtgtgattactttagagtcccttggtaaaaggggttatcgagtacctccttcaggaacaatacaagtggtatgtgttttatagcctacaattgcaataatcattctctcacatacatatagaacttagccctttctcctgctactgctgctgcaacaactttgc

SEQ ID NO: 62457 - DNA, 756 bp, Homo sapiens
tttgaaaagtctgcccaggaaaagatcctttattctgacaaagagatgacaaccccagccaagcagattaagactgaaagtgaatatgaagagactttcaagccatcatcagttgtgagtacctcttccacttcttgcgtttcaaccagccagaggaaggaaacatcaactacaagatatagtgatcacagtgtcacttcctcaactctggcacaaattaatgctacttcttcaggaatgacagaagaatttcctcctcccccacctgacgtacttcaaacttcagtagatgtgacagcattttcccagtcccctgaactgcccagtcctcctagaagactaccagtccccaaagatgtatattccaagcaaagaaatttgtatgaattaaaccgtttatataaacacatccatcctgagttaagaaaaaacttagaaaaagattatatcagtgaagtttctgagattgtttctagtcaaatgaactcagggagttcagtctcagcagatgtgcaacaagcccggtatgtttttgaaaacacaaatgacagttctcaaaaagatctgaactcagaaagagaatacttggaatgggatgaaattctgaagggagaggtgcagtccattagatggatctttgagaatcaaccattggattccatcaacaatggctctcctgatgaaggtgatatttccaggggcattgctgatcaagaaatcattgctggtggcgatgtgaaatataccacatggatg

SEQ ID NO: 62458 - DNA, 558 bp, Homo sapiens
cccacgcgtccggtccggggaggaaatggatgctgtgctggcctgccggctccgggggcggggaaatcgagtagctgcactcaggccccgcccgagacccggagggagcgccgggccgtccccttttgccctcctttgcgctgggctgagcccagagccgagagcaggagtcggctctgagttccctgcttggtttttgggtggcagcagccagaggaggaatatggcgctcttaggcagccgagcggagctggaagcggacgaggacgttttcgaagatgccttggaaaccatctcaatatcttctcactcagatatggcaacaagcagccttcactttgcatcatgtgatacacaacaggcgcccagacagcgcggagcgtctactgtcagcagttcatcatcaaccaaggtggatctcaagagtggcctcgaagaatgtgctgtggcattgaacttatttctaagcaacaaatttacagacgccttagaattgcttcgcccctgggctaaggagagtatgtaccatgccttgggctacagtaccattgtggtgtt

SEQ ID NO: 62459 - DNA, 745 bp, Homo sapiens
agggcttggggctgggtctccgtgacagaggcctggcttttctgtcagggcagggcctagcccctgcccccataaaagaggagacatagggggcttggtgagataccctgaaacctcccccctctgaccccgcagccaggccccaggctggccgggagtggcccctcacactggttctccccactttctctgcctgtggcatcgaaggccccgggcaccatggcccaggccctgggggaggacctggtgcagcctcccgagctgcaggatgactccagctccttggggtccgactcagagctcagcgggcctggcccatatcgccaggccgaccgctatggattcattgggggcagctcagcagagccagggccgggccacccacctgcagacctcatccgccaacgggagatgaagtgggtggagatgacctcgcactgggagaaaaccatgtcccggcggtacaagaaggtaaagatgcagtgccggaaaggcatcccgtctgccctgcgcgcccgatgctggcccctgttgtgtggggcccatgtgtgccagaagaacagccctggcacctatcaggagctggcagaggcccctggagacccacagtggatggagaccattggcagggacctgcaccgtcaattccctctgcacgagatgtttgtgtcgcctcaaggccacgggcagcaggggctcctgcaggtgctcaaggcctacaccctgtatcgaccggagcaaggct

SEQ ID NO: 62460 - DNA, 425 bp, Homo sapiens
gaatgccggcgcgcatcatgggcctacaatttcttttcccgcccagagcctgcctgggaaagcccctgacccagagagttgggggaaaggcggcccaaaccacacgtgtgcgccgcaaggctgggcctgtctcagcccacttcccgtcgccacccccaacggcctgagctcccccggagcctcactcgggcctttcctcaggccctcctgtctgctccacgtggggcgccggggcctcgaaccgcccgtcccctccagccgagtttccccacccgccaggccaccgcggcgtcggggtcccatacctgatgctgttgtcgcccctgctggtaaggcttaattggcccctggtggcaacgccgcgtccggatcttgccgccaccgccccctccgactcctccggctcccgaggccatggcggagcc

SEQ ID NO: 62461 - DNA, 369 bp, Homo sapiens
caaacatggcgtgttcctagaagccgctttcggcatcagtaggcggcggcgtggggtctggcagcgtggggagagggaccaaccgacgccacttcgtgttgggaagtgggagcgggagggccgggcaattcccgaccgaaccaaacggtttccatggatctcaatagtgccagcactgttgttcttcaggtgttaacacaggccaccagtcaggatactgctgtgttaaaaccagctgaggagcagttgaagcagtgggagacacagccaggtttctattcagtgttgctgaatattttcaccaaccacactttggatataaatgtaaggtggcttgctgtactgtattttaaacatggaattgatcgt

SEQ ID NO: 62462 - DNA, 1280 bp, Homo sapiens
gcaattttttgaccatctccactggaagacagagaatggcttcagggccgggcacttgtgtcttcctgagtttcatgttccccaatcctaccattggtatgtagtaggtactcagagcttttttactgaatgagtcaactggtgagtaataaagaaagcaggaaggagtggctgagtgaagaaatctggaaagaaggaagggagggaaaacaccaggtaggaaatgagtgaacgatggaagaggagagggaattcaacaaggacctcctctttggcttcaggagctggggaccctgaaccagacctgtggatcatccagccccaggaattggtgttggggaccactggagacactgtctttctgaactgcacagtgcttggagacggtccccctggacccatcaggtggttccagggagctggtctgagccgggaggccatttacaactttggaggcatctcccaccccaaggcgacagcggtgcaggcctccaacaatgacttcagcattcttctgcaaaacgtctccagtgaggatgcaggcacctattactgtgtaaagtttcagaggaaacccaacaggcaatacctgtctggacagggcaccagcctgaaagtgaaagcaaaatctacctcttccaaagaggcagaattcaccagtgaacctgcaactgagatgtctccaacaggcctcctggttgtgttcgcacctgtggtcctggggctgaaggcaattaccttggctgcactcctactggccctggctacctctcggaggagccctgggcaagaagatgtcaagaccacaggcccagcaggagccatgaacaccttatcatggagcaagggtcaagagtgaggggtcagccccagagtgaggaccctctgagttggagaggagccagggctcctcaaccatttccctacctccagtcccagcctctaggtgcccccaggcctcatgacaaactcctagatccctacatctggttttggtccacctagtgaaattcccttctttgcaccgggcttccctctaaaatgtctccctttctctttttggcctgttcaagacctccttgcttttcagtccctggctcagtctctcctcaacacccttgcccctgctgcagccctttctggtgcgccctgcccctttccccacctcgctacatccttcttggcctccaacatccaactcagagtcttcttcccaggagatgtctgtaagaatctctgaactcaaccagccagaccatctgtgcccctccatttacacc

SEQ ID NO: 62463 - DNA, 969 bp, Homo sapiens
ctggggcccggcagaggcttgcatgtcagcaagcccggaggagcccactcgaacctgacctggtttgaattcctgtcggagagcgaggacggtgctggcaagaacgagaagagtgacaagagtaccagtgtgaggcgcaggctgagctgcctccgcagtcgagtgaccaggcagaaggagaaggggaagagcccagcacatctgaaggacaagggccaggatgcacgagagaggcgggagtgtgtcaatgggcaccagctgttgcaagggaccttctccggcccctccagctgccccctgtgtggcaaacctttcttgagctcagcctcgctcaaggagcacccccggggcaccctcctgtccgatggcagcccggccctgtccaggaatgtcggtatgacggtctctcagaaagggggtccccagccaacaccgagcccggctggccctgggacgcaactcggaccaatcacaggagagatggatgaagccgattctgcgtttttaaaatttaagcagacagctgatgactctctgtcccttacatctccaaacaccgagtccatttttgtagaagatccctacaccgcctcgctgaggagtgagattgagtcagacggccacgagtttgaagctgagtcctggagcctcgccgtggatgcagcctacgccaagaagcaaaagagggaggtggtgaaaagacaagatgtcctttatgagctgatgcagacagaggtgcaccacgtgcggacgctcaagatcatgctgaaggtgtactccagggccctgcaggaggagctgcagttcagcagcaaggccattggccgcctcttcccatgcgctgacgacctgctggagacgcacagccactttctcgctcggctcaaggagcgccgccaggagtccctggaggagggcagtgaccggaattatgtcatccagaaaatcggcgacctcctggttcaacag

SEQ ID NO: 62464 - DNA, 714 bp, Homo sapiens
gcggccgctgctcgcgctgaggtgcgtccggtgcccggccccctgcgcccccgcgcgccgcggctcctgttgacccggtccgcccgtcggtctgcagcgcggctgaggaaacctggctgtaacttcaaaagaagatttgattctttatttctggactgcatatatatatataacaaggccattaaaatgtcgggagcctcagtgaaggtggctgtccgggtaaggcccttcaattctcgagagaccagcaaggaatccaaatgcatcattcagatgcaaggcaactcgaccagtattattaacccaaagaatccaaaggaagctccaaagtccttcagcttcgactattcctactggtctcatacctcacccgaagatccctgttttgcatctcaaaaccgtgtgtacaatgacattggcaaggaaatgctcttacacgcctttgagggatataatgtctgtatttttgcctatgggcagactggtgctggaaaatcttatacaatgatgggtaaacaagaagaaagccaggctggcatcattccacagttatgtgaagaactttttgagaaaatcaatgacaactgtaatgaagaaatgtcttactctgtagaggtgagctacatggcaatctactgtgaaagagtacgagatttgctgaatccaaaaaacaatggctatttgcgtgtgcgtgaacacccacttcttgtacct

SEQ ID NO: 62465 - DNA, 808 bp, Homo sapiens
gtaccgcttcggaatttccgggtcgacgatttcgtggagggtgtggggcgctctctcccggtgtgggtactgctgtctgtggtgtggctgtgggacccgtgagcaagcagcgacgccagcggcggagaaccgacgaaaggtgtcaccacagtgatggcagtggaggacagcacgctgcaagtagtggtacgggtgcggccccccacccctcgggagctggacagtcagcggcggccagtggttcaggtggtggacgagcgggtgctggtgtttaaccctgaggagcccgatggagggttccctggcctgaaatggggtggcacccatgatggccccaagaagaagggcaaagacctgacgtttgtctttgaccgggtctttggcgaggcggccacccaacaggacgtgttccagcacaccacgcacagcgtcctggacagcttcctccagggctacaactgctcagtgtttgcctacggggccaccggggctgggaagacacacaccatgctgggaagggagggggaccccggcatcatgtacctgaccaccgtggaactgtacaggcgcctggaggcccgccagcaggagaagcacttcgaggtgctcatcagctaccaggaggtgtataatgaacagatccatgacctcctggagcccaaggggccccttgccatccgcgaggaccccgacaagggggtggtggtgcaaggactttctttccaccagccagcctcagccgagcagctgctggagatactgaccagggggaaccgtaaccgcacgcagcaccccactgatgccaatg

SEQ ID NO: 62466 - DNA, 434 bp, Homo sapiens
gtccgtattcccgggtcgacgatttcgtcgatgccgctggagaacctggaggaggagggtctgctcaagaaccccgacttgcgtatcgcgcagctgcgcttcctgctcagcctgcccgagcaccggggagacgctgccgtgcgcgacgagctgatggcggccgtccgcgataacagtgaggcccgcacgagcgccgagtcagcggcctaggcctgggccgtccccgcgttccggagcctgcggggactttttttgatggagctccagacccctctgacggggtctcagagaccaggcctggcttctccggcccttagggttttgctttggtttggggataccctgggggacctcgacttgcctcagcggggtctgcatctctctgtgccgccttcccctgtaagggcagcttgggggagaatcgtgaggcattg

SEQ ID NO: 62467 - DNA, 536 bp, Homo sapiens
acggaagctcggttgatgtttctgcagaagttttcccccttggtcggtggcggagctgctgagcgcgatagtagcagctccggcggcagcaacattgactacgaggaatggcggcggctgccgcaggacctgcagcatcccagaggtttttccagagcttctcagatgctctaatcgaccaggacccccaggcggcgttagaggtgggagagccttttctgcttcctccactcccggctgacccgcctccttccagcaccgcctgattaggactcaggctctagtgatgctgcgtctcagccccagtattgagattctcggtctcctttctctctctcacggtagccgcgttacctcagactcctgtcttgccctttccacttccagactcttgcattcctgaagcttctgagaaaaacttcctctatttattgggagcatggttggcatctgcagttgggctgaaaggattttttttttttaatgactaaaaaagaaaaggggactctgggctcgatgaaaattaattttttctt

SEQ ID NO: 62468 - DNA, 870 bp, Homo sapiens
  misc_feature (1)...(870): n = a,t,c or g
tttcgtcccgcctgagacaggccccttgctctcaggaccctctgagccaggaccagggtccggttccctgagacccgcaggcctgtgggcgtgagtgctggggacgaggttcggggccagcgagtgactgagtcactcggcgcctgtttcctgagcgcctaaaaatgccaggcaaccttgcaaatgtttcacattaatcttcacaggagccctgtgaggtgttacgatgattattttcgtgttatagagagaaaatggctcagtgtggcttgacaacctgtccaaagtcacgtagggtcagagtgcagacctgagaccactgctcaccgacttcagactccagtttatctgtgccccagcttcctcacttagtctcagaagacttaggctgaggcctcagaaggagatctccatcctttgtccagagcagaacaggatggccatgtcccaggaatcattgaccttcaaggacgtgtttgtggacttcaccctggaggagtggcagcaactggactctgcccagaagaacctctacagggatgtcatgcttgagaactacagccacctggtgtccgtggggtatctagttgcgaagccagatgtgatcttcaggttgggaccaggtgaagagtcctggatggcagatggggggaccccggtacggacctgtgcaggtgaggacaggccaggtgagtcaggccggggaaaggagaccaggttggttggtgagagcttggcctctgggatgtgctcaggagcccttctcagagcctcggacttgtggacatgcctaggctctgatgagcagaactggtgtcatgtccaatgaggcctctgccttgccgncgggtacagtctttgtgtccttgt

SEQ ID NO: 62469 - DNA, 1123 bp, Homo sapiens
ccggaaatcccgggtcgacgatttcgtgccggaggcgaagatggaaggcttaacgctgagcgatgcggagcagaaatactattcagatctcttctcctactgcgacattgagagcaccaagaaggtggtggtcaacgggcgggtgctggagctgttccgggccgcgcagctgccgaacgacgtggtcctacagatcatggagctttgtggtgcaacaagacttggttattttggaagaagtcagttctacattgctttgaaacttgtagctgttgcccagtctggtttccctttaagagtggaaagtataaatacagtaaaggaccttcctctgccaagatttgttgcttcaaagaatgaacaggaatctcgccatgcagcctcatattcttcagattctgaaaatcaagggtcgtattctggtgtaattcccccaccacctggcagggggcaagtgaaaaagggatccgtaagccatgatacggttcagcctcgtacatctgcagatgcacaggaacctgcatccccagtagtttcaccacagcaatccccaccaacttctccacacacatggaggaagcacagccgtcatcccagcggtgggaatagtgagaggcctctcgcgggacctgggccattttggtctccctttggtgaagcacaatcaggttcttctgctggtgatgcagtgtggtcagggcattccccacctccacctcaagaaaactgggtcagttttgcagatactccaccaaccagtactcttttaaccatgcatcctgcttctgtccaggaccagacaacagtacgaactgtagcatcagctacaactgccattgaaattcgtaggcaatccagtagttatgatgatccctggaaaataacagatgaacaaagacagtattatgtaaatcagtttaaaaccattcagcctgatctaaacggatttattccaggtgagttgttgaaaacagaagttcttctagatgggacaggagaatctcaatttcataatatcaaagacattgttttattggtcatagattttaattataaaataattatcagattatttgtctaaaaagaatttataatcactgggggccaaaaacatgacatattc

SEQ ID NO: 62470 - DNA, 530 bp, Homo sapiens
  misc_feature (1)...(530): n = a,t,c or g
tttcgtggagggggacgaggcagcgcgagggcagcaaccgcaccaggggctgtggcgccggcgacggaccagcgacccaagcgccgcggttaaccacgtctcgtccacgacctccctaggtgagaattatgaagatgatgacctagtaaattctgatgaggttatgaagaaaccatgtccagtacagattgttcttgctcatgaagatgaccataactttgaacttgatgaagaagctttggagcagatattgctacaggagcacatacgagatcttaacatagtagtggtatctgtggcaggagcttttcgtatagggaagtcatttctactggacttcatgcttagatacatgtataacaaggggaatagaattttaaaacgacccaattaaaaagaaaaaagtaccaaccatgcccaactcttaaaaaaacnnnnnnnnnnnnnnngtgaccttggggggcctcattttgtggcccaggctgacaaacctgtttttttatttttatagaaatatatttttttatggg

SEQ ID NO: 62471 - DNA, 482 bp, Homo sapiens
  misc_feature (1)...(482): n = a,t,c or g
tttcgtagccggtgctgctgcaggctgaggctgcggcagaggcggcgaggcgcgggcggtgaggacggacagtcaccgacttagtccagttccctgtgatctcaaaacaattgttgcagcaggctcctggcagtctcaagcagttcatcttcttggtgtactggtttcctattgtgattttatcatggaaaatcaattggctaaatcaactgaagaacgaacatttcagtaccaggattctcttccatcactgcctgttccttcacttgaagaatcattaaaaaaataccttgaatcagtgaaaccatttgcaaatcaagaagaatataagaaaactgaagaaatagttcaaaaatttcaaagtgggattggagaaaaattgcaccagaaattgcttgaaagagcaaaaggaaaaagaaattggggtatttgtttgttataattgaattattgatgatgttttaaagattgataantaaaag

SEQ ID NO: 62472 - DNA, 857 bp, Homo sapiens
tttcgtctcctagaggggcaggctcggcgacaaggggcggtggtgccccgtcccagcgagggacgcccggggctgggggtgccggtcgagcccggggcaacagcttcaccaagtttggcaaccgcaacgtcttcatgaaggacaacagctcttcttccagcacagactcccgctcccgctcctcctccaggtccccgacgcgccacttccgcagaagtgactcccactcagactccgacagctcctactcagggaatgagtgtcaccctgtgggccgcaggaacccgccccctaagggccggggcggtcgaggggcccatatggatcggggccgaggcagggcgcagcgtgggaagaggcacgatctggcgcccaccaagcgcagtcgaaagaagatggcggcgctggagtgtgaggacccggagcgagagctgaagaagcagaagcgggcagcccgcttccagcacggacactcccgccgcctgcgcctcgagcccctggtgctgcagatgagcagcctggagagcagtggggctgaccctgactggcaggagctgcagatcgtgggcacctgccctgacatcaccaagcactacctgcgcctcacctgtgcccccgacccgtccaccgtgcgccctgtggcagttttgaaaaagtcgctgtgcatggtcaagtgccactggaaagagaagcaggactacgcgtttgcctgcgagcagatgaagtcgatccggcaggatctgacggtgcagggcatccgcaccgagttcacggtggaggtgtacgagacccatgcccggatcgccttggagaagggtgaccataaagagtataaccagtgccagacgcactgtatt

SEQ ID NO: 62473 - DNA, 460 bp, Homo sapiens
tgacgaccgtccggaattccggtcgacgatttcgtgcgccattgaggagcggcggggaggaaacgccgcgcagcgccgggctggggcgggcggcccgggacaccgacagatttttctgtgaccatgaaagagagaaataaagaatgatccatgatttctaaacaccttttcctgaggatatagtcatgttggaaggccttgtagcctgggttctcaatacctatttgggaaaatatgtcaataacctgaacactgaccagctctcagttgcacttctcaaaggtgctgttgaattagaaaacttgccattaaagaaagatgccttgaaagaattggaattaccatttgaagtcaaaactggcttcattgggaaagtaacccttcagattcccttttatcgcccccatgtggacccttgggtgatctccatctccagccttcacttaattggagccccaaa

SEQ ID NO: 62474 - DNA, 675 bp, Homo sapiens
tttcgtgccacggcgcccggcgggcaagacaccctcagatcacagggttctgccaagagcccggccgagtgcagctcgagcgccgacgtcgccaaggatacacagtgctgacgcagtacacaagtgcgtcacagtggtcctccgccggctacgtcagtggctttcaggcgctttcctgttggaattggcgactgctgcggggctgagcgctggtttcacgcgtctcgggagccaggttggcggtgcgatgaggcgcagcaaagcctacggggagcggtaccccgcctcggtgcagggctccgccccgtcgcctggaaagaagttgagaggattctattttgcaaagctgtattatgaagctaaagaatatgatcttgctaaaaaatacgtatgtacttaccttagtgtgcaagagagggatcccagagctcacagatttctgggtcttctttatgaattggaagaaaacacagagaaagccgttgaatgttacaggcgttcactggaattaaacccaccacaaaaagatcttgtgttgaagattgcagaattgctttgtaaaaatgatgttactgatggaagagcaacatactgggttgaaagggcagcgaaacttttcccaggaagtcctgccatttataaactacaggaacatcttctagattgtgaaggtgg

SEQ ID NO: 62475 - DNA, 718 bp, Homo sapiens
tttcgtaagagccgggcctgcctactggtacgcggagccgacgagctccggacagctagtgccgggccttgagcgcctttgggccccgccgctccgttccagcgccacgctgggctccggtctacacagtctcgagcgcagtcccgcgccgcgcaccggctggttgctgtgaggagggtcggtgacccctccattcctttgatccgccgcgcagtgcgtccccacgcggatccctggctcgcctcgcgcctgccggcggatccgtggtcatgccaacccagcagccggctgcgccgagtactcgtgcccccaaaccctcccggagtctctctggctcactttgtgccctgttttctgatgcagactcgggatccgggatgaaggcggagcttccccctgggcctggggtaagtgaggcttccctcccaagccgcctgccaagcgctacgcaggaggctgtgccagctttattccgccccagctcccatcccgtgtcggtttatttctcagtaaagccaggagattttacagaggtcttgcaaccctagggatatatgattctgtccctggaggagaaacgtcagcctctgtggatgtaagcttgcaacaggtagcttgtggaagttaggaagaactagggatttaaccatgtggaaatcttgtaagcatccaatagtatttgttcccctttggaattggtggggaagagcagtatcct

SEQ ID NO: 62476 - DNA, 469 bp, Homo sapiens
tttcgtggcggagaaagcagaggaggaccggcgggccaagctttcctagcctgacagcagccatttcggaacaattagcagcagcctctgtcaccatccaaagattacaacccatgaaaccattgaatttgtgccttgtatcagaaagcaaaggagaatgaaaaagcacagctaacattgcttgaggatctaggcgattaattctttagactgtcatcatgggtatccgaggactagtgagttttgtggaagatcatagtaatgagttcttcactgatttgaagttgcgggacacaaaaattgtcattgatggttatgctcttttccaccgtctttgcttcagttcaaacttggatctccggtatggaggggactatgattcttttgcagatgttgtacaaaaattctttgaatcactgtttgcttgtaatatatgcccatatgttgtattagatggaggatgtgacat

SEQ ID NO: 62477 - DNA, 632 bp, Homo sapiens
  misc_feature (1)...(632): n = a,t,c or g
tttcgtgttttctgtattgtaatatgtagagcacattccagaactgctcagtttcgagttacctaatggatcttcactgtgtgccaattagtcgatttctgtgaaaacgccccggtttctgccaaagggcaggagtcgctgctcttgtgccgggtgctgctggttgtgtagggcgctgttgcttttttaaggacgctctgcactgaattaggcttcctcgtgggtcatgatcagttaagtcctgtcaaagaaaaaaggactgagtgcagaagaaaagagaactcgcatgatggaaatattttctgaaacaaaagatgtatttcaattaaaagacttggagaagattgctcccaaagagaaaggcattactgctatgtcagtaaaagaagtccttcaaagcttagttgatgatggtatggttgactgtgagaggatcggaacttctaattattattgggcttttccaagtaaagctcttcatgcaaggaaacataagttggaggttctggaatctcagttgtctgagggaagtcaaaagcatgcaagcctacagaaaagcattgagaaagctaaaattggccgatgtgaaacggaagagcgaaccangctagcaaaagagctttcttcacttc

SEQ ID NO: 62478 - DNA, 780 bp, Homo sapiens
attttatcgactattccgtcagacgccctcttgcctttagtgaactgcggggacctggcctttgccggtaggggccagcgcagaaaagcctgggagatgcgcgtccagggccgcgagtgcggggaagctgcgggaccgcagagtccgctcggcagccggtagtcagggcgccggggcgttaggcttcagatttacttcaatgttcctaatgggcttgcttcagaagtgctcactgttctcgccacctgaggaaccgcattttcatgtatttgtattgggacaagacgcggagtccggtgtgtaaagggcctgctttgagggaagaaaggccgcagcccaggctcaaactggaggattataaggatcgcctgaaaagtggagagcatcttaatccagaccagttggaagctgtagagaaatatgaagaagtgctacataatttggaatttgccaaggagcttcaaaaaaccttttctgggttgagcctagatctactaaaagcgcaaaagaaggcccagagaagggagcacatgctaaaacttgaggctgagaagaaaaagcttcgaactatacttcaagttcagtatgtattgcagaacttgacacaggagcacgtacaaaaagacttcaaagggggtttgaatggtgcagtgtatttgccttcaaaagaacttgactacctcattaagttttcaaaactgacctgccctgaaagaaatgaaagtctgagacaaacacttgaaggatctactgtctaaattgctgaactcaggctatttt

SEQ ID NO: 62479 - DNA, 695 bp, Homo sapiens
tttcgtctgcctcagcctcctgagtagctgggattacaagtgcccgccacatcccctggctaatgtttgtatttttggtagagacagggttttaccacgttggccaggctggtctgaaactcctgaactcaggtgatcctcatgccttggactcccaaagtgctgggattataggcgtgagccactgcacctggtctgaggctgactttatggatggtgctgtgtccctccatcagaaaggtgtgtgaggtctcttctctgacactagcagctgttgatcggtgtttagacccgtgatttcttaggacttacaagatggcaagacaacattctaaacccgtcattcagagaaacattaaacttgaagcctctttcaacatcctggtgaatgagggtccacttcaggccagctggaggcctagggtcttgttccactaatggttggcctcactgtgtgtgacagccctgccaaacggaaacctcaggaagagtctgaaagagccaaatcggatgagtccatcaaggaagaagacaaagaccaggatgagaagagacgtagagttacatccagagaacggaagaaaagagactccgaagtcaaaccaaagaaccgtaagtgcagcgaacctgcctttgtgctttgttgtgaaactgaattgctaacataagtatcttggtaaaataacggggtggtg

SEQ ID NO: 62480 - DNA, 1333 bp, Homo sapiens
  misc_feature (1)...(1333): n = a,t,c or g
tgctcgtgcggaattcccgtgtcgactatttcgtgcaggagagggtaatcaggtgggcgcgttccgggggccgagcgctgcctcgcggggcccctctgggagggaggcgagcaacatgtggggcctttgatggagaaaggtgaaatgcgcaggtagcatctaaaggaactggtttaaatcctaatgccaaagtatggcaagaaattgctcctggaaatactgatgccaccccagtaactcatggaactgaaagctcttggcatgaaatagcagctacatcaggtgctcatcctgagggtaatgcagagctctcagaagatatatgtaaagaatatgaagtaatgtattcttcatcttgtgaaaccacaagaaatactacaggcattgaagaatcaactgatgggatgattttaggaccagaagatctgagttaccaaatatatgatgtttccggagaaagcaattcagcagtttctacagaagacctaaaagaatgtctgaagaaacaattagaattctgtttttcacgagaaaatttttcaaaggatctttacttgatatctcaaatggatagtgatcagttcatcccaatttggacagttgccaacatggaagaaataaaaaagttgactacagaccctgatctaattcttgaagtgttaagatcttctcccatggtacaagttgatgagaagggtgagaaagtgagaccaagtcataagcgttgtattgtaattcttagagagattcctgaaacaacaccaatagaggaagtgaaaggtttgttcaaaagtgaaaactgccccaaagtgataagctgtgagtttgcacacaatagcaactggtatatcactttccagtcagacacagatgcacaacaggcttttaaatacttaagagaagaagttaaaacatttcagggcaagccaattatggcaaggataaaagccatcaatacattttttgctaagaatggttatcgattaatggattctagtatctatagtcaccccattcaaactcaagcacagtatgcctccccagtctttatgcagcctgtatataatcctcaccaacagtactcggtctatagtattgtgcctcagtcttggtctccaaatcctacaccttactttgaaacaccactgggtaagtgaggatccttacaataaaatataataatatttttaatttgaggctggaaatttggaggaaatcagttgggagtggggagctcatttatgttgacattgatggactttttgggcctttattttattttatttttngtatttttcgtggaggtggnattttgccaggttgcccggggtgg

SEQ ID NO: 62481 - DNA, 659 bp, Homo sapiens
aggcagagccaagtgcgtcctggaggcttcccccgttgcgaaggtctttctggactgattttggtggaagaagacagcaggcggtgggcattcactgtgctggtgggaagtctggttacattaagaaaggaattctagcaaagttattctgtaaatacaacagaatcagttgcttttgttaaatatattggtgcaagttcaacatggaggcaaatcactgctccctgggtgtgtatccatcttacccagacctggtcatcgatgtcggagaagtgactctgggagaagaaaacagaaaaaagctacagaaaactcagagagaccaagagagggcgagagttatacgggccgcgtgtgctttattaaactcaggaggaggagtgattcagatggaaatggccaacagggatgagcgtcccacagagatgggactggatttagaagaatccttgagaaagcttattcagtatccatatttgcaggctttctttgagactaagcaacacggaaggtgtttttatatttttgttaaatcttggagtggggatcctttccttaaagatggttctttcaattcccgcatttgcagccttagttcttcattatactgtagatctggcacctctgtgcttcacatgaattcaaggtcgacgcggccg

SEQ ID NO: 62482 - DNA, 620 bp, Homo sapiens
tttcgtccgggacagctcgcggcccccgagagctctagccgtcgaggagctgcctggggacgatgaggaaatggaggcacagagaggtgaacttgcccgaagtcactcagcaggatgcagtgtgtccagctccaataccgagcccaggtctgagtgcccagacaggactccagaagatttggggaactatccactgccaagtttgccctggggccccagcctggcccgggtcaccctggcatgaggagatgggcctgttgctcctggtcccgttgctcctgctgcccggctcctacggactgcccttctacaacggcttctactactccaacagcgccaacgaccagaacctaggcaacggtcatggcaaagacctccttaatggagtgaagctggtggtggagacacccgaggagaccctgttcacctaccaaggggccagtgtgatcctgccctgccgctaccgctacgagccggccctggtctccccgcggcgtgtgcgtgtcaaatggtggaagctgtcggagaacggggccccagagaaggacgtgctggtggccatcgggctgaggcaccgctcctttggggactaccaaggccgcgtgcacctgcggcaggac

SEQ ID NO: 62483 - DNA, 634 bp, Homo sapiens
accgccccggaatttccgggtcgacgatttcgtggcgagagagtggcagcgggggctgatggaagtgcagtggtgggctggagagggcaccctagtgagttggcttttctctccttcggtgcctttggttgggctcgaggcccggggtcggaggccatcaggacaagagtgtgggacttggaagggcagccacctggagcttggaaggggctgtatccagcatgctccaaggccacagctctgtgttccaggccttgctggggaccttcttcacctgggggatgacagcagctggggcagctctcgtgttcgtattctctagtggacagaggcggatcttagatggaagtcttggctttgctgcaggggtaagtagcatgtagtaggagaaatggaaattgaggcatactgattctgacatgtgtctgccaagggctgtcttcagtccctccccttgcgacctagatgcatctctgtgttcctcaggcactaacacctccctcttatcacctgccatatttatttcccagcttatcaaatgcccatttctctttagacagcaatcgaagtttatttgacagctgcctcaggactagggaaataagatcttatttggtaagggcctagcacaggc

SEQ ID NO: 62484 - DNA, 2069 bp, Homo sapiens
  misc_feature (1)...(2069): n = a,t,c or g
cacatttgcagcctgcctagtgaggtcctgaggcacgtgtttgccttcctcccggtggaagacctctattggaacctgagcttggtgtgccacttgtggagggagatcatcagtgacccgctgttcattccttggaagaagctgtaccatcgatacctgatgaatgaagagcaagctgtcagcaaagtggacggcatcctgtctaactgtggcatagaaaaggagtcagacctgtgtgtgctgaacctcatacgatacacagccaccactaagtgctctccgagtgtggatcccgagagggtgctgtggagtctgagggaccaccccctcctccccgaggctgaggcgtgtgtgcggcaacacctccccgacctctacgctgctgccgggggtgtcaacatctgggccctggtggcggctgtggtgctcctctccagcagtgtgaatgacatccagcgactgctcttctgcctccggagacccagctccacggtgaccatgccagatgtcaccgagaccctgtactgcatagccgtgcttctctacgccatgagggagaaggggattaacatcagcaataggattcactacaacattttctattgcctatatcttcaggagaattcctgcactcaggccacaaaagttaaagaggagccatctgtctggccaggcaagaaaaccatccaacttacacatgaacaacagctgattctgaatcacaagatggaacctctccaggtggtgaaaattatggcctttgccggcactgggaagacctcaacgctggtcaagtatgcagagaagtggtctcagagcaggtttctgtatgtgacattcaacaagagcatcgcaaagcaggccgaacgcgtcttccccagcaacgtcatctgcaaaaccttccactccatggcctacgggcacatagggcggaagtaccagtcaaagaagaagttgaatctcttcaagttaacacccttcatggtcaactccgtccttgctgaagggaagggtggattcataagagccaagcttgtgtgtaagactctagaaaacttctttgcctcggctgacgaagagctgaccattgatcacgtgcctatttggtgtaagaacagccaaggacagagagtcatggttgagcagagtgaaaaactgaatggtgtccttgaagcgagccgcctctgggataacatgcggaagctgggggagtgcacagaagaggcgcaccagatgactcatgacggctacttgaaactctggcagctgagcaagccttcgctggcctcttttgacgccatctttgtggatgaggcccaggactgcacaccagctatcatgaacatagttctgtctcagccatgtgggaaaatctttgtaggggacccgcaccagcagatctataccttccggggtgcggtcaacgccctgttcacagtgccccacacccacgtcttctatctcacgcagagttttcggtttggtgtggaaatagcttatgtgggagctactatcttggatgtttgcaagagagtcaggaaaaagactttggttggaggaaaccatcagagtggcattagaggtgacgcaaaggggcaagtggccttgttgtcccggaccaacgccaacgtgtttgatgaggccgtacgggtgacggaaggggaattcccttcaaggatacatttgattggggggattaaatcatttggattggacagaatcattgatatttggatccttcttcagccagaggaagaacggaggaaacaaaacctcgtcattaaagacaaatttatcagaagatgggtgcacaaagaaggctttagtggcttcaagaggtatgtgaccgctgccgaggacaaggagcttgaagccaagatcgcagttgttgaaaagtataacatcaggattccagagctggtgcaaaggatagaaaaatgccccacacccacgtcttctatctcacgcagagttttcggtttggtgtggaaatagcttatgtgggagctactatcttggatgtttgcaagagagtcaggaaaaaagacttttgggttggaggaaancct

SEQ ID NO: 62485 - DNA, 1662 bp, Homo sapiens
tttcgtatccgaggcaagcgttggttctgtgcgcctcagagttggagcacacagctgtattaaaaaggcaaatcgaaggccgggcgcggtgactcacgcctgtcatcctagcactttgggaggccgaggcggctgaatcacttgaggttaggagtttgagatcagcccgggcaacatggtgaaaccccgtctctacaaaaatagaaaaattagccgagcgtgatggtggatgcctgtaatcctagctcctcgggaggctaaggagtataatgtctcaggaaggcgattatgggaggtggaccatatctagtagtgatgaaagtgaggaagaaaagccaaaaccagacaagccatctacctcttctcttctctgtgccaggcaaggagcagcaaatgagcccaggtacacctgttccgaggcccagaaagctgcacacaagaggaaaatatcacctgtgaaattcagcaatacagattcagttttacctcccaaaaggcagaaaagcggttcccaggaggacctcggctggtgtctgtccagcagtgatgatgagctgcaaccagaaatgccgcagaagcaggctgagaaagcggtgatcaaaaaggagaaagacatctctgctcccaatgacggcactgcccaaagaactgaaaatcatggcgctcccgcctgccacaggctcaaagaggaggaagacgagtatgagacatcaggggagggccaggacatttgggacatgctggataaagggaaccccttccagttttacctcactagagtctctggagttaagccaaagtataactctggagccctccacatcaaggatattttatctcctttatttgggacgcttgtttcttcagctcagtttaactactgctttgacgtggactggctcgtaaaacagtatccaccagagttcaggaagaagccaatcctgcttgtgcatggtgataagcgagaggctaaggctcacctccatgcccaggccaagccttacgagaacatctctctctgccaggcaaagttggatattgcgtttggaacacaccacacgaaaatgatgctgctgctctatgaagaaggcctccgggttgtcatacacacctccaacctcatccatgctgactggcaccagaaaactcaaggaatatggttgagccccttatacccacgaattgctgatggaacccacaaatctggagagtcgccaacacattttaaagctgatctcatcagttacttgatggcttataatgccccttctctcaaggagtggatagatgtcattcacaagcacgatctctctgaaacaaatgtttatcttattggttcaaccccaggacgctttcaaggaagtcaaaaagataattggggacattttagacttaagaagcttctgaaagaccatgcctcatccatgcctaacgcagagtcctggcctgtcgtaggtcagttttcaagcgttggctccttgggagccgatgaatcaaagtggttatgttctgagtttaaagagagcatgctgacactggggaaggaaagcaagactccaggaaaaagctctgttcctctttacttgatctatccttctgtggaaaatgtgcggaccagtttagaaggatatcctgctgggggctctcttccctatagcatcc

SEQ ID NO: 62486 - DNA, 973 bp, Homo sapiens
cacatagttcctctaggtggcggcaaaaaccgaggtgacggcggccgtggccttagcctcgtaaaaattaaaacctgtatgtttcagcgaataatgaaaacgcagtctggatgaaagaccccatgacgcttaatcaggcatccagtacactggctgtggccccgccccgccaggcactcgctccgcctcttcgcccccattggttctaagcgccgcccggcatccctgcgattggctaggccgggcccgtcgcgtccaataggcggtggcgccggctttcccgcggctgttcgctgttccagtgggtcgtggcggtggcggcagcggcggttaggggatgtaacggtcgcccgcctccggcgtgacgatggcggccgtagggtccggaggctatgcgcggaacgatgcaggggagaagctgccctctgtcatggcgggagttccggcgcggaggggccagtcctccccgccccccgccccaccaatctgcctacggcggcggacgcgactctcgacggcctccgaggagacggtgcagaaccgggtgtcactcgagaaggtgcttggcatcacagcccagaacagcagtggcctaacctgtgaccccggcacaggccatgtggcctacctggcaggctgtgtggtggtgattttggaccccaaggagaacaagcagcagcacatctttaacaccgccaggaagtctctcagtgctctggccttctcccctgatgggaagtacatagtgacaggggagaatgggcataggcctgctgtgcgcatctgggatgtggaggagaagaatcaggtggcggagatgctaggccacaagtatggtgtggcgtgtgtggccttctcacccaatatgaagcacatcgtgtccatgggctaccaacatgacatggtgctcaacgtctgggactggaagaaagacatcgtagtgggcctccaacaaggtatcttgtagagtcac

SEQ ID NO: 62487 - DNA, 602 bp, Homo sapiens
tttcgtggaaagaacagaggaacaacagcttcttggtggggctggggctactagcaggtggcagttagttggtgagtgttgggtgggccaagggtctgatttctcataatatctagggatggggtgaaaattcctgctgccaggccagaggggatggtcagctccaagacaaggaagcagtgtccaggagaacatttcaggataggaataggccaagtgctgagaagatgagtcttaggattgatgtggatacaaactttcctgagtgtgttgtagatgcaggaaaagtcacccttgggactcagcagaggcaggagatggaccctcgcctgcgggagaaacagaatgaaatcatcctgcgagcagtatgtgctctgctgaattctggtgggggcataatcaaggctgagattgagaacaaaggctacaattatgaacgtcatggagtaggattggatgtgcctccaattttcagaagccatttagataagatgcagaaggaaaaccactttttgatttttgtgaaatcatggaacacagaggctggtgtgccacttgctaccttatgctccaatttgtaccacagagagagaacatccacg

SEQ ID NO: 62488 - DNA, 459 bp, Homo sapiens
atcgcctcctccctccccaagatggcgtccttgctgcagtcggaccgggttctctatctagtccagggagaaaagaaggttcgggccccgctctcgcaactctacttctgccgctattgtagcgaactgcggtcgctggaatgtgtgtctcacgaggtggactcccattattgtcccagttgtttagaaaatatgccatcggctgaagccaaactaaaaaagaatagatgtgccaattgttttgactgtcctggctgcatgcacaccctctctactcgggccacgagcatctccacacagcttccagatgacccagccaagaccaccatgaagaaagcctattacctggcatgtggattttgtcgctggacgtctagagatgtgggcatggcagacaaatctgtaggtgagtgagatggacttcaatatgaaattttgtacaattgacagtgctataat

SEQ ID NO: 62489 - DNA, 553 bp, Homo sapiens
caccgctccgtgaattcccgggtcgacgatttcgtgggtttaagggccaggaaaggaagcattcagggaatttaggtgtagccagaagaaaatcaggtcctggctccccagaagcaagagagttcaagtgaaggaaggaggaggttcctggatgtggatgtcatcatttctgggaacactcttaaatggagactcagatttcttagccaaaatttagggaggatccagaagaaaccaaagacgaagcatcccagttcttgggtatttcctgaaacagaagaaaatgacaaaggcccaggaatcactgaccctggaggatgtggctgtggacttcacctgggaggagtggcagttcctgagccctgctcagaaggacctgtaccgggatgtgatgttggagaactacagcaaccttgtgtcagtggggtatcaagccggcaaacctgatgccctcaccaagttggaacaaggagaaccactatggacactagaagatgaaatccacagtccagcccacccagaaattgagaaagctgatgatcatctgcagcac

SEQ ID NO: 62490 - DNA, 470 bp, Homo sapiens
cgggtcgacgatttcgtgggacaccaggcagccacaggcctgtcagaccaggacccttaccctctagacatggcctcggtcccctgcaaaccccagccccgtagccctgcgaggttacagacagcctaaacgccaccaccacagggcctgtgccgtgcccctgacccgggcacagaaggccactggcccggaggccatggagacggtgcccccagcagtggacctggtgctgggtgcttctgcctgctgcctggcctgtgtcttcaccaaccccctggaggtggtgaagacgcggctgcagctgcagggggagctgcaggcccggggcacctacccacggccctaccatggcttcatagcctctgtcgctgctgtggcccgagcagacgggctgtggggcctgcagaaggggctggctgccggccttctgtaccaaggcctcatgaatggcgttcgtttctactgctacg

SEQ ID NO: 62491 - DNA, 601 bp, Homo sapiens
aattcccgggtcgacgatttcgtcgggctggcaggctgtagccgagcgcgggcaggactcgtcccggcagggttccagagccatgggagcggaaaggaggctgctgtcgattaaggaggcctttcggctggcgcagcagccgcaccagaaccaggcgaagctggtggtggcgctgagccgcacctaccgcacgatggatgataagacagtttttcatgaggagttcattcattaccttaaatatgttatggtggtctataaacgtgaaccagctgtggagagggtaatagaatttgcagcaaagtttgttacctcatttcaccaatcagatatggaagatgatgaggaagaggaagatggtggccttttaaattatttgtttacttttctcttaaagtctcatgaagcaaacagcaatgcagtgagatttagagtgtgcctgctcataaacaagcttttgggaagtatgccacaaaatgctcagattgatgatgatgtgtttgataaaattaataaagccatgcttattagattgaaagataagattccaaatgtgagaatacaggcagttctggcgctttcacgacttcaggatcccaag

SEQ ID NO: 62492 - DNA, 1056 bp, Homo sapiens
tttcgtagcggcggcgcggcgactgaagcgcgcgaaaagctgaggcggcaacgtcggggacggctgcgcgggacggctctgtaggaaggaacttggttccccctccctcagcttccgccccaaaagcagaagtagaaagtaatgaaaaggacaacagacctgaggaagaagagcaagtaatacatgaagatgatgaaagaccttctgagaaaaatgaattttctagacgaaaacgttctaaatcagaagacatggacaatgtacagtctaaacgtcgtcgatatatggaagaagaatatgaggcagaatttcaagtaaagattacagccaaaggagacattaaccagaaacttcaaaaggttatacagtggttgctggaagaaaaattgtgtgcgctgcagtgtgctgtatttgataagactttggcagaattgaaaacacgagtggaaaagattgaatgtaacaagaggcataaaacagttctcactgaactacaggccaagatagccaggttaaccaaacgctttgaagcagccaaagaagatcttaagaaaagacatgaacatccacccaacccaccagtatcaccaggaaaaactgtaaatgatgtcaacagcaataataacatgtcttacagaaatgcaggcacagtgagacagatgctggagtccaaaagaaatgtaagcgagagtgcaccaccatcctttcaaactcctgtgaatacagtatcttcaaccaatcttgtcactcctccagcagttgtcagtagtcaacctaaattgcagactccagtgacttcgggttccctcacagcaacgtcagttcttcctgcacccaatacagctactgtagttgctactactcaggtgcctagtggaaatccccagcctacaatctctttacagcctttgccagtgattttgcatgtacctgttgcagtatcctcccagcctcagcttctacagagccatccagggactttggtgactaatcaaccatctggcaatgttgaattcatttctgtgcaaagcccacctacagtgagtggtcttacca

SEQ ID NO: 62493 - DNA, 1799 bp, Homo sapiens
tttcgtgcgtcttctaagggcgtgggcgagtttacgcgggccagttgttgctggtcgcatgggtaacgaagaaagttcggctaggcaagctcagtgatttttaactctgttggactcgatttgggagccgaatgcctatttcattcttttgtgggctgagactgggggtttgagaaagtggacgggggccaaggtattcatctcacagttggtagcaggatgagagacgagaagtcttgcggtgcaggagaaaccaagtcaggcaggcaggagacgcagcagtaggatctcgtttgcaggagccctgtttcttacacgctttctactccaggagctgctgctaaataatttctgctcagccatgtcgccggctccagatgcagccccggctcctgcgtcgatctccctgtttgacctcagcgcggatgctccggtctttcagggcctgagcctggtgagccacgcgcctggggaggctctggcccgggctccgcgtacttcctgttcaggctcaggggagagagaaagcccagaaagaaagctactccagggtcctatggatatttcagagaagttattttgttcaacttgtgaccagaccttccagaaccaccaagaacagagggaacattataagcttgactggcatcggtttaacctaaagcaacgtctcaaggacaagcctctcctgtctgccctggactttgaaaagcagagctccacaggagatctttccagcatctcgggatcagaagactcagactcagccagtgaggaggacttgcagacactggatcgggagagggctacatttgagaagttgagccgacccccaggcttttaccctcatcgagttcttttccagaatgcccagggccagtttctttatgcctaccgctgtgtcctaggccctcatcaggatcccccagaagaggcagaactgctgctacagaacctgcaaagtaaaggtcccagagactgcgtggtgctcatggctgcagctgggcactttgctggtgctatatttcaaggaagagaagtggtgacacacaaaacttttcaccgctatacggttcgggccaagcggggcacagcccaggggcttcgggatgcccgaggtgggccatcacactctgctggagccaacctgaggcgctacaatgaagccacactatataaggatgttcgtgacctgctggcagggccaagctgggctaaggcgctggaggaggctggtacaatactgttgcgtgctccccgctctggccggtctttgttctttggaggcaagggagcacccctgcaaaggggggatccccgactttgggatatccccctcgccacccgcagacccaccttccaagagctacagcgtgtgctccataagctgaccactttgcatgtctatgaagaagaccctcgggaagcagtcagactgcactcacctcagacacactggaaaacagtaagagaggagagaaagaagcctactgaggaagaaataagaaagatctgcagggatgaaaaggaagcgctggggcagaatgaggaatctcccaaacagggttcagggtcggagggagaagatggctttcaggtagagttggagctagtggagttgactgtggggactctggatctttgtgagtctgaagtattgcccaagcggaggaggagaaaaaggaataagaaggagaaaagccgagaccaggaggctggggcacatcggactcttctccagcaaactcaagaagaggagccttccacacagtcatcccaggcagttgctgcccccttgg

SEQ ID NO: 62494 - DNA, 735 bp, Homo sapiens
ttcggcagcgacagctatggcggtttatgactgtcgggcagagctggcgggtaagcggttcctgtgtgtggcggtcggcgacgaggcacgttcggagcgctgggagagcggacgcggctggcgaagctggcgagcgggggtcatccgagccgtgtcacacagggacagccgcaatccggacctggcggtgtatgtggaatttgatgatcttgaatgggataaacgagagtgggttaaagtttatgaagatttttcaactttctttggtggaataccacttaatctgggccaaaaggaatgaccctagccagactcagggatcaaagagcaaacagattcagtggcctgcattgactttcaaacctctggttgaaagaaatatacccagttcagtcactgcagtagaattccttgtagataagcaactggattttttaactgaagatagtgcctttcagccctaccaggtaagaaattttagattactttttaaaattaaaggttaattaaactttattgatattcagacattctttaaacaatattctttaaatatcatttcatctaacttctagttgtgtgaaaaacccaatgaatgcagtcagttgattttgcttataggataaacggtttattaattcaattaacaatatatactgagaacctactatgagccaggcagtgttctgtgcaaggaatcagaatcgaaatcgtcgacccgggaattccggacgg

SEQ ID NO: 62495 - DNA, 717 bp, Homo sapiens
tttcgtgaacccgctgcctggctggagctctctgggcccttcggtctcgggagcaacgcgttcccggcgacttctgacacagccattacctagattcaagatgaatagcgatcaagttacactggttggtcaagtgtttgagtcatatgtttcggaataccataagaatgatattcttctaatcttgaaggaaagggatgaagatgctcattacccagttgtggttaatgccatgactctgtttgagaccaacatggaaatcggggaatatttcaacatgttccccagtgaagtgcttacaatttttgatagtgcactgcgaaggtcagccttgacaattctccagtccctttctcagcctgaggctgtttccatgaaacagaatcttcatgccaggatatcaggtttgcctgtctgtcctgagctggtgagggaacacatacctaaaaccaaggatgtgggacactttttatctgtcactgggacagtgattcgaacaagtctggtgaaggttctggagtttgagcgggattacatgtgtaacaaatgcaagcatgtgtttgtgatcaaggctgactttgagcagtattacaccttttgccggccatcctcgtgtcccagcttggagagctgtgattcctctaaattcacttgcctctcaggcttgtcttcgtctccaaccaggtgtagagattaccaggaaatcaaaattcagga

SEQ ID NO: 62496 - DNA, 509 bp, Homo sapiens
ccggcattcccgggtcgacgatttcgtgcagaacgcacggctcaactcatgtaattactgtttatagctggccgagcctgactaggagagggcagacccgagaggaaatcagtttcccggacctttgagaggaggctgtgtgttaattaaaggctaggacgggacgggtacttctcagacatgctccaagttgttcttgagatcacagttcccatcacattttctctggagggagtgagtagataattgggatttttttttatttttggccttggctttcttccttttttttacctctccccattttagtcatatggccttgaacccacagtgaattgaagagagaaagaaatggatatgtctgaccccaatttttggactgtgctctcaaactttactttgcctcatttgaggagtgggaacaggcttcggcgaacacaaagttgccgaacaagcaaccggaaaagcttaataggcaatgggcagtcaccagcattgcctcgaccaca

SEQ ID NO: 62497 - DNA, 766 bp, Homo sapiens
tttcgtcagaaaagaggtaaggaagtgttgggggctgggacaaccagctccccaacaactcctaggtgtttaaagaaggaggcaggaagacttgtgaagatgggaactatacaagaggcaggaaaaaagacagatgttggggtcagggagattgcagaagcaccagaactaggagcagccctgagacatggggagttggagctgaaggaggaatggcaggatgaagaattccctagattgcttcctgaggaggctggcacttctgaagatcctgaagaccctaaaggagattcacaggcagctgcaggtacccccagcactttagccctgtgtggccagcgccccatgcgcaagcgtctttctgccccagagttgcggctgagtctgactaaggggcctggaaatgatggagcttcacccacccagtctgcaccttcctctcctgatggcagttctgacctggagatagacgaattggagacaccttcagactcggagcagctggacagtggacatgaatttgaatgggaagatgaactaccccgggcagagggtctgggcaccagtgagacagctgaaaggctgggccgaggttgtatgtgggatgtgactggagaagatggacatcactggagggtgttccgaatgggaccacgggagcagcgcgtagacatgactgtcattgagccctataagaaagtcctgtctcatggaggttaccacggtgatggcctcaatgctgtcatcctttttgcttcctgttatc

SEQ ID NO: 62498 - DNA, 460 bp, Homo sapiens
ggaattcccgggtcgacgatttcgtcggctgcctcggctgccagctctccggcgagccggagtcctagtgccgtaccgtcagtccccggccgcgcggagccgggatgcactgttcctgctgtgggtcctcatcatggagaccaaacgggtggagattcccggcagcgtcctggacgatctctgcagccgatttattttgcatattcccagcgaggaaagagacaatgcaatccgagtgtgttttcagattgaacttgcccattggttttacttggatttctacatgcagaacacaccaggattacctcagtgtgggataagagactttgctaaagctgtcttcagtcattgtccgtttttgctgcctcaaggtgaagatgtggaaaaagttttggatgaatggaaggaatataaaatgggagtacccacatatggtgcaattattcttgatgagacactt

SEQ ID NO: 62499 - DNA, 469 bp, Homo sapiens
tgccgtgggcggctggcccagctggaggaagcggcggtggcggccacgatgagtgcgggcgacgcagtgtgcaccggctggctcgttaagtcgccccccgagaggaagctacagcgctacgcctggcgcaagcgctggtttgtcctccggcgaggccgcatgagcggcaaccccgatgtcttggagtactacaggaacaagcactccagcaagcccatccgggtgatagacctcagcgagtgtgcagtgtggaagcatgtgggccccagctttgttcggaaggaatttcagaataatttcgtgttcattgtcaagactacttcccgtacattctacctggtggccaaaactgagcaagaaatgcaggtgtgggtgcacagcatcagtcaggtctgcaaccttggccacctggaggatggtgcagcagattccatggagagcctctcttacacgcgctcctacctgcagc

SEQ ID NO: 62500 - DNA, 619 bp, Homo sapiens
accgcaccggaaatcccggatcgacgatttcgtggaggaggtggactctgccgacaccggagagaggtcaggatggctaactggttggctccccacatggtgccctacgtctatatcacaccttaaagaagctgaagagaagatgttaaaatgtaaggctttcttcttgtaagttaaatgagctgtgtactaagataggtccaatatatctcattgccctgaaactggaggtaagatactgaggtgagatcattgttggcaaaataacttttttccttttccttgtcattagaaagtacagaaatgaatgtcgggggctggcaggtaggagttctaaaactttttggtcttgggcccctgttatactcttaaattagtaaggaccccaaggagatttgtttatgggcttattatcaatatttatcatttctaatacaattagaaattaaaattgaataatcaaaaatgttaatttattaatttctttaaaaataatagtaaacccattacagattaaaataaataaaatttgtaccaaaaaaagaaaaaaaatactttccaaacattgtttacatgtttacaaatgtctttaatgtctagcttgacgtcgacgcggccg

SEQ ID NO: 62501 - DNA, 460 bp, Homo sapiens
tttcgtgtccttgcccccagcctgggactccggagttgcgtttctacccgtgcttcagggtctagcccagccgaatccgcgtcgggctgtaactcgagtgccagtttcagctgtgagttcaacatggaggcaaatcagtgccccctggttgtggaaccatcttacccagacctggtcatcaatgtaggagaagtgactcttggagaagaaaacagaaaaaagctgcagaaaattcagagagaccaagagaaggagagagttatgcgggctgcatgtgctttattaaactcaggaggaggagtgattcgaatggccaagaaggttgagcataccgtggagatgggactggatttagaacagtctttgagagagcttattcagtcttcagatctgcaggctttctttgagaccaagcaacaaggaaggtgtttttacatttttgttaaatcttggagcagtg

SEQ ID NO: 62502 - DNA, 1732 bp, Homo sapiens
aattcccgggtcgcgatttcgtggatgagagcgcacgcttcggggtctccgggaagtcgcggcgccttcggatgtggcggatgcggccgtgagccggcgggggaggtgctgctgctgcctccactgtactcagacccaggtagcacaggattgtccatcctccagcagctcagtgcaacggtgtgaactcagcctgtttcagagcctccacaccatgacctccaagaagctggtgaactcggtggctggctgtgctgatgacgctcttgctggcctggtggcctgcaaccccaacctgcagctcctgcagggccaccgcgtggccctccgttctgacctggacagcctcaagggccgggtggcactgctgtcgggtgggggctctggccatgagcctgcccatgctggtttcatagggaaggggatgctgactggggtcatcgcgggagctgtgttcacctccccggcagtgggcagcatcctggcagccatcagggccgtggcccaggccggcacagtggggacgctccttatcgtgaagaactacactggggatcggctcaacttcggcctggcccgggagcaggcccgggctgaaggcatcccggtggagatggtggtgattggggacgacagcgccttcactgtcctgaagaaggcaggccggcgggggctgtgcggcaccgtgcttatacacaaggtggcaggtgctctggctgaggctggtgtggggctggaggagatcgcaaagcaggtgaacgtggtcaccaaggccatgggtaccctgggggtgagcttatcctcctgcagcgtccctggttccaaacccaccttcgagctctcagccgacgaggtggagctgggcctggggatccacggggaagctggtgtgcgccggataaagatggcaaccgccgatgagattgtgaaactcatgctcgaccacatgacaaacaccaccaacgcgtcccatgtgcctgtgcagcccggctcctcagttgtgatgatggtcaacaacctgggtggcctgtcattcctggaactgggcatcatagccgacgctaccgtccgctccctggagggccgcggggtgaagattgcccgtgccctggtgggcaccttcatgtcagcactggagatgcctggcatttctctcaccctcctgctggtggatgagcctctcctgaaactgatagatgctgaaaccactgcagcagcctggcctaacgtggctgcagtctccattactgggcggaagcggagccgggtagcccctgccgagccccaggaggcccctgattccactgctgcaggaggctcagcctcgaagcggatggcgctggtgctggaacgggtgtgcagcactctcctgggcctggaggaacacctgaatgccctggaccgggctgctggtgacggcgactgtggcaccacccacagccgtgcggccagagcaatccaggagtggctgaaggagggcccaccccctgccagccctgcccagctgctctccaagttgtctgttctgctcctggagaagatgggaggctcatctggggcgctctatggcctgttcctgactgcggctgcacagcccctgaaggccaagaccagcctcccagcctggtctgctgccatggatgccggcctggaagccatgcagaagtatggcaaggctgctccaggggacaggactatgctggattctctgtgggcagcggggcaggagctc

SEQ ID NO: 62503 - DNA, 1013 bp, Homo sapiens
aattcccgggtcgacgatttcgtggcagggtggggggtgtggaaaaataaaaggaaaagtccttgcaccatgtagatcagcgtcccccactttggcatcccggccggccggggacctcccagtctgcggccatgaacgcgagcagcgagggcgagagcttcgcgggctcggtgcaaattccaggtggcacaacggtgctggtggagctgactcccgacatccatatctgcggcatctgcaagcagcagtttaacaacctggatgcctttgtagctcacaagcaaagtggctgccagctgacaggcacatccgcagcagcccccagcacggtccagtttgtatcggaggaaacagtgcctgccacccagactcagaccaccaccagaaccatcacctcggagacccagacaatcacagtttcagctccagaatttgtttttgaacatggctatcaaacttacctgcccacggaaagtaatgaaaaccagacagccactgtcatctctctccctgccaagtcacgcaccaaaaagcccacaacaccacctgctcagaaaaggcttaactgttgctatccaggttgccaattcaagactgcttatggcatgaaggacatggagcggcatttaaaaattcacacgggagacaaaccccataagtgtgaagtctgtggcaagtgctttagccggaaagacaagctgaaaactcacatgcggtgccacacgggcgtgaagccctacaagtgtaagacgtgtgactacgccgctgccgacagcagcagcctcaacaagcacctgaggatccactcggacgagcggcccttcaaatgccagatctgcccctacgccagccgcaactccagccagctcactgtccacctgcgatcccacacgggtgagtcctgcctgttatttgctctctacgctcctcactttctatggcataaatcataagcaccttaaagcattcagccacaatgtaagaaatcgagttggaacctttgctcaaaaaaa

SEQ ID NO: 62504 - DNA, 401 bp, Homo sapiens
tttcgtcccacccccgaatcttgagaatcctgtactggggggagggcactgcccccgcaccatgttcttgggagagcaggtaaaggggttaacgcgagctatccctctggcctctctatgcgttcccagaggtcccgaattgacgtccttccctcaaaacctccgggtctacaaaccaggaccctcaagacccttcagggctccagcgtgacatggctgaagcgcaccaggccgtgggcttccgaccctcgctgacctcggacggggctgaagtggaactcagtgcccctgtgctgcaggagatctacctctctggcctgcgctcctggaaaaggcatctctcacgtttctggaatgactttctcaccggtgtgtttcctgccagccccctcagttggctt

SEQ ID NO: 62505 - DNA, 441 bp, Homo sapiens
gaattcccgggtcgacgatttcgtcaggagggagaaggaggagccagcggaaggacggtgtgcgggccggccagccctggacgaaagaagagggcccctccaggccagtctgggcaccctgggatagcggctgcagccaggcatggccgactctgcacaggcccagaagctggtgtacctggtcacagggggctgtggcttcctgggagagcacgtggtgcgaatgctgctgcagcgggagccccggctcggggagctgcgggtctttgaccaacacctgggtccctggctggaggagctgaagacagggcctgtgagggtgactgccatccagggggacgtgacccaggcccatgaggtggcagcagctgtggccggagcccatgtggtcatccacacggctgggctggtagacgtgtttggcagggccagtcccaagac

SEQ ID NO: 62506 - DNA, 520 bp, Homo sapiens
ttcccgggtcgacgatttcgtaacgcggtgtcgctggttcagatctcgcagagctcagagtcctgcatgcctcagtcctcgcctcgctcctcctcgcggaggattctgggaggtgacgtcgcgggtctcggtcgcggggcccgtttgcagagcccgcggcgccgggaggactttgttcttcttcagaagagaaaactgaagaaggaggaatggctgtggggctttgtaaagccatgtcccaggggttggtgaccttcagagatgtggcgctagacttttcccaagaagagtgggaatggctgaagccatctcagaaggatttatacagagatgtcatgttggagaactacaggaacttggtatggcttgattagacctaaaatggattcccacttcaccccctactgctgctttgattcctgtttccctgcacatacagtgggccacacctgcaaaaatcacaaggctgacttcaggaatcagttttgatcttcgctgttgtaccttaaaattttttttt

SEQ ID NO: 62507 - DNA, 540 bp, Homo sapiens
agctccctcgcctggctctcggcggcctgatggagtaagaggggttggctgtgaatgtgtgacgttgagtgcttcagatctggtcactatggtacgagaacgaaaatgcatattatgccacatcgtgtacagctcaaaaaaggagatggacgaacacatgcggagcatgttgcatcacagggaacttgagaacctcaagggcaggtatgggaacggctctcttccataagtttgtgaatgtgggtggatctgagtgatgatggtgcctgtcagtttgttttgcagtaatccgtcataagcaaatgttgtcttatggcgtagaacaaccttttagaattaataccaagtgtagtagatttttggcattcaaaagggataaactctgatacctttgggcatctcaaatgtgtgaattcacagcagccctatcaagtagattgcaacaaaggtgagttgggatgagctaactctctcattagtaagctttctcattcctacgtgctagccttgcaactaggacattttgtatttttacttcag

SEQ ID NO: 62508 - DNA, 611 bp, Homo sapiens
cggcatcgaccatttcgtggcggctgtgtgtcgccggagccgaagcgcgcaggcccgtcccggtggccggggagcgggcgggtgggggcgccatgtggttcatgtacctgctgagctggctgtcgctcttcatccaggtggccttcatcacgctggctgtcgcggctggactctattacctggcagaactgatagaagaatacacagtggccaccagcaggatcataaaatacatgatctggttctccaccgctgtactgattggcctctacgtctttgagcgcttccccaccagcatgattggagtgggcctattcaccaacctcgtctactttggcctcctccagaccttccccttcatcatgctgacctcgcctaacttcatcctgtcgtgtggactagtggtggtgaatcattacctagcatttcagttttttgcagaagaatattatcccttctcagaggtcctggcctatttcactttctgcctgtggataattccgtttgcgttttttgtgtcactttcggccggggagaacgtcctgccctctaccatgcagccaggagatgatgtcgtctccaattatttcaccaaaggcaagcggggcaaa

SEQ ID NO: 62509 - DNA, 517 bp, Homo sapiens
ggcacgagggaagagagctagagactggacaggggagacagagcagcgtcggagccgcgcaggggacgggagtgagagcgggagtgagagcaggaacgacgcagagcggccgtcgccgtgcccgggtctcagggcgcctggctgaagtgagcatggcttcagtggcctgggccgtcctcaaggtgctgctgcttctccccactcagacttggagccccgtaggagcaggaaatccacctgactgtgatgccccactggcctctgccttgcctaggtcatccttcagcagctcctcagagctgtccagcagccacggcccggggttttcaaggcttaatcgaagagatggagctggtggctggaccccacttgtgtcaaataaataccaatggctgcaaattgaccttggagagagaatggaggtcactgctgtcgccacccaaggaggatatgggagctctgactgggtgaccagctacctcctgatgttcagtgatggtgggagaaactggaagca

SEQ ID NO: 62510 - DNA, 640 bp, Homo sapiens
  misc_feature (1)...(640): n = a,t,c or g
tacccgtctcgaattcccgggtcgacgctttcgtggcggcggcggcggcggcagagggagtttccgctttgcactccaccccggtagcagctccgcggcagggacagcttcctccggacgcttggcgggcttcgctctcgccttacgacagcccggtcggatcatggggttgcccagggggccggagggccagggtctcccggaggtggaaacaagagaagatgaagaacaaaatgtcaagttgactgaaattctggagctcttggttgcagctgggtatttcagggcaagaattaaaggcttatcaccctttgacaaggtagtaggaggaatgacttggtgtatcaccacttgcaactttgatgtagatgttgatttgctctttcaagaaaactctacgataggtcaaaaaatagctctgtcagaaaaaattgtctcggtcctgccaaggatgaaatgcccacaccagctggagccccaccagatccaggggatggattttattcacatatttcctgttgttcagtggctggtgaaacgagctatacaaacaaaagaagagatgggtgactatatccgctcctactctgtatcccagntccagaagacttacagtctccctgaggatgatgacttcatg

SEQ ID NO: 62511 - DNA, 447 bp, Homo sapiens
tttcgtgagaatcagagagagagagagtctgtgtctctgggaaagaagaacatctctgcttcacagtgatttgcgctgggggagaggcatcaattggcttcggacccaagggggagacgagaccaggtcaccccggttaagaccaagtgagcgttgcccctccctctcccaactctctacccgggaatgtctcggcgaaagcagcggaaaccccaacagttaatctcggactgcgaaggtcccagcgcgtctgagaacggtgatgctagcgaggaggatcacccccaagtctgtgccaagtgctgcgcacaattcactgacccaactgaattcctcgcccaccagaacgcatgttctactgaccctcctgtaatggtgataattgggggccaggagaaccccaacaactcttcggcctcctctgaaccccggcctgagggtcacaat

SEQ ID NO: 62512 - DNA, 370 bp, Homo sapiens
tttcgtcacaggtcttgggggatagaggtgaccgggccagtgccctggggctctggccatgaagtctcggcagaaaggaaagaagaagggcagcgcaaaggagcgggtttttgggtgcgacttgcaggagcacctgcagcactcaggccaggaggtgccccaggtgctaaagagctgtgcagaatttgtggaggagtatggagtggtggatgggatctaccgcctctcaggggtctcctccaacatccagaagcttcggcaggaatttgagtcagagcggaagccagacctgcgtcgggatgtttacctccaagacattcactgcgtctcctccctgtgcaaggcctatttcagagaactgccggatccc

SEQ ID NO: 62513 - DNA, 1178 bp, Homo sapiens
aattcccgggtcgactctctgtctcctcccctccccccgcgaacttggccgcctccttctgtgacgatggagctcttgaggtaagtagtcctttagcgtcagatgacttcaagcttgctggaaggtctggagtggcgacgccctctccgaagactcgtgggcgcaaaaatgtcaaaacgagccaggccccgactcagagataagagaacgccattctgtccgtggccgatctagctctggactacaattcccagagcccacagcggcctgacgttacgtcgttcttgacgtcgtggcgagctagttagctccgcaaggacccggacgcgaccaggggaggcagaaggactctgcacttgtccaagagaagaatccagagaaatcagagcaggtcaaatagttctaaaagccatggcccagggactggtgacattcagggacgtggccatagagttctctctggaagaatggaagtgcctggaacctgctcagagggacttgtacagggaggtgactctggagaactttggtcacttggcctcactaggactctccatttctaagcctgatgtcgtctccttattggagcaagggaaagagccctggatgattgcaaatgatgtgacaggaccatggtgcccagacttggagtccaggtgtgagaaatttctacaaaaagacatttttgaaatcggggcattcaactgggagataatggaaagccttaaatgcagtgacctggagggctccgattttagagctgactgggaatgcgaaggccagtttgagagacaagtcaatgaagagtgctattttaagcaagtgaacgtcacctatggacatatgcccgtgttccagcatcacacgtctcacactgtacgtcagagcagggagactggtgagaaactgatggaatgtcatgaatgtgggaaagcatttagccgtggctcacaccttattcaacatcagaaaactcacactggtgaaaaaccctttggatgtaaggaatgtgggaaggccttcagccgtgcctcacaccttgttcagcatcagagaattcacacgggtgagaaaccttatgactgtaaggactgtgggaaggcctttggtcgtacatcagaacttattctacatcagagacttcatactggtgtcaaaccttatgaatgtaaagaatg

SEQ ID NO: 62514 - DNA, 471 bp, Homo sapiens
tttcgtacagaagtgcagcggtggcggcggctggttgcgggccggcggcgggctggcggagatggaggatcttgttcaagatggggtggcttcaccagctacccctgggaccgggaaatctaagctggaaacattgcccaaagaagacctcatcaagtttgccaagaaacagatgatgctaatacagaaagctaaatcaaggtgtacagaattggagaaagaaattgaagaactcagatcaaaacctgttactgaaggaactggtgatattattaaggcattaactgaacgtctggatgctcttcttctggaaaaagcagagactgagcaacagtgtctttctctgaaaaaggaaaatataaaaatgaagcaagaggttgaggattctgtaacaaagatgggagatgcacataaggagttgggacaatcacatataaactatgtgaaagaaattgaaaatttgaaaaatga

SEQ ID NO: 62515 - DNA, 546 bp, Homo sapiens
tttcgtattggcgacttgcttccttttgcagaacggccgctcctctctcggtccagctgcgacgctgggaaagcgccagacttggtctgtcacgggagcccccgcggggcgtggcgagggagagctggcctaggctgcgagggactctcgtttcttgcctggagagccaggaagagggcgagggcagagcatccttgggcggagatgcctttaaaaaatcatccaccgcagcggtagaaacagttttgtttggctttatttatacggaatggtttttcagtgaaatgctgtcttgcttaaaagaagagatgcctccccaggagctcacccggcgactggccacagtgatcactcatgtcgatgaaattatgcagcaggaagtcagacccctgatggcggtggagataatagaacaacttcacagacaatttgccattctttcaggaggccgaggggaggatggcgcccccatcatcacgttcccagagttttcggggttcaaacacatcccagatgaagacttcctgaatgtcatgacctacctga

SEQ ID NO: 62516 - DNA, 476 bp, Homo sapiens
tttcgtccagcactgcccatccttgcccctttccactgtccttggagcttcctgggcccttccctgggcctcaggatcccaccctccatcccgtctgccctgcaggatgccgcagctgagcctgtcctggctgggcctcgggcccgtggcagcatccccgtggctgcttctgctgctggttggaggctcctggctcctggcccgcgtcctggcctggacctacaccttctatgacaactgccgccgcctccagtgttttcctcaacccccgaaacagaactggttttggggacaccagggcctggtcactcccacggaagagggcatgaagacattgacccagctggtgaccacatatccccagggctttaagttgtggctgggtcctaccttccccctcctcattttatgccaccctgacattatccggcctatcaccagtgcctcagctgctgtcgcacccaaggatatgattt

SEQ ID NO: 62517 - DNA, 502 bp, Homo sapiens
tttcgtggccgggctgcggctgaggcggcggcggcgccccgcttctgttgaggttgccggggccgcgcgcgctgatctgcgagtgaagagggacgagggaaaagaaacaaagccacagacgcaacttgagactcccgcatcccaaaagaagcaccagatcagcaaaaaaagaagatgggccccccgagcctcgtgctgtgcttgctgtccgcaactgtgttctccctgctgggtggaagctcggccttcctgtcgcaccaccgcctgaaaggcaggtttcagagggaccgcaggaacatccgccccaacatcatcctggtgctgacggacgaccaggatgtggagctgggttccatgcaggtgatgaacaagacccggcgcatcatggagcagggcggggcgcacttcatcaacgccttcgtgaccacacccatgtgctgcccctcacgctcctccatcctcactggcaagtacgtccacaaccacaacacctacatgtatt

SEQ ID NO: 62518 - DNA, 572 bp, Homo sapiens
gcggccgctcctcgcctggctgcagcggcggcagccccagtgctgcccctgtgcggcgcccctttcccgctccgccgcgcactgttgtcatggaggaaccaagtatggcggctctggcctacaacctgggcaagcgggagatcaaccactacttcagcgtgaggagcgccaaggtgctggcgctggtggccgtgctgctgctcgcagcgtgccacctcgcctcccgccgctaccgaggcaatgattcgtgtgaataccttctctcaagtggcagatttcttggagagaaagtttggcaacctcacagttgtatgatgcataaatacaaaatcagtgaagcaaagaactgccttgtagataaacatattgcatttattggagattccagaattcgtcaattgttttattcttttgtaaaaataattaatccccaattcaaagaagaaggaaataagcatgaaaacattccttttgaagacaagactgcatcagttaaagtggattttctgtggcatcctgaagttaatggttctatgaaacagtgtatcaaagtgtggactgaggattccatt

SEQ ID NO: 62519 - DNA, 1228 bp, Homo sapiens
agcggccgcagctcttcatggtctccaggtatcggatgagtgcctcggtcttcaccctgtttccccaccagtaggggactcctggccacagctcgtggtgccggcgcaaggagctctcgtcttcataggagacgatgacctgttggccccgggaccacagctgccgcagtgtcggcacctccccacgaggacacagcatgtccccgaagatgttcttgatacaggcgaccaggtactcgtgcaggtcctcgctcagcccctcgaagtttctgcaggccaggatgaccacctcgcgtggatgccgctccagccactccgagatttccgtgagtgtgtcctccaccagcgccgttgtgtacaccatatggacaaagtgcaggttcttctccgagccctccagcatgtgggctatccgcagatccaggtaccgcaccccggcatccagctgctctgtgacgtccagtgcctgggtgacggaccatttcagcacgacagggcgcgtgatgcagggcaaggccttgttcagcagctgcagcagccgggactcctcgtgcgaaatgggggacttcttgttcaggcagtacgtcatcgtgtcgtggctccctgggatggagaggtggtggaggggcacatcccagagccggggacacagtgccgacatccagtcctcgttggcatttctgcagtgcagcctcgagaagctgttggaagcgctcacctgcccgcccatcagaggtgagccctgggcaaccttgagtcccacacgcagggggagttcggaattcgaattgttggtctcgagcccagaatgaaaggcctggtctccctgggccgcaagaaaggacgagatcctctcggtctgcagctcctggcggctgcccgcgttggcttcacaaggttctgtaataatcctgctgccttctcttccacactgaggccaggcttcccaggtggctgcagattttgttcttatttacatcttcccaaaagccttcctcccagaccctaagccaacaccagctacatgaactcagatcttccctgctgcccggaaggagggagggagggtcccgggagcctgctgggcccaggaggaggagcccattctttatcagcccgggggatgtcagctcagcctctttctccaagagaagcaaccacacctgtaccgcggctccgggtccccaggagggagctggccccttctctgcagccagctggaaaaggc

SEQ ID NO: 62520 - DNA, 678 bp, Homo sapiens
gtctcgaattcccgggtcgacgatttcgttagagagacagctccgcgcagtaagtgcggactgccagccaccagccttggcagccagctcgtcgcctccagccccgaccccgacattcatgcccaggagaaggctgcactgggtccctctgggcctttcctaaaagggagatccctgttcactagatgagttccagaaccatccactaaggctttgtagcccccttccatcagctgaccttcactgcatcccctatcgctcaagatgagtggcttcttcacctcgctggacccccggcgggtgcagtggggagctgcctggtatgcaatgcactccaggatcctacgcaccaaaccagtggagtccatgctagagggaactgggaccaccacggcacatggaactaagctagcccaggtactcaccacagtggacctcatctctcttggcgttggcagctgtgtgggcactggcatgtatgtggtctctggcctggtggccaaggaaatggcaggacctggtgtcattgtgtccttcatcattgcagccgtcgcatccatattatcaggcgtctgctatgcagagtttggagttcgagtccccaagaccacaggatctgcctacacctacagctatgtcactgttggggaatttgtggcatttttcattggctggaac

SEQ ID NO: 62521 - DNA, 700 bp, Homo sapiens
gattgtggcgtgacccggcagcggcttcctccgttcgggcatcgctgtgcctcgggttcgcgccccgagtgagcagtcctggcccggagcgtcggtcctggtaatctgtaggaaaagcgctgcggcccagggggtaaagagagatcagcctctgtggactcggtgcttctcctggcaagtaaaccccaaggaggactgaccagttcttgaatttctataccatggcccttcgatcagtgatgttcagtgatgtatccatagacttctctccagaagagtgggaatacctggacttggaacaaaaggacttgtacagagatgtcatgttggagaactacagcaacttggtctcactgggatgcttcatttctaaaccagatgtgatttcctcattggagcaaggaaaagagccttggaaagttgtgaggaaaggaagaagacaatatccagatgctgcgataaccaaaaggacttcgaagatgaaaatgtcagcattatggcagatgtatgattactggtatggtgaggaaagcaactcccatcatgctttgtaaccagctgcttgctttttttgaatgatacttttcaatagaatagaaagcccactagtcctatcttttatatatacattatatgtatttaaactttcttattgatcaatatttaagtgataagcaatttctcactgtgaaaaatacct

SEQ ID NO: 62522 - DNA, 890 bp, Homo sapiens
gtagtccgctgcggtaccgggccggacaatctgggtcgacgatttcgagctcgtcatgcgcaatgtggcgctgcggcgggcggcagggcctgtgtgtgctgaggcggctgagcggcggacatgcacaccacagagcgtggcgatggaacagtaaccgggcttgtgagagggctctgcagtataaactaggagacaagatccatggattcaccgtaaaccaggtgacatctgttcccgagctgttcctgactgcagtgaagctcacccatgatgacacaggagccaggtatttacacctggccagagaagacacgaataatctgttcagcgtgcagttccgtaccactcccatggacagtactggtgttcctcacattcttgagcataccgtcctttgtgggtctcagaaatatccgtgcagagaccctttcttcaaaatgttgaaccggtccctctccacgttcatgaacgccttcacagctagtgattatactctgtatccattttccacacaaaatcccaaggactttcagaatctcctctcggtgtatttggatgccacctttttcccatgtttacgcgagctggatttctggcaggaaggatggcggctggaacatgagaatccgagcgacccccagacgcccttggtctttaaaggagtcgtctttaatgagatgaagggagcgtttacagacaatgagaggatattctcccagcaccttcagaacagacttcttcctgaccacacgtactcagtggtctccgggggtgacccactgtgcatcccggagcttacatgggagcagcttaagcagtttcatgccactcactatcacccaagcaatgctaggttcttcacgtacggtaattttcccttagaccagcat

SEQ ID NO: 62523 - DNA, 982 bp, Homo sapiens
  misc_feature (1)...(982): n = a,t,c or g
tttcgtcacacacgcacacgcaccctgccactgcagccgccatggatatcagctaacaacacacacccaggcgcgcgcgcgcgttcccactcgcaccacgcaggagtggcccccggcatccctaccctccttccccacccccaccacacccgctcaccagctcggctactgctcgctccggctgccgccgccgccgccgccgacgccaccaccactgcttcctctgctgcggggccacagccttgagtgtcattcaagggacagcacaacctcatccaagctctcctacctctgcccagccgtgcctctcatcctccccattcctcgtccacactccatccaaagaagagggaaagcaccgaatagaggggggcgaaggcaaagtctgctgttcttccccctgggcccccttgctcctccatcctcattctctcaccaccagcccccctaaccccaaggagcccaggaactgaggcgactcgccccactgccatgtccaaaagcttgaaaaagaaaagccactggactagcaaagtccatgagagtgtcattggcaggaacccggagggccagctgggctttgaactgaaggggggcgccgagaatggacagttcccctacctgggggaggtgaagcccggcaaggtggcctatgagagcggcagcaaattggtgtcggaggagctgctgctggaggtgaacgagacccccgtggcggggctcaccatcagggacgtgctggccgtgatcaaacactgcaaggaccccctccggctcaagtgtgtcaagcaaggtgagagcagcggcttgctcagtgttttgccgggcggtgggaccgctcggggcgcagggcaatgaaagggtggccgcgcatgttgaagggggtgtgttgcgcgatgatggggtgggggccagagagcacccgcagtgcaagtgagtttcgccggggattcgacgaaatcgtnncccgggaattccggac

SEQ ID NO: 62524 - DNA, 949 bp, Homo sapiens
tcaggccttgccagcccggccctccagttccttcttcggcctccctcagcttggggtccgggtttcctcctcggctgagcagccgggtccgcgactcccttcaccctccccggcccgggcttccggttctttccagaggtgaggcaggggccacctagatttccgcggccccccacctcccccaagaccaccctcgccccagcttcctgttccccattctgtcctcccaacctgggttaccgattactgcctcgacttcaccttgccgtcagggaccaccagccgcctcttccgcgcctaggggacgcgcagcggcagcctctgctgatggcaagggtctgcgcacccggaaactccagggtctggggcgtggtgcggcccctgcggccagcgggctccgcttgagcttcagggctctttcattgttggactacgtttcccacaggccccagggccgcggatgaacttcgacctttgcttccttttccggtgttgcggttattgagttaagcctggcgagtcgaggtgacccgggccgggctgcgggaggagctcgcggtgaggtggccccgcgctgccgggcgaggtcggtccacgtggagccgggagcctgaggcctctgtacgcgggagctgcggtcgatggtgttctgcaagtgaaggccccctgaagtggaagacagcattggtactaatggccaactcaagtttcattggggatcatgtccatggagctcctcatgctgtcatgccagaagtggaattccctgaccaattctttacagttctaaccatggaccatgaactggtgacactcagggatgtggtcatcaacttctctcaggaggaatgggaatatctggattctgctcagaggaacttgtactgggatgtgatgatggagaactacagcaacttactctcactgggtaaaattatctggcttaaat

SEQ ID NO: 62525 - DNA, 440 bp, Homo sapiens
ccgtgccggaattcccgcgtcgacgatttcgtggctaaggcgccaggcacgggcaccaccagggcgcccaggagccgcccgccgccggcatggaccagctgtactgcccaccgagcgcgtgccagtcttttggtaagaactagtcacacagacctcaacctgatgcgtggagacaaggaaatgcttttcagtgtgtccagaaagagaaaatgcaggtgtcttctgcggaggtgcgcatcgggcccatgagactgacgcaggaccctattcaggttttgctgatctttgcaaaggaagatagtcagagcgatggcttctggtgggcctgcgacagagctggttatagatgcaatattgctcggactccagagtcagcccttgaatgctttcttgataagcatcatgaaattattgtaattgatcatagacaaactcagaac

SEQ ID NO: 62526 - DNA, 1487 bp, Homo sapiens
tttcgtcaatgggtgagagaactcttcacgctgcagtgcccacaccaggttatccagaatctgaatccatcatgatggcccccatttgtctagtggaaaaccaggaagagcagctgacagtgaattcaaaggcattagagattcttgacaagatttctcagcccgtggtggtggtggccattgtagggctataccgcacaggaaaatcctatctcatgaatcgtcttgcaggaaagcgcaatggcttccctctgggctccacggtgcagtctgaaactaagggcatctggatgtggtgtgtgccccacctctctaagccaaaccacaccctggtccttctggacaccgagggcctgggcgatgtagaaaagagtaaccctaagaatgactcgtggatctttgccctggctgtgcttctaagcagcagctttgtctataacagcgtgagcaccatcaaccaccaggccctggagcagctgcactatgtgactgagctagcagagctaatcagggcaaaatcctgccccagacctgatgaagctgaggactccagcgagtttgcgagtttctttccagactttatttggactgttcgggattttaccctggagctaaagttagatggaaaccccatcacagaagatgagtacctggagaatgccttgaagctgattccaggcaagaatcccaaaattcaaaattcaaacatgcctagagagtgtatcaggcatttcttccgaaaacggaagtgctttgtctttgaccggcctacaaatgacaagcaatatttaaatcatatggacgaagtgccagaagaaaatctggaaaggcatttccttatgcaatcagacaacttctgttcttatatcttcacccatgcaaagaccaagaccctgagagagggaatcattgtcactggaaagcggctggggactctggtggtgacttatgtagatgccatcaacagtggagcagtaccttgtctggagaatgcagtgacagcactggcccagcttgagaacccagcggctgtgcagagggcagccgaccactatagccagcagatggcccagcaagtgaggctccccacagacacgctccaggagctgctggacgtgcatgcagcctgtgagagggaagccattgcagtcttcatggagcactccttcaaggatgaaaaccatgaattccagaagaagcttgtggacaccatagagaaaaagaagggagactttgtgctgcagaatgaagaggcatctgccaaatattgccaggctgagcttaagcggctttcagagcacctgacagaaagcattttgagaggaattttctctgttcctggaggacacaatctctacttagaagaaaagaaacaggttgagtgggactataagctagttcccagaaaaggagttaaggcaaacgaggtcctccagaacttcctccagtcacaggtggttggaggatccatccccgtgagaaaagcc

SEQ ID NO: 62527 - DNA, 471 bp, Homo sapiens
ggcacctggccaaattcccgggtcgaccattgcaagctcacccggaacttgctcctcagcggagacaatgagctctacccactcagcccagggaaggacatggagcccaacggcccgtcgctgcccagggatgaagggcccccgaccccaagctctgccacgaaggtgccaccggcagagtacaggctgtgcaacgggtcagacaaggaatgtgtgtcccccaccgccagggtcaccaagaaggagactctcaaggcgcagaaggagaactaccggcaggagaagaagcgcgccacacggcagctgctcagcgctctgacagaccccagcgtggtcatcatggctgacagcctgaagatccgcggcaccctgaagagctggaccaagctgtggtgcgtgcttaagccgggggtgctgctcatttacgagactcccaacgtgggccaatgggtggacaccgggctgctgcac

SEQ ID NO: 62528 - DNA, 756 bp, Homo sapiens
tttcgtggaaaccagcggctggaggccgggggcctggagcggcagggctggcgggcagacgttaggccccaggcaaaatgggcgcaccccctgcgggggcccgaggtgacctgctcgaggtccggtcgcccaggttccacctggagaagaaaatcttcagtccgcgccatggccgcctcgccgggctcgggcagcgccaacccgcggaagttcagtgagaagatcgcgctgcacacgcagagacaggccgaggagacgcgggccttcgagcagctcatgaccgacctcaccctgtcgcgggttcaatttcagaagcttcagcaactgcgccttacacagtaccatggaggatccttaccaaatgtgagccagctgcggagcaatgcgtcagagtttcagccgtcatttcaccaagctgataatgttcggggaacccgccatcacgggctggtggagaggccatccaggaaccgcttccaccccctccaccgaaggtctggggacaagccagggcgacaaatatccttttttactcttcaaagggagtgtgcattctgaaatgtttgaaaagttttcaggatttatcttccctgcaattctcctttggcctcagaatcttcatttatctgatgaaaggaggcaatacaaataaatgagttggaaactagaaacatctctgcagtcaacatttggaaacatcattgtaggtgtttatgaaagcatcaataaagttcagtttaatgaaataacaacaaa

SEQ ID NO: 62529 - DNA, 491 bp, Homo sapiens
tttcgtccgcgccggacgctcgggctgcggaacagggcggcactggccggccacagcgacgccggcgccgagggacaccgcagtatgaggcagagattaacgtgacagtgtcaggtggacccacagccatcccacctccccctctggggagtgctgagagtgaggcagcatggaggagaggaagcatgagaccatgaacccagctcatgtcctctttgaccggtttgtccaggccaccacctgcaagggaaccctcaaggctttccaggagctctgtgaccacctggaactaaagccaaaggactaccgctccttctatcacaagctcaagtccaagcttaactactggaaagccaaagccctctgggcaaaattggacaaacggggcagtcacaaagactacaaaaagggaaaagcgtgcactaacaccaagtgtctcatcattggggctggcccctgtggtctccgtacagccatcgacttatccttac

SEQ ID NO: 62530 - DNA, 446 bp, Homo sapiens
tttcgtgggtccgtgtggcagctttgtgcagggggtgggatggggtcagtagcctgctgtgaagtgccgtccagacggggtgatctgagtccccagcctgggtgatggcaacggggtggcctggctgtctgccctgagccctcaccaggcctctcctggttttcgtgagccaaagagccgctgccattttactttggggagaggcagaaatgtgcctaatgatttccttctcttgctggccttctagggcaagaaagactcctccccgtggacctgccccttccacccaccactccagctgttttttgttattcgaaacacaagacagctgggggacttccatctggccaagatcaaggttcggaattactggacagctgatggccactgcttctcctgcagagtggcatctgttgggaggaagaaaccgatagtctcccttctat

SEQ ID NO: 62531 - DNA, 581 bp, Homo sapiens
tttcgtttggccggctgcgggcacctcctggtctcgctgctggggctgctgctgctgctggcgcgctccggcacccgggcgctggtctgcctgccctgtgacgagtccaagtgcgaggagcccaggaactgcccggggagcatcgtgcagggcgtctgcggctgctgctacacgtgcgccagccagaggaacgagagctgcggcggcaccttcgggatttacggaacctgcgaccgggggctgcgttgtgtcatccgccccccgctcaatggcgactccctcaccgagtacgaagcgggcgtttgcgaagatgagaactggactgatgaccaactgcttggttttaaaccatgcaatgaaaaccttattgctggctgcaatataatcaatgggaaatgtgaatgtaacaccattcgaacctgcagcaatccctttgagtttccaagtcaggatatgtgcctttcagctttaaagagaattgaagaagagaagccagattgctccaaggcccgctgtgaagtccagttctctccacgttgtcctgaagattctgttctgatcgagggttatgctcctcctgg

SEQ ID NO: 62532 - DNA, 2381 bp, Homo sapiens
tcttgagttccagggcggactcggcctgcaaggggtgccttggggcgtggggcccgggatgcacctgcttgggccacggtctcgcttcccacctcttcgctctgggcctcgccggtcagatgccccttcttcgtccgagtcacgatcatcaattttctgtttctgtttccacttctgatagaggtctcgcttgtaggagctgctgatgtagcggccgctctctgtcttaatcttcttcttgtcttcctgtcctgactgtcccacaaaccgcttcttcttacggtcccacttgagctgctgccggcccctcgtcaggttctgggcttcatcccccatcaagtccaggacagcgccagctgcctgctgctcaaaggctcccccttccccgctgatgctcaggccccgctcgctgtcaaagtccttgggccggtaggggatgtagaattcctggtcccgctgccgggcctcctccctccgcctcttggctcccctgttgggtcctgaccgctgccgcttccggcccacgacctctgagaaaatgtcctccacactctctcccgcctcctcctcctcctccttctcaggctgcttctcctgcagtgctgggcggctcggggctgggcccactgggccctcctgctgctcctgccgcccctgctgtccctgctggaagcgggcgatggccttgcggtccttctgccgcttggcgcgcatcacctggctgcacaggtctcggctggaggcgttgatctcaaagatagtcgcccgggagcggtagttctttatgctgtccaccagcctcagccgctgcagctcctcctcctcaaaacgcgagctgaagagggggtgcaggcccagccccacaaggtccatctccttggccctcttgatggactcaggcgagggcgccgggcgtgagcgcacatactgctgctgggcgttatcagcaacgcgggccaggccccgtagctccagcgatgcctccagggtgctctgcagaccactgtcctcctcgtccaccacactctgtggcacccgacccagcatgccatccacaccggccacacctgagggctccttgaggggtcgggcgagggtgagggagcggcccaggaacaggtgcagatccagcaggtaggggatttcatcaggggccaccaaggagtaggctgtgccacttcggccagcccgagccacacggcccacgcggtgcaggaagagtttgcccttggcggggaagctgtagttgatgacattgtccagcagcgggatgtccaggcctcgggcggccaggtcagtcacaatgagagtggagcacttgccaagcgtgaatttggcgagattgatcttgcgggctgtcgggtctagggcactgtagatgtgggcgcagctcacccgctgggtcgtcagcagctcagtgaggtactcggcgtggtgcttcgtggccacaaacaccacggtctggtcctggggccgcaccacgttgtgcagcaggtggagcagcacggcagccttggtgtcctcccgcacgaggaagaaggaggtcttcagctgctcgttgagcttggtatccacgtcaagccggatgagcacgggctccgtgaggccagcccgggcaaattccaccagcagtttgggcagcgtggcggagaacagcaccgtctggtggcccccggggaggcgggcgatgatctcctgcagctgctctgcgaaacccatttcaaaaagccggtcagcttcatcgaacaccacgtattccacactctgcagcttcaggctcatttccacagccacatgcaccaaccgtccgggcgtggcaataattatgtcgggattttcgtgcagggctgcaaactggtcttccatcctgtctccacccaggatcagggcagtcttgaggccagtgaacttgcctagctccttagtgaacttcagggtctgcagggccagctctcgggtcggcgagaggatgagggcgcgggccccggtctgggcactgtgggtcttgagccgctcgaacattgggaggaggaagcaggctgtcttgccactgcccgtccgggccatggccaccacgtccttgccatccaagatcaccgggatggtcttcctctggatgggtgttggcaccttgtaccccttcttcatgatgcctttgaacaccgggtagctcaggcccatggactggaagcctccagacttcttcttcttcttgttctgggcacgcaccatctcccgggtgtccggctccacatccgaggtgcattccgaggtggggaaggtgggcaggggtcttccaggtcccagcttccgggcccgggcgtcatcctccgcctggatctcaaactcgccgtcctccgagtcgctgccgcgggcctggg

SEQ ID NO: 62533 - DNA, 451 bp, Homo sapiens
tttcgtcgcaggcgggcctcgcgggtccgggagcgcggcggagacgatgcctgagatcagagtcacgcccttgggggccggccaggacgtgggccgaagctgcatcctggtctccattgcgggcaagaatgtcatgctggactgtggaatgcacatgggcttcaatgacgaccgacgcttccctgacttctcctacatcacccagaacggccgcctaacagacttcctggactgtgtgatcattagccacttccacctggaccactgcggggcactcccctacttcagcgagatggtgggctacgacggccccatctacatgactcaccccacccaggccatctgccccatcttgctggaggactaccgcaagatcgccgtagacaagaagggcgaggccaacttcttcacctcccagatgatcaaagactgcatgaagaaggtggtggct

SEQ ID NO: 62534 - DNA, 440 bp, Homo sapiens
ttttcgtccggctcggctccttggcgctgcctggggtcctttccgcccggtccccgcttgccagcccccgctgctctgtgccctgtccggccaggcctggagccgacaccaccgccatcatgccggccgtgtccaagggcgatgggatgcgggggctcgcggtgttcatctccgacatccggaactgtaagagcaaagaggcggaaattaagagaatcaacaaggaactggccaacatccgctccaagttcaaaggagacaaagccttggatggctacagtaagaaaaaatatgtgtgtaaactgcttttcatcttcctgcttggccatgacattgactttgggcacatggaggctgtgaatctgttgagttccaataaatacacagagaagcaaataggttacctgttcatttctgtgctggtgaactcgaactcggag

SEQ ID NO: 62535 - DNA, 541 bp, Homo sapiens
ggtattcccgggtcgacgatttcgtcgcggaactccaggtccggccgggagcagaggggcggtggcgagagggaagtgggcgggagccgcgatctgagtagccagcgtcgccggcgaccgcggagttctgggctagtgggaccccgcgcgggctggttcgggatgagcgatggcatcggtcaaggtggccgtgagggtccggcccatgaatcgcagggaaaaggacttggaggccaagttcattattcagatggagaaaagcaaaacgacaatcacaaacttaaagataccagaaggaggcactggggactcaggaagagaacggaccaagaccttcacctatgacttttctttttattctgctgatacaaaaagcccagattacgtttcacaagaaatggttttcaaaaccctcggcacagatgtcgtgaagtctgcatttgaaggttataatgcttgtgtctttgcatatgggcaaactggatctggaaagtcatacactatgatgggaaattctggagattctggcttaatacctcgg

SEQ ID NO: 62536 - DNA, 693 bp, Homo sapiens
tttcgtatggcggccaatgtgggatcgatgtttcaatattggaagcgctttgatttacagcagctgcagagagaactcgatgccaccgcaacggtattggcgaaccggcaggatgaaagtgagcagtccagaaagcggcttatcgaacagagccgggagttcaagaagaacactccagaggtgaggcgcgtgaccatcgtgttcgctttgaagggatcttagaatgctggtgcatgttcaggcgacgctccgtgagcgtttcattttcatcagatgaacgcacggccggcaaacaacccgtttctttccccagatgtcttcagccccatttccagcagaacgcatgccatcctgcaggctgtggggatgtggaaattgataggttgtctggaaatatgaaagtcagagccaattccaggtgcagatactggacaagcttggtctgtaagaacacgtgggcaggtgtgtgggtgtctcaaaccctcgagctcatcccagaccctgtcccatgtcagttagcaagccaccaaagtccataagggatcctgtggggtggaaggtccgcggggcctgcttccctgttgctggtgcaggcggagtgtctgaaggctgcacgcatctgggcatagcagtgcgcctaacgcttcttgtaaaacagacatttcgcctgctaagccttttaaatgcctctct

SEQ ID NO: 62537 - DNA, 562 bp, Homo sapiens
tttcgtggaaagagagaaaccaccgctgcgggtgggtagagaagcacttggcgcctcggggaggggaccgcgcccgcctcatttgcgccttgcagcactgctggaccaggttacaagatgttcacctaagattgagacctagtgactacatttcctacgggaacaaataaatggtttttcatctcccggagatacattacaaacaaatatggtgctaaaagaactccttacctttctctgactacaatttatttggacatacttttgtattgaagagaggtatacatactgaagctacttgctgtactataggagactctgtcctgtaggatcatggaccatcctagtagggaaaaggatgaaagacaacggacaactaaacccatggcacaaaggagtgcacactgctctcgaccatctggctcctcatcgtcctctggggttcttatggtgggacccaacttcagggttggcaagaagataggatgtgggaacttcggagagctcagattaggtgaaggtctcccacaggtgtattactttggaccatgtgggaaatata

SEQ ID NO: 62538 - DNA, 899 bp, Homo sapiens
tttcgtgcgtccccggcccaaccatggcgtcctccgcggccggctgcgtggtgatcgttggcaggaagtctgaaacagcagttggagtgtagtggttaagaggaaggactcaggagtcagattgcttggcttcatctcatagatccataacttatcacccttgtggacttaattcctccatgcctcagtttatcacttatgtaggcttaattcctccatgcctcagtttccctacatataaaatggaaatactaataacacttatcttgtagggttgttgtaaagattaacatagtggagtcattgggcgaagctgggccatgctgtttgccagtggaggcttccaggtgaaactctatgacattgagcaacagcagataaggaatgccctggaaaacatcaggtgggccagccggcgctctccagaaggaatggaagtgggtctgtttctctcagttggtcttgtttgtcatatcctcaaggctatgaggatctgtgatgtcacattttcgtctgatggctactgcagtgcctctgagttggtaaaggccaggcctacagtggctggaatgtgaattcacactggggaagggctcccatgggggaggaaacgacccttcttgctaagaggatctgcatcaagcgtgagtgactttgcaggcttctccagctgtttgccccggggctggagggctggggtttcctgcttccatctaggcaggaggaactcgcttccagcatgtgacagccatagctgcaggggcattacagtttaagaacagaggtcctgcagcttgttttgacctgttgatctagtaatggtaggacccaaatgaaaacatcttgaattttagttagaggtttagcactcatgtgagaggacagaactggagctgttt

SEQ ID NO: 62539 - DNA, 780 bp, Homo sapiens
cggcgcggaaatcccgggtcgacgatttcgtcaggcgccttcacgatgccggcggtttgagtacaagctcagcttcaaaggcccaaggctggcattgcctggggctggaatacccttctggagccatcatggaggacttctctcttctcctctgcctctccttggacccctgcccttcctctacctctgacctgtgaacacacagacacatgctcacacactaagtcccaggcacacagaaggcaatgtggaccagcacaaacctccactctcccggctccatcccagcgggcctgtggctggccatgagaactgggggctacctggagggaagcatcctcatcccagacgccatcctgggcctggaggaagtgcggctgacgccatccatgaggaaccggagtggcgccgtgtggagcagggcctctgtccccttctctgcctgggaagtagaggtgcagatgagggtgacgggactggggcgccggggagcccagggcatggccgtgtggtacacccggggcaggggccatgtaggctctgtccttggggggctggcttcgtgggacggcatcgggatcttctttgactctccggcagaggatactcaggacagtcctgccatccgtgtgctggccagcgacgggcacatcccctctgagcagcctggggatggagctagccaagggctgggctcctgtcattgggacttccggaaccggccacaccccttcagagcacggatcacctactgggggcagaggctgcgcgtgagtcacc

SEQ ID NO: 62540 - DNA, 551 bp, Homo sapiens
gcgtggtaccgctccggaattcacgggtcgacgatttcgtgtcccgggtggggccgaggcagcgggagtcgcggttgctcagcgtgcacctgagacccgacgcccggggtcctcgaagacgcgtccgccgccgtgcccgtcgccatgaaccgcttcagggtgtccaagttccggcacaccgaggctcggccgccccgccgcgagtcctggatcagtgacattcgagcaggaaccgccccttcatgcaggaaccacatcaaatcaagctgcagcttgatcgccttcaactccgaccgtcctggtgtactgggcattgtgcctctgcaaggccaaggagaggacaagcgacgcgtggcccacctgggctgccattcagacctagtcaccgacttggacttctcgccctttgatgacttcctcctggccacaggctcggctgacaggacggtaaaactctggcgactgccagggcctggccaggccctgccctcagcacccggggtggtgctgggccccgaggacctcccagaggaggtactgcagttccaccc

SEQ ID NO: 62541 - DNA, 663 bp, Homo sapiens
tttcgtcacacagacacacacacgcacacgcacacacgggcgcgcacacacacgcgcgtacacactgggtctccaggcagcggccgtcgccgcatccccggcagcagctccaggcaaagtgacagaggacagtgctgctgtgagtttgacgaagtggacatcacctgcagtcagtccagagctgcccagtcttgaatataatcatggccaaaccttatgaatttaactggcagaaggaagttccctcctttttgcaagaaggagcagtttttgacagatacgaggaggaatcctttgtgtttgaacccaactgcctcttcaaagtggatgagtttggcttctttctgacatggagaagtgaaggcaaggaaggacaggtgctagaatgctccctcatcaacagtattcggtcgggagccataccaaaggatcccaaaatcttggctgctcttgaagctgttggaaaatcagaaaatgatctggaagggcggatagtttgtgtctgcagtggcacagatctagtgaacattagttttacctacatggtggctgaaaatccagaagtaactaagcaatgggtagaaggcctgagatcaatcatacacaacttcagggccaacaacgtcagtccaatgacatgcctcaagaaacactggatgaaat

SEQ ID NO: 62542 - DNA, 519 bp, Homo sapiens
ggaattcccgggtcgacgatttcgtctccgcccgcccgaagccgcgcccactgcccagagccagagggatggtggtagtcacggggcgggagccagacagccgtcgtcaggacggtgccatgtccagctctgacgccgaagacgactttctggagccggccacgccgacggccacgcaggcggggcacgcgctgcccctgctgccacaggagtttcctgaggttgttccccttaacatcggaggggctcacttcactacacgcctgtccacactgcggtgctacgaagacaccatgttggcagccatgttcagtgggcggcactacatccccacggactccgagggccggtacttcatcgaccgagatggcacacactttggagatgtgctgaatttcctgcgctcaggggacctcccacccagggagcgtgttcgagctgtgtacaaagaggcccagtactatgccatcgggcccctcctggagcagctggagaacatgccgccactgaaaggcgaga

SEQ ID NO: 62543 - DNA, 447 bp, Homo sapiens
tttcgtcccaggcctgggccacaggctgtccgggaataagtggtgctgtaatccctgctgggcagatggagagaggagcaagggagatggcagccccgggggactgtgcatagggaggtaggtgggcaccagggactcatgaagtggcagctaagccctgtccagtggccacccgtcagccaagggccagagaccaggaaaggaagaaaggcagcttcacttcctctttgaggatggagtcgcacagccgcgctggaaagagcagaaaatctgcaaaatttcggtccatctccaggtccctgatgctctgtaatgctaagaccagtgatgatggctctagccctgatgagaaatatcctgatccctttgagatttccttggcccagggcaaggagggaattttccactcatctgtgcagctggcagacacatcggaggctgggccca

SEQ ID NO: 62544 - DNA, 460 bp, Homo sapiens
tttcgtgcaggggccaggcctctctaggctctccggctgagccgggttggggcccgggttgggccgcccggggactctggagcattgggatttgtagcgcgccctctgggtaggcggctgtagcggagaggcgtgcgggatcgggatgtcggggctgctcacggacccggagcagagagcgcaggagccgcggtaccccggcttcgtgctggggctggatgtgggcagttctgtgatccgctgccacgtctatgaccgggcggcgcgggtctgcggctccagcgtgcagaaggtagaaaatctttatcctcaaattggctgggtagaaattgatcctgatgttctttggattcaatttgttgccgtaataaaagaagcagtcaaagctgcaggaatacagatgaatcaaattgttggtcttggcatttcaacacagagagcaacttttattacgtggaac

SEQ ID NO: 62545 - DNA, 731 bp, Homo sapiens
gagatcaaggagggctcagaagaggcgatgtctgatctgtcctccaggcagcaaaggaaagggaggtgtgttcctggcagaaggcacagcttgtactgaggcctggcagcagaacagagtatgcaatttgtgaagctgtggtgtggctgcagtggagagttcccaacaaggctacgcagaagaacccccttgactgaagcaatggaggggggtccagctgtctgctgccaggatcctcgggcagagctggtagaacgggtggcagccatcgatgtgactcacttggaggaggcagatggtggcccagagcctactagaaacggtgtggaccccccaccacgggccagagctgcctctgtgatccctggcagtacttcaagactgctcccagcccggcctagcctctcagccaggaagctttccctacaggagcggccagcaggaagctatctggaggcgcaggctgggccttatgccacggggcctgccagccacatctccccccgggcctggcggaggcccaccatcgagtcccaccacgtggccatctcagatgcagaggactgcgtgcagctgaaccagtacaagctgcagagtgagattggcaagggtgcctacggtgtggtgaggctggcctacaacgaaagtgaagacagacactatgcaatgaaagtcctttccaaaaagaagttactgaagcagtatggctttccacgtcgccctcccccgaa

SEQ ID NO: 62546 - DNA, 759 bp, Homo sapiens
gtccggaccggacttcccgggtcgacgatttcgtggctgctgctgcgtccgacccccggccggcgcgggtatggagcttgggggtcactgggacatgaactcggccccgaggctggtctcggagaccgcagagcggaaacaggagcagaagacaggaaccgaggcggaggctgccgactccggtgccgtcggagcccgccgcttcctgctctgtctctacttggggggcttcttggatttgtttggtgtcagcatggttgtgcctttattgagccttcatgtcaagtcccttggagcaagtccaacagttgctggaatagtaggctcctcctatggcattttgcaactcttttctagcacattggtgggctgctggagcgatgtagtgggaagacggtcttccttgctggcatgcattctactcagtgctctgggctatctccttctcggagcagccaccaatgtgtttctgtttgtcctggctagagtcccggcaggtatttttaaacacactctctccatctcaagggctctactttctgatgtggttccagagaaggaacggccgcttgtaatcggacacttcaacacagcctccggtgtgggcttcatcttgggccccgtggtcggtggctatctcactgaattagaggatgggttttatctcacagccttcatctgctttttggtcttcattctcaatgctggtctcgtttggttctttccacggagggaagcaaaaccgggcagtacagagaa

SEQ ID NO: 62547 - DNA, 519 bp, Homo sapiens
tttcgtttatgggaagccagtaacactgtggcctactatctcttccgtggtgccatctacatttttgggactcgggaattatgaggtagaggtggaggcggagccggatgtcagaggtcctgaaatagtcaccatgggggaaaatgatccgcctgctgttgaagcccccttctcattccgatcgctttttggccttgatgatttgaaaataagtcctgttgcaccagatgcagatgctgttgctgcacagatcctgtcactgctgccattgaagttttttccaatcatcgtcattgggatcattgcattgatattagcactggccattggtctgggcatccacttcgactgctcagggaagtacagatgtcgctcatcctttaagtgtatcgagctgatagctcgatgtgacggagtctcggattgcaaagacggggaggacgagtaccgctgtgtccgggtgggtggtcagaatgccgcgctccaggtgttcacagctgcttcgcggaagaccatgtg

SEQ ID NO: 62548 - DNA, 544 bp, Homo sapiens
tttcgtgctggaggttcgctagccgaagcggctgcatctggcgccgcgtctgccccgcgtgctcggagcggattctgcccgccgtccccggagccctcggcgccccgctgagcccgcgatcacttcctccctgtgaccaaccggcgctgcaggttagagcctggcaatgccgtttgggtgtgtgactctgggcgacaagaagaactataaccagccatcggaggtgactgacagatatgatttgggacaggtcatcaagactgaggagttttgtgaaatcttccgggccaaggacaagacgacaggcaagctgcacacctgcaagaagttccagaagcgggacggccgcaaggtgcggaaagctgccaagaacgagataggcatcctcaagatggtgaagcatcccaacatcctacagctggtggatgtgtttgtgacccgcaaggagtactttatcttcctggagctgtgagtgtgggtctggggacccaaaattccccagcgcccagggctttcacctgtcccaccctctgcagctaaggag

SEQ ID NO: 62549 - DNA, 469 bp, Homo sapiens
ccggaattcctgggtcgacgatttcgtgggggacaagtcgcggccacctgctccggagctggggagcccgggcgccgtccgcccgcgcgtcggttcgtgtgccccgggccccatggagctgcgggtcagcaacaccagctgcgagaacggttccctgctccacctctactgctcctcccaagaagtcctgtgccagattgtcaatgacctcagccctgaggtgcccagcaatgccacctttcacagctggcaggaaagaatcaggcagaactatggcttctacatcggcctgggcctggcattcctgtctagcttcctcatcggcagcagcgtcatcctcaagaagaaaggcctcttgcgactcgtggccatgggagccactcgagctgtggatggaggcttcggctacctgaaagatgcaatgtggtgggctggatttctcaccatggctgctggagaagttgccaac

SEQ ID NO: 62550 - DNA, 749 bp, Homo sapiens
caacgtcgacgatttcgtgcggggctgtggggagggcacggactgacagacggactccggcggaatggggggtgtggctgctccgccagggtccccagggtgggagagcggctccgcggccaccgatgcccggaccccctctgtcttctgctagacatgctcttcctctcgtttcatgcaggctcttgggaaagctggtgctgctgctgcctgattcccgccgacagaccttgggaccggggccaacactggcagctggagatggcggacacgagatccgtgcacgagactaggtttgaggcggccgtgaaggtgatccagagtttgccgaagaatggttcattccagccaacaaatgaaatgatgcttaaattttatagcttctataagcaggcaactgaaggaccctgtaaactttcaaggcctggattttgggatcctattggaagatataaatgggatgcttggagttcactgggtgatatgaccaaagaggaagccatgattgcatatgttgaagaaatgaaaaagattattgaaactatgccaatgactgagaaagttgaagaattgctgcgtgtcataggtccattttatgaaattgtcgaggacaaaaagagtggcaggagttctgatataacctcagatcttggtaatgttctcacttctactccaaacgccaaaaccgttaatggtaaagctgaaagcagtgacagtggagccgagtctgaggaagaagaggcgtgtgt

SEQ ID NO: 62551 - DNA, 437 bp, Homo sapiens
tttcgtgggcgcggcgctgctctgccgttgggtgaggcgcggagcgaagtgaagggtggcccaggtggggccaggctgactgaaaaagatggatactatgatgctgagtgtgcggaatctgtttgagcagcttgtgcgccgggtggagattctcagtgaaggaaatgaagtccaatttatccagttggcgaaggactttgaggatttccgtaaaaagtggcagaggactgaccatgagctggggaaatacaaggatcttttgatgaaagcagagactgagcgaagtgctctggatgttaagctgaagcatgcacgtaatcaggtggatgtagagatcaaacggagacagagagctgaggctgactgcgaaaagctggaacgacagattcagctgattcgagagatgctcatgtgtgacacatctggcagcattcaac

SEQ ID NO: 62552 - DNA, 1494 bp, Homo sapiens
  misc_feature (1)...(1494): n = a,t,c or g
ttcccgcgtcgacgatttcgtctcagcgcaggagccataccatctgtgactaataaataatagggggacctccgactcccccctgttgccttattaccttccgaccacctctcggacctcttgcccagcccttccccgtagacatcaccccagatacggtggtgacaccattgctatgggcccacgtagggcgcagtgcgagccagggcaggacgcacttggtacgacccacgccgcgccccgcgccgccggaagtgaggtgtctgacccccgaagttccggttcgcagtgggtggggagtgttgttaaccggaggggcagccgcagtcgcgcggattgagcgggctcgcggcgctgggttcctggtctccgggccagggcaatgttccgcacggcagtgatgatggcggccagcctggcgctgaccggggctgtggtggctcacgcctactacctcaaacaccagttctaccccactgtggtgtacctgaccaagtccagccccagcatggcagtcctgtacatccaggcctttgtccttgtcttccttctgggcaaggtgatgggcaaggtgttctttgggcaactgagggcagcagagatggagcaccttctggaacgttcctggtacgccgtcacagagacttgtctggccttcaccgtttttcgggatgacttcagcccccgctttgttgcactcttcactcttcttctcttcctcaaatgtttccactggctggctgaggaccgtgtggactttatggaacgcagccccaacatctcctggctctttcactgccgcattgtctctcttatgttcctcctgggcatcctggacttcctcttcgtcagccacgcctatcacagcatcctgacccgtggggcctctgtgcagctggtgtttggctttgagtatgccatcctgatgacgatggtgctcaccatcttcatcaagtatgtgctgcactccgtggacctccagagtgagaacccctgggacaacaaggctgtgtacatgctctacacagagctgtttacaggcttcatcaaggttctgctgtgcatggccttcatgaccatcatgatcaaggtgcacaccttcccactctttgccatccggcccatgtacctggccatgagacagttcaagaaagctgtgacagatgccatcatgtctcgccgagccatccgcaacatgaacaccctgtatccagatgccaccccagaggagctccaggcaatggacaatgtctgcatcatctgccgagaagagatggtgactggtgccaagagactgccctgcaaccacattttccataccagctgcctgcgctcctggttccagcggcagcagacctgccccacctgccgtatggatgtccttcgtgcatcgccgccagcgcagtcaccaccacccccggagcctaaggatcagaggccaccccctgccccatgtattcgnccgctcgganntccccncaacgtactgaacaa

SEQ ID NO: 62553 - DNA, 584 bp, Homo sapiens
acaccacatgctttgacctggatctttgacccaggatggagggtggaagtcaggggtgagggcaggggcctgcctgcagtgagtgggccatgaacaatggacggacaaatgatcagtgaacagctgaaagacgccctgcgctcctccaagcaggcgaactgtatttaggggatccgtggcacagacatctcaaatacccagagctgggagtgtgggtggcagcttcccactttgaaacccccaatgtggtggcttacctgggcccgccgatagtactgctttgtgatggtctggtatctctcctgccctgcagtgtcccagatctgtatccgcactttgatgccgtctacctctatggtcttcatcttaaagtcaacaccgatggtggagatgtgcgaggagtggaactcgttgtcggtgaagcggcacagcaggcaggtcttgcccaccccggagtccccgatcagcagcagccggaacagcacatcgtactgcttcgccatgactggggccagcggggccgggaactgcgggcgggcagcgggctcaacgaaatagtcgacacgggaattccggacagggac

SEQ ID NO: 62554 - DNA, 493 bp, Homo sapiens
gtccggaatacccgggtcgacgatttcgtggcgccgagtgcgggcggctgggagcgcgctgagcgggggagaggcgctgccgcacggccggccacaggaccacctccccggagaatagggcctctttatggcatgtggctggtaactttcctcctgctcctggactctttacacaaagcccgccctgaagatgttggcaccagcctctactttgtaaatgactccttgcagcaggtgaccttttccagctccgtgggggtggtggtgccctgcccggccgcgggctcccccagcgcggcccttcgatggtacctggccacaggggacgacatctacgacgtgccgcacatccggcacgtccacgccaacgggacgctgcagctctaccccttctccccctccgccttcaatagctttatccacgacaatgactacttctgcaccgcggagaacgctgccggcaagatccggagccccaacattcgcgttaaat

SEQ ID NO: 62555 - DNA, 556 bp, Homo sapiens
tttcgtgctttaaggggcggacgggcgggaggtcggggtcctccggggattcgagccggtgggctcgttgtgggcgccatttctcggcgtctaccgaggagccgcccctttctcagccttgctcggctcttccccgctctggtcgccggggctgcgccgtccccagctcagtgacaaaaatgctgagtttcttccgtagaacactagggcgtcggtctatgcgtaaacatgcagagaaggaacgactccgagaagcacaacgcgccgccacacatattcctgcagctggagattctaagtccatcatcacgtgtcgggtgtcccttctggatggtactgatgttagtgtggacttgccaaaaaaagccaaaggacaagagttgtttgatcagattatgtaccacctggacctgattgaaagcgactattttggtctgagatttatggattcagcacaagtagcacattggttggatggtacaaaaagcatcaaaaagcaagtaaaaattggttcaccctattgtctgcatcttcgagttaagttttattcctcaga

SEQ ID NO: 62556 - DNA, 2249 bp, Homo sapiens
tttcgtaggaaagctgggacgggccgggaccacaggagccccagccccacacagcaaccacccgggcgagaaagaaagaaagagccagggaggcgggcgaagcgcggggagagaagcagagaagaaatattcaccttcccgcctcatgcccactttgaggcacttcttgaggcggcagtattggcactggttgcggtggtgctggtcgatgggacagttcctgttggcacggcatgtcaggtagatgaaactcaagagaaaaggtgtggataaatgaaactagcccatgatgaacctgttttctccgtgaccacaatattaaccaggatgaatggcggtggcagtgggcctgcatcacaggttgcagcagatgttctcaatatttctattaaaatttccttatttccatatgcaagaggagccccagagctgcatccttatggtagctaccatgccgtgatgtaagctgccattcactggggagctttggcaatagaattggctagatcaggaagcctatgtcaactatggaacaacaacttgcagctcatctctattgatgatacactgcctctaggactgggacagatagccactgagtacctgcttcaaatcaccctgcacgttttctctttggaaagataagcactggagaaccatctcgttaccttcagcagaaatggaaacaaatcaagacattaagaatgccgcagtggacagcagttatgcaaggttcagcagaggaagttttcaagatggtgtgcctcactagccagaaatcagaaaagatcgaagctagccttttcatctcagctgctccttaaatcagtgcaacccctccaaattaatgtgaattgaaacttgcattgcttttcaacttaattgaatacttactatatgtgaaccactgcacaaaatatggggaagaagatgtgggagacaaagatgtggagcctgtcttcaataaatttacagttagtttcagggtacattgtttttcttctgctgttaattaggtgtatccccaagacaataaatacatgaatggaaaagtatattctgtgttttaagtctctttaataaaaaacaaaacaaaatccaaaaaaactcctaacatggcaactcaggacattttaatccttttttttgttgttgggcttctgataggatccattttattgattccataaatatttagtagactttagacatattaatacattgtagtttgagttaatttgcattaaattctgtttttttccccttaggtatagattgtctgttggaaaaatatattgcttgtggatttcttggggagtgggaaggtgaattatacctgttgtctctacagtccactaccttccacaccctagggcagtggtccccaaccttcttggcaccagggatcagtttcctggaagacaatttttctgtggatggtgtggggatggttttgggatggaactgttccacctcagatcatcaggcattagttaggctctcataacgagtgcgcagcctagatccctcacatgcacagttcacagtagggtttgcgctgctatgagaatctaaggctgccactgatctgacaggaggcagaactcaggtggcaatgcttactggcccactgctcacctcttgctgtgcggcctggttcctaataggccatggacccccacagacgggtactagtctgcagcctgtggaccccagccctaggggcctgccattctgagtgagttattagcatgaagaagaggaagatctggatcaaacgtgggtgatggtactcagagacccaagataggatagggatggaacaaaatccatctgggcaacggctctatgaaaatttggctaagtaattatttcagtattcattgtattcattgtccttcgtgttccataagttaaatgactgtctaatttttccaaaaatttatttctgacttgagaataagtgtgtcatgattttcccagtgtaaagacactgatataactgtagataccagacattttatgtagtgtctatgacacattttagtatgtatgagccaacaatagacatgtctttgtcttgaggagtgtccgatctgaattgaaaatgtgtcagcttttttttaacatcatcaacagacttcttaattaagctgccaatacatactgccaatacactgtgtgctgtctgagaaatgcattgtgtaagtgctatttccatcttattaaataaacgaatgttgctctgt

SEQ ID NO: 62557 - DNA, 685 bp, Homo sapiens
tttcgtgccgggtcctgcgcctcgggggtcggcgtccaggctcggagcgcggcacggagacggcggcagcgctggactaggtggcaggccctgcatcatggaaactctttctaatgcaagtggtacttttgccatacgccttttaaagatactgtgtcaagataacccttcgcacaacgtgttctgttctcctgtgagcatctcctctgccctggccatggttctcctaggggcaaagggaaacaccgcaacccagatggcccaggtaagcttgcccgtccgccaggagcagggactggcctgggctgcgtgttctgtcaccagcttcacactcacactccagagccactgagaaaggagggcaggactggggcccgagtgtgcactggccgtttcagggaggcggggtccactggggaagaagtggggcagggcagggaggcaggaactctgctccaccgagatttatttgggggaaactttcctcggttaatcccttggaaaagaccatccaagctgtcttgtcctagcgcagaatctttctttagaaaatgacactgaaattatttgaaacataagttgcaaagaactacctcttttttggagcaagagactttgtaactaaactttcattggtaaggaaggttaatacctgtttcaagttgtttctgtaccaacagctcag

SEQ ID NO: 62558 - DNA, 646 bp, Homo sapiens
tttcgtgtagcggttgagctgctgctgctacggatatctgacagaagccttcggtggttgtcggcctaatgagcggacggcaaagaacgctttttcagacgtggggctcaagtatctcccgatcatctgggactccgggttgcagctccggaactgagcgacctcagagccctggcagctccaaggcgcctttgccagcagcagcggaggctcagctggagtcggacgatgatgtgttgcttgtcgcggcgtacgaggctgagcggcagttgtgtctagagaatggcgggttctgcacctccgcgggcgccctgtggatttaccctaccaattgcccagtgcgggactaccagctgcacatttcccgggctgctctgttttgcaatacgctggtgtgtctgcctaccggactgggaaagacctttattgccgccgtggtcatgtacaatttctaccgctggttcccttcaggaaaggtggtcttcatggccccaacgaaacccttggtgacacagcagatcgaggcttgctaccaggtgatgggtatcccgcaatcccacatggccgaaatgacagggtctacacaagcttccaccaggaaggaaatatggtgcagtaagagagtgctttttcttacacctcaggt

SEQ ID NO: 62559 - DNA, 644 bp, Homo sapiens
ttggatttatttgtaggagaggctcctgagcgctaggtccgcactgtggtgactgaacccagaagtcggggagcagttgtcctccgctgcacagaggctactctggagctctgtgacggcgcccagcgtgacccactcctgggccaggatacggaccgtcgtgcccatatctcctggctggtcgccctatcctcccgactctgcttaaaaccacgtggttcgatggctgccgcggctacgctgaggctctccgctcagggcacagtgacttttgaagatgtggctgtgaactttacctgggaggaatggaatctccttagtgaggctcagagatgcctgtaccgtgatgtgacgctggagaacctggcacttatatcctccctggatcctgcactggatggatcagcggacaacacacagaccggtaatctgggtcaatcagttctgccatcccacccagaacagaaaacagcatgaaaaactcactttaaccccctatgaatccatctccaaccagactgatcagcactccccacttcccaagcccctacccgccaaattttgaaaactctgatcccagaatgctcagggagactgatttgaataataaaactcctgtctcccgaacagcaaaaaaaaaaaaa

SEQ ID NO: 62560 - DNA, 422 bp, Homo sapiens
gtcggtgagaatccagggagaggagcggaaacagaagaggggcagaagaccggggcacttgtgggttgcagagcccctcagccatgttgggagccaagccacactggctaccaggtcccctacacagtcccgggctgcccttggttctggtgcttctggccctgggggccgggtgggcccaggaggggtcagagcccgtcctgctggagggggagtgcctggtggtctgtgagcctggccgagctgctgcaggggggcccgggggagcagccctgggagaggcaccccctgggcgagtggcatttgctgcggtccgaagccaccaccatgagccagcaggggaaaccggcaatggcaccagtggggccatctacttcgaccaggtcctggtgaacgagggcggtggctttgaccgggcctct

SEQ ID NO: 62561 - DNA, 873 bp, Homo sapiens
aattcccgggtcgacgatttcgtgcggaagcggaagtgaacgaggcggctgtggcggtggctggggcggctgggcctagggtgcagcgggcgcgtctgcggctggtgttggcgcatctctaggttgctagaacacatcacgtccaagcagaaagctacctggtgtacaacatcatgagcagtggagagattgaatgcagcaacaccctagaagatgagcttgaccaggccttacccagccaggccttcatttaccgtcccattcgacagcgggtctactcactcttactggaggactgtcaagatgtcaccagcacctgcctagctgtcaaggagtggtttgtgtatcctgggaacccactgaggcacccggacctcgtcaggccgctgcagatgaccattccagggggaacgcctagtttgaaaatattatggctgaaccaagagccagaaatacaggttcggcgcttggacacactcctagcctgtttcaatctttcctcctcaagagaagagctgcaggctgtcgaaagcccatttcaagctttgtgctgcctcttgatctacctctttgtccaggtggacacgctttgcctggaggatttgcatgcgtttattgcgcaggccttgtgcctccaaggaaaatccacctcgcagcttgtaaatctacagcctgattacatcaaccccagagccgtgcagctgggctcccttctcgtccgcggcctcaccactctggttttagtcaacagcgcatgtggcttcccctggaagacgagtgatttcatgccctggaatgtatttgacgggaagctttttcatcagaagtacttgcaatctgaaaagggttatgctgtggaggctcttttagaac

SEQ ID NO: 62562 - DNA, 442 bp, Homo sapiens
tttcgtggccggcagaggcccggctccggtggctccagctttcctcccactctggctccccaggggctgctctggaattctctcggtgcccgccgttgccatgcactcggccggaactcccagagccgagtcccccatgagcaggcaggagaaggacgcagagctggatcggaggatagttgccctgcgcatgaagaaccaggccttgctccgcaggtaccaggagatccaggaggaccgtcggcaggcagagcagggggggatggctgtgaccacaccagcactcctccagcctgatggcctcaccgttaccatcagccaggttcccggtgaaaagcgggtggttagcaggaactgggcaaggggtacctgtggacccagagtgaccaacgagatgcttgaggatgaggatgctgaggaccacggcggtactttctgctta

SEQ ID NO: 62563 - DNA, 752 bp, Homo sapiens
gatttcgtagcggctgaggcggctgcgggagcggagtggtcgcccagcgcgcggggggacgcgggctgcactcccgggcaggcgctctgcaatgagacagtaaatgcatcccccggtgctgcaggaggcttctcacatgctttgggatatcttcagggaaatacgctcttaatagaaactgagaatttaagaaagtctgcctggcggaggacacctgcacttgttaccctgagttgattcctgaaacttcggacccctgggtattaacagaggactcagtgggagctcctggtcagaggacttggatgttgtcattacattctaagtgagactgtccacatcatctaggaaaatggtggccctgtccttaaagatttgtgtgcgccactgcaacgtggtgaagaccatgcagtttgaaccatctacagctgtgtacgatgcgtgtcgagtcattcgggaacgggtgcctgaggcacaaactgggcaagcttctgactatggactctttctatcggatgaagacccaaggaaagggatttggctggaagcgggcagaacactggattactacatgttgcggaatggggatattttggtatataaaaagaaacagagtcctcagaaaatccggatgctggatggatctgtgaaggcagtgatggtggatgattccaagactgtgggggagctcctggtcactatttgtagcagaataggaatagcaaattatgaagaatgctccttaatccaag

SEQ ID NO: 62564 - DNA, 474 bp, Homo sapiens
gacgatttcgtgcggcggcggctgccgtagtttcagtataaacaaggaacccgactggttagacagattttgtttttcttcttcccgcgcgctttagctccctgtcctttggtcgcatttgtgggcgcgcggcacgcagccgggaggccgaggactcggagttcacctgcaggaaagtatgcctcagactcctcccttttcagcaatgtttgacagcagtggttacaatcgaaacctctatcagtctgcagaggacagctgtggagggttgtattaccatgacaacaacctcctctctggatccctggaagcactcatccagcacttagtacctaatgtggattactatccagatagaacatacatatttaccttcctactcagttctcggttatttatgcatccgtatgagctaatggccaaagtttgccacttatgtgttgagcaccagagactaagtgatcctgatagtga

SEQ ID NO: 62565 - DNA, 561 bp, Homo sapiens
gagctcagggccggtggcagtaggccgggaacatggcggggcagcccgcggccaccggctcgccgtctgccgacaaggacggaatggagcccaacgtcgtggctcggatctcgcagtgggcagacgaccacctgcgcctagtccggaacatcagcactggaatggccatagctggaataatgttacttttgagaagcattcgactgacatcaaaatttacaagctcttcggatattccagtagaatttataagaagaaatgttaaactacgtggacgattacgccgaataactgagaatggtttagaaattgaacatatacctattactttacctattatagcttcattgagaaaagagccacgtggtgctttgctggttaagttggctggagtagaactcgctgaaactgggaaggcatggttacaaaaagagctaaaaccttcccaattactatggttccaacttcttggaaaggagaattcagcactcttttgctatcttctggtgaataagggtggatatttcagcgtgaatctgaatgaagacattttgagaagag

SEQ ID NO: 62566 - DNA, 548 bp, Homo sapiens
cggcccggtattctcgggtcgaccatttctgccgccgccgctgccgcgcggtggcccgtgcgcctcggttccttttgcaatttccgtcgggccccagccgccattttctcgccgcttgtgtggctcgctggctgcgtggctcggttcttgtgagcgaagctttgtccggttcggcaatggacggaatcgtcactgaggttgcagttggcgtgaagagaggatctgacgaactactctcaggcagtgttctcagtagtccgaactctaatatgagcagcatggtagttacagccaatggtaatgatagtaaaaaatttaaaggagaagataaaatggatggtgctccttctcgtgtacttcatattcgaaaattacctggggaagtaacagaaactgaagttattgctttaggcttaccttttggtaaggtgaccaacatccttatgctgaaaggaaaaaatcaggcatttttggaactagcaaccgaggaagcagctattactaatggtaattactattctgctgtgacacctcatcttcgtaaccaa

SEQ ID NO: 62567 - DNA, 1151 bp, Homo sapiens
tttcgttcggaattgtgggcgactcggctaatggcgtcggcgagtcttaggggcctggggagctggcgctgaagcttcttgccaggttggctggtgacacccggtgtggctgggccccgcggcagcggagggacctgcccgccttgtgggtttctcggccagagtcggcggagcctagcgggacggtgcgactgcggggggcgcctccgagaaaagccagaggtgttgcggggaagctgctgggggacgctcgagcaggctccgggttcgcagcccagggcccaagaagcgggctgctgaaggaccagagacaccgggagggagctgcctgtggccctaaggagctgaccgtgccagagcttgtttgtacctctcggaaattggctgggaccttggaggatcatgtccggcaccagcagccccgaggcggtgaagaagctgctggagaatatgcagagcgacttgcgcgccttgtcactggagtgcaagaagaaattcccacctgtcaaagaggctgctgaatcaggaataataaaagttaaaacaattgctgcacgaaacactgaaattttggcagcactgaaagagaacagctcagagggtgtacagccttttttaatgggttgtggaaccaaggaaccgaagatcactcagctatgtttggctgctattcagagactcatgtcacatgaagtcgtgtctgagactgcagctggaaatataattaacatgctttggcagctaatggagaatagtcttgaagaacttaagctacttcaaacagttcttgttcttttaacaaccaatacagtagttcatgatgaggcactttctaaggtaggaaaactgtttgccagagttcatatgtgctttgagacagtatttgaataagctggctgaaagagaaaagcttggtgccatttgaaccaaaagcaacttccctacagctatggtgatgattgacattgcatgttaataactgttggtaccttattttttccaggttagagttgaaatcacgttggggtgcttaagcaaagccccttgggtacagccaacaggctgagttgtgaataggaaatggaaaaaagagagaaagtagcccaagagtaagaatagggaaggagggaactaagaaaaaaaaaacatgt

SEQ ID NO: 62568 - DNA, 523 bp, Homo sapiens
tttcgtccgggcttgaggtcgcccagacgtcggaggagccgggtcacgaggctggagcttcctgcttgcagagtgcggcggggaggcgcggcccgggaacgcgggatcctggggagatctgccttctggagactgcgccgtcctcccgggagagccagaaagaggacatggctgctgggcagcgggaagcgaggccccaggtgtcactgacattcgaggacgtggctgtgctctttacctgggatgagtggagaaagctggctccttctcagagaaacttgtaccgggatgtgatgctggagaactataggaacctggtctcactgggactctcatttaccaaaccaaaagtcatctccctgttgcagcaaggagaagatccctgggaggtggagaaagacagttctggtgtctcctctctaggatgtaagagcacacctaaaatgacaaagtcaactcaaactcaggattcatttcaggagcagataaggaaaagattgaaaagggatgaaccctggaactt

SEQ ID NO: 62569 - DNA, 932 bp, Homo sapiens
cttccgggtcgacccacgcgtccgaggggggattggagggacctctgcggagctggcagttcccggttctactgtcctggcgcacccagcccttctctgtaccaggccgggagagggaggcggcgccgcacagcctcgggtgcagtctgagaagtttgggagtgacttgaagagtgactggaagcaccccagacccggtttgtccggtcacagccgggtccttacgtgagttaggagaggagtgggggtcggacgggagccccactgagagtaagggcgcgcgtttgttcacagaacgtcgggacctggttccctctttaatcacacccccgggggcgcttcgtgtgaggttccacgggggaaggcgagaggcgcaggctgccacacacgcactgtttggaagaggggaagcattgccccccctgcaccacctcaccaagatggctactttgggacacacattccccttctatgctggccccaagccaaccttcccgatggacaccactttggccagcatcatcatgatctttctgactgcactggccacgttcatcgtcatcctgcctggcattcggggaaagacgaggctgttctggctgcttcgggtggtgaccagcttattcatcggggctgcaatcctggctgtgaatttcagttctgagtggtctgtgggccaggtcagcaccaacacatcatacaaggccttcagttctgagtggatcagcgctgatattgggctgcaggtcgggctgggtggagtcaacatcacactcacagggacccccgtgcagcagctgaatgagaccatcaattacaacgaggagttcacctggcgcctgggtgagaactatgctgaggagtatgcaaaggctctggagaaggggctgccagaccctgtgttgtacctagctgagaagttcactccagag

SEQ ID NO: 62570 - DNA, 850 bp, Homo sapiens
caggcctttgtgtaaggccagaggaggatcacgggtgccataaaccttcacggggccaagggctggtgtcccggggctggtgacttaacaggcagagatgtggagaccaggtgcttgtgcccgggacgggcctggctgccatcctgaggacactgcccatgttccatgacgaggagcacgcccgagcccgcggcctctctgaggacaccctggtgctacccccggccagccgcaaccagaggattctctacaccgtgctggagtgccagcccctcttcgactccagtgacatgaccatcgctgagtgggtttgccttgcccagaccatcaagaggcactacgagcagtaccacggctttgtggtcatccacggcaccgacaccatggcctttgctgcctcgatgctgtccttcatgctggagaacctgcagaagactgtcatcctcactggggcccaggtgcccatccatgccctgtggagcgacggccgtgagaacctgctgggggcactgctcatggctggccagtatgtgatcccagaggtctgccttttcttccagaatcagctgtttcggggcaaccgggcaaccaaggtagacgctcggaggttcgcagctttctgctccccgaacctgctgcctctggccacagtgggtgctgacatcacaatcaacagggagctggtgcggaaggtggacgggaaggctgggctggtggtgcacagcagcatggagcaggacgtgggcctgctgcgcctctaccctgggatccctgccgccctggttcgggccttcttgcagcctcccctgaagggcgtggtcatggagaccttcggttcagggaacggacc

SEQ ID NO: 62571 - DNA, 790 bp, Homo sapiens
gtccagcgccgaggaattcccttggcttccctctgtcacacgttattgagaacctagcttcccttggcccactttctggctacacagctccttgagggcgggactatgatgttgttctcccttacttctggatctcctctgagcataaatttcatgagaattatggagacactgttctcagcagaatcagaggaggtggggctggcgtgatgggtccagctgcaggggtgggaggagtggggaggaggggaagggccctgaccatagtctctaaaagtggggccctttggagggcagctgtgctcatctgtctgtctacacccacaatcaggtcttgaggctgtctgggcaggaaggcagggggagagctttcccacgtgctcagtcacactcctctcccactcctgaccacacctttgccagggtcaggagtggaagagcaggaatcccactgccgggccacaatgaccccagctctcctcttccagatagagccacgaaccccctgaacaaggagctcgactgggccagcatcaacggcttctgcgagcagctcaacgaggactttgaggggtaggtggccgtccccacttgtttgcactgccctgcactctccagaacccagtctcgggtacaatggcctgggtgggtggagacccggttttcattctgaacgtattcacaaagtgatgaggatggggcacttggcactgaatgctgtttgggtgtcactctctggggtgggccttgctggaaccatttaacaggtaaagaaatcaaggctcagagg

SEQ ID NO: 62572 - DNA, 932 bp, Homo sapiens
gtggaggaattcccatccttccaccatactgcacaatttatgttattatggcacattctagtttgaggagaaggactgtttacaaagttgtaggcaggagcccctgagctagtaacagttaggaaaggaacgttaccacccctagactgctagaggtgaggggaggaaacagttactggaaaatgaggagagagtgccatggagatttgctttttccttgggggacaaggcagtcccttgagaaggacctaagaggataaataccctgattttagtcacctctttcacttccatcccctgccggagcatcccattggctgatccaacaggaagcaatgggtgacagagacaaggccatccagctttagacccggggccctcgcactttaggaggccacagagctccccgctcacatgtctagtatgtggccttcatttgtagtcatgtcctgtcccacaaagatgagggtcaggctttcatagaggtcagctgcctggagcccgcagcagggtggagaatggcaaagggactccaagaggccaaggagagatgtatagcccatcatgcatcttcaggtctgctagagcaaaccctgagggctgctttagagagggttatcaagggagacttcttggaggaggtggtttctgactgacttgaatgccaggactgtttgccctgccccctgccatctctccttcccagatggtgctccaagaggcagcttgtggacctggtgatggaaggggtgtggcaggagctgctggacagcgcccagattgagatctgtgtggctgactggtggggcgctcgagagaactgcggctgcgtctaccagctccgggtccgccttctggatgtgtatgaaaaggaagtggtcaagttctcagcctcacctgacccggtccttcagtggactgagaggggctgg

SEQ ID NO: 62573 - DNA, 977 bp, Homo sapiens
  misc_feature (1)...(977): n = a,t,c or g
agtgtggtggaattcgtgggtagcacttacagtcatcattgctcatgttcacagcagccctgtaggtttgtgctatattgatcttcatttttaaagaggtgcagaaaggtactgggctgctgggggatcccaagtgagcagagtctgttttctaccctcgaggagcccagagataaggaaatagataattactgtgtgatgagactccagacagaggctaggagtgggttctgggcgcctaataggttcccagtaaacatctgtcgaatgactgcggtggacggggacaggggaggaagcagtcgggagacgtgccggtgccacttccatccctccctggaggcccttgtgcttctgctccaggattggcaaccaggaggggttggcatctgcacatccttcctgggcatctcgtgggcactgctcgactaccaccgggccttgcgcacctgcctcccctccaagccgctcctgggcctgggctcctccgtgatctacttcctgtggaacctgctgctgctgtggccccgagtcctggctgtggccctgttctcagccctcttccccagctatgtggccctgcacttcctgggcctgtggctggtactgctgctctgggtctggcttcagggcacagacttcatgccggaccccagctccgagtggctgtaccgggtgacggtggccaccatcctctatttctcctggttcaacgtggctgagggccgcacccgaggccgggccatcatccacttcgccttcctcctgagtgacagcattctcctggtggccacctgggtgactcatagctcctggctgcccagcgggattccactgcagctgtggctgcctgtgggatgcggctgcttctttctgggcctggctctgcggcttgtgtactaccactggctgcaccctagctgctgctggaagcccgaccctgaccaggtagacggngcccggagtctgctttctcc

SEQ ID NO: 62574 - DNA, 740 bp, Homo sapiens
gcggccgcgctcgaggggcgcgcggctgcagcggcggcggcgccgcgcgtgaggggccgcctaaggccgagcgggcgcggcgagcggccgggcgagcgcagccaacatgtcggataccaaggtaaaagttgccgtccgggtccggcccatgaaccgacgagaactggaactgaacaccaagtgcgtggtggagatggaagggaatcaaacggtcctgcaccctcctccttctaacaccaaacagggagaaaggaaacctcccaaggtatttgcctttgattattgcttttggtccatggatgaatctaacactacaaaatacgctggtcaagaagtggttttcaagtgccttggggaaggaattcttgaaaaagcctttcaggggtataatgcgtgtatttttgcatatggacagacaggttcgggaaaatccttttccatgatgggccatgctgagcagctgggccttattccaaggctctgctgtgctttatttaaaaggatctctttggagcaaaatgagtcacagacctttaaagttgaagtgtcctatatggaaatttataatgagaaagttcgggatcttttagaccccaaagggagtagacagtctcttaaagttcgagaacataaagttttgggaccatatgtacatggtttatctcaactagctgtcactagttttgaggatattgagtcattgatgtctgagggaaataagtctcgaacggtagctgcta

SEQ ID NO: 62575 - DNA, 794 bp, Homo sapiens
cggatagtcttcgaacaagaccacgccaagcttggcacgagggcggggacgcggcgggacagcgacatggccggccacactcagcagccgagcgggcgcgggaaccccaggcctgcgccctcgccctccccagtcccagggaccgtccccggcgcctcggagcgggtggcgctcaagaaggagatcgggctgctgagcgcctgcaccatcatcatcgggaacatcatcggctcgggcatcttcatctcgcccaagggggtcctggagcactcaggctccgtgggtctggccctgttcgtctgggtcctgggtgggggcgtgacggctctgggctccctctgctatgcagagctgggagtcgccatccccaagtctggcggggactacgcctacgtcacagagatcttcgggggcctggctggctttctgctgctctggagcgccgtcctcatcatgtaccccaccagccttgctgtcatctccatgaccttctccaactacgtgctgcagcccgtgttccccaactgcatcccccccaccacagcctcccgggtgctgtccatggcctgcctgatgctcctgacatgggtgaacagctccagtgtgcgctgggccacgcgcatccaggacatgttcacaggcgggaagctgctggccttgtccctcatcatcggcgtgggccttctccagatcttccaaggacacttcgaggagctgaggcccagcaatgcctttgctttctggatgacgccctccgtgggacacctggccctggccttcctccagggctcctt

SEQ ID NO: 62576 - DNA, 1030 bp, Homo sapiens
ttttttttttttacttgtaatacgtattttaatttttgtttcatatgagtttaagtgttgtctaggtgacatcaaaatctaaggcaaacagacttgaccatcttcagacccactgcattctcaagctgaagtggtctgctcatagtttgtgtgccaggttgctcatcagtattgatactgtcccagaacaggttgtaggtataattcagagactgtcctttgcaaaggaaatgaccagcatttcaactgtatgtcttcctggaagggtagattctgctatatcttctttgtctgcatcaaaagactcaagaggaatgtggacacatttcatatcccatttgtagagtaaagcttcaagtgaccagtcagcactcctaacttgataagtagaccacaattggaccttgggattcttgtgcatcaaaaaatatattgtagccaaaatgtcttcaaaatcttctggttcaaagaacacatcagatgcaaggataatatcttgtggtggtagagccagaagatcccaagatatatgaccccatgttagtcctaccacctgcagatgtggcaggttattcatttggcagctttgccgacagacttccagacagtgaggcagttctgagctgtctgacagtattacttctgcaccacatttggcagccaaaattcctggaaggctcactccagctccaatctgcgggacgtggacctccaggacagccccgtcggcccccggacccggctcctccgagaatcgaaagcgctgggcccggaccccctgtcctcggaaatcgtgctcgcccagtagggcgtcgttgggccccgggcgggcgggggaccgcggaaggctccgggctgccagactgcgcgagcgggaagccgcgggccacgtggccgtagcacctgacggcaagaaggggaaagcccagatctggtgataaccctgccgcgctgcgagcgaagaaagcccggagcaaggcgaaagagactcacacgcgcagaactggcaacgggcggctggcctcgtgcc

SEQ ID NO: 62577 - DNA, 1040 bp, Homo sapiens
tccgtgtggcggaattcccctaccggattcacaagcacagggcagtttaactgatgggcttcccctggaaacagcactacaagagccattggaaagtagcatccctgggagtgatggaagggatggggtagataatagatccatgagaagatccctttcctccagcaaaccacacctaaaaccagctctgggtatgaatggcgccaaagcccgcagccacagcttcagtacacactcaggagacaagccttctacgccccccatcgaagggtcaggcaaagtccgcactcagatcattaccaataccgccgagagaggcaattctcttacccggcagaactcttccacggaaagctctcccaacaaggccccttctgctcccatgttggagagtctccccagtgttgggaggccctcggggcacccctcctccgggaagggctccctggggagctcaggcagcttcagcagtcagcatgggagcccaagtaagttgcctttgaggatccctccaaagtctgagggactcctcatcccacctggaaaggaagaccagcaggccttcacccagggagagtgccccagtgccaatgtggctgtacttggggaaccaggcagtgaccgccgcagttgcccacccaccccaacagactgccctgaagccctgcagagcccagggaggactcagcatccaagcacttttgaaacaagcagtacatccaagctagaaacttctggaaggcatccagatgcctctgcaaccgcgactgatgctgtgagttcagaagcccccctctcacccacaatcgaagaaaaggtcatgttgtgcattcaggaaaatgtggaaaagggccaagtgcaaacaaagcccacctctgtggaagcaaagcagaagcctgggccttcttttgccagctggtttggttttcggaagagtagacttccagctctgagtagcaggaaaatggacatctccaaaaccaaagtagaaaagaaagatgcaaaagtcttggggtttggaaacagacaactaaaatcag

SEQ ID NO: 62578 - DNA, 479 bp, Homo sapiens
cagcctgaagagtacacgccgacggacagacagacagtgcagtcacccataaagtagaaagcactactaacagcactggagggtgtagtgtttcctactttatggatgagtgtactgtgggcttcggagatcacgccactgctgccgcccgctgcccgccaccatcttcctcggcgctcggggacctcgtgtgacaggtgagcaccttacggcccctccctaccctgcccagatgcctgaaaggcctccatggctttcctgcccttcctggttccggacagctggggaaaggccacagcagctcctctgctgccctgcagtctttgggggcggggagggctggacatgtggaaccctgatgcagccgcagcgtcaaggacgaggaaggggtgggaagggatggtacgtggaggggaatgggtggtgggaccagggacccaatgctaataaagactggactgtgcttcgcaaaaaaaaaa

SEQ ID NO: 62579 - DNA, 1009 bp, Homo sapiens
cggtggaattcccgcagcaggggctaacaggggtggggcggggcgggggcactgaacggagctccccggggcgctgcggggcgtggtgtggggccggcccgcagactcctccgcagagctcgcttctcccgcagcatcaccgcgtagagagcggcgggcccgggacctcggcagcctcggccaggaggaagccgcgggcggaggatcagacggaaagcagttgtgagagccacaggaaaagcaagaaggagaagaagaaaaagaaaaagaggaaacacaagaaagagaagaagaagaaagacaaagagcacaggcggccagctgaggccacctcctctcccacatctcctgagaggcccaggcaccaccaccatgactccgactccaactccccctgctgtaagaggaggaagcggggacacagtggggacaggaggagcccgtctcgcaggtggcatgacagaggctctgaggcctgatggctggaccctgctcactgctgttgtgggaccctgaaccctcccttcaccttgcttgcctcctgcctcggaagctccttgggtgtgggtgaagcccgaggctgctcctgtggaagtggctctgggcaccagcctgtggggctaaagacttgacagctagctctggagcagccggcttcctggaaaacctccaggtttcgcataccagggatggcccctggcttggcctgcgaaggtgaacctgcccagatttatcagtagaggctggactccctctgtgtcctgcccatggttgcagcagccatgggcctatgagcggtctaactgtggccaagtatggtgacctctatttttctttatattgactctttgtatttcaataaatatattttaaaaggaaaaaaaaaaacaaaaaaaaaaaaggggggggccccttttaaagaacccttggggggcccaaatttaacggggaatggaaaggaaaaagttttccccttttggggggtgatttaaaaccctagcttgggaac

SEQ ID NO: 62580 - DNA, 954 bp, Homo sapiens
ctctgtggaatccggcgtaatgtttctgcacgcctacccgctcattcaggaagccagcctcgccattagggagtcttttctcaccctgaccaagttttcccactggcttcttcattgtatggcattcagattgcagatcatcagttgagacaagccaccaagattgcttcagcacctgaaaaactcgggcgagatccacggccacagacctccaggataagccaggagcaggtccctgaggcctcacagctctcccagctgacttcaaatctggcccaggtgaatcggacaaatatgactccctcagaccccctgcagacctcgctgtctccagaacttgtttccactcctgttcctccccctcctcccggggaggagaccaatctggaagcatcttcctccgatgagcagcctgcgtccctcacaatagcccacgtcaagccaagcatcatgaagaggaatgggagctttccaaagtactatgcctgccacctgtgtggacggcgcttcactctccggagcagcttacgtgaacacctccagatccacacaggagtacctttcacatctagccaacagggagaaagtcgcgtccccctgactctctgtagcaatgcagctgacctcgggaaagatgccatggaagtgcctgaagccgggatgataagtgacagtgagctgcagcacatctctgattctcccatcatcgatgggcagcagcagtcggaaaccccacccccctcagacattgctgacattgacaacctggagcaggccgaccaggagagggaggtgaagaggcggaagtacgagtgcacaatatgtggacgcaaatttatccagaaaagccactggagggaacacatgtacatacacaccgggaagcctttcaagtgcagcacttgtgacaaaagcttttgcagggccaaccaggctgcccgccacgtgtgccta

SEQ ID NO: 62581 - DNA, 567 bp, Homo sapiens
ctgggccgagtggagttgggtggtgtcgggagcctctccctgaggggcaccgcgttcttcaggagctgggcctccagtgcggcgcgatgtcaggcgcggtgacagctctgtgagtccgaggccgcggccgtggcgctgggcggctgcggggcctgaccggtccgctcatggtgccgccacgacgccatcgcggggcaggaaggccaggggtgctgagttcttcacctccttttagactgagatctgccaagttttccggcattgctcttgaggatctcagaagggctcttaagacaagactgcaaatggtgtgtgtatttgtcatgaaccgaatgaattcccagaacagtggtttcactcagcgcaggcgaatggctcttgggattgttattcttctgcttgttgatgtgatatgggttgcttcctctgaacttacttcgtatgtttttacccagtacaacaaaccattcttcagcacctttgcaaaaacatctatgtttgttttgtaccttttgggctttattatttggaagccatggagacaacagtgtacaagaggacttcgcg

SEQ ID NO: 62582 - DNA, 622 bp, Homo sapiens
ttttttttttttgtgttgataaagctttatttataaacacactcacagggccagatttgggccacgggccatagttgccagcccggctttaactgctggtcctcacgttagtctcactgcctcctgcagggtgggcatgtgggtgtcgtgttcacccagccccttcctccaccccacaaacaccctggtggctgtcctggagcgcgacacactgggcatccgtgaggtgcggctgttcaatgccgttgtccgctggtccgaggccgagtgtcagcggcagcagctgcaggtgacgccagagaacaggcggaaggttctgggcaaggccctgggcctcattcgcttcccgctcatgaccatcgaggagttcgctgcaggtaacagagctcgggctcaggggctggtttgggaggggagtggcacacaggtgggcatctgggtaccgaggatagtgcccccgagttcactgcggaaagcctggcagatgcctggcatatacagataggaagaaacctggcttgtgaggacgcgtccacagggccatctgttagccccggcccggctctgtccccaccgtgcacactgccagaccccgcctctcgtgtctgtccagctgttttgg

SEQ ID NO: 62583 - DNA, 991 bp, Homo sapiens
attggaatgaggcatccagtttagcaacagcagagatgacgactctgcgattctgagagtccctggcgagcccgggctagcgaaaagtgggggcagaacgaactacatctcccatcgtgccaggaggcggtcccgcccgtttccccctgggagttgtagtctaaccccctcggatccaacagcaacctcagtgcgtgaactctgttatccagaaggcctcgccctgccgccgccgaagctggaattcgtcggctagtagttctcgccggcaactagaggaacctgttggcgtggcccagaaggcttagcgggattgcacgagccctcagattcatcgctaccccgaggctaagcgccatgcctcatattgacaacgatgtgaaactggacttcaaggatgtccttttgaggcccaaacgcagtacccttaagtctcgaagtgaggtggatctcacaagatccttttcatttcggaactcaaagcagacatactctggggttcccatcattgctgccaatatggatactgtgggcacctttgagatggccaaggttctctgtaagttctctctcttcactgctgtccataagcactatagcctcgttcagtggcaagagtttgctggccagaatcctgactgtcttgagcatctggctgccagctcaggcacaggctcttctgactttgagcagctggaacagatcctggaagctattccccaggtgaagtatatatgcctggatgtggcaaatggctactctgaacactttgttgaatttgtaaaagatgtacggaagcgcttcccccagcacaccatcatggcagggaatgtggtaacaggagagatggtagaaaagctcatcctttctggggctgacatcatcaaagtgggaattgggccaggctctgtgtgtactactcggaagaaaactggagtggggtatccacagctcagcgcaatgatggagtgtgcagatgctgctcatggcc

SEQ ID NO: 62584 - DNA, 1057 bp, Homo sapiens
ttttttttcatgtttcaagatttattgagtgggtgagaggacaatggtccatagcacagaaaaagtcaacaggaacaaattcttggttttcagaagtcacaccaggaggaggcgggaggacacggaggatggccactggatggcctggcctagatggaagaaaacctgtcttcctgggccatggcactctgtggcactggcagggcagagccagctgaagggtcttcaactctggatcccaagtccccagagccacagggcttttcctctgcccacccacgctgagggaaaagtcgaataatgttgtgctgagacaataggggcaagaaggtccggccatgagtcacagggtgacatcactcgtcactcttggtctgtgatcaacccccaaacaatcatgaggaggcccctccaggggagctgggaccccaggtcattgtcctgagaggctcagtgcctgcacctcttggggtttcctctaacagtttccagacccaaggcagcatccctcaaggatactgaggtctagcatgttcccaacatgacaactcccatgcctctgcacacagtggactatccagggacatcctcacaccgcggacagtgggagcccctcagggagtgcagatcagggtgctgcaggaaaaatgggggcgctggctggtgcggaaccagcaaagccatccaagggagagctgtcatctgtctccaggatagccgcacagcccacgaggcccgccagtctctttcccgaggacacgcgaaacccgaggggcccaccccggcagaggggacggaccactgcaccagcggctgggcctgacgtccagccggctcttcccactcccctcggggcctcagtttccccttttgtcggggaggaggtacacagcaccggccttgggaggccaccaggggttcttgggaagaccactcctcgggccctgcccctcattgactcatccggagcgccaggacggatggcggcgggtacaggggtaaccgcgcggaggaggctgaggggcaggccgcagccacaagacgcgaattgcacctc

SEQ ID NO: 62585 - DNA, 1332 bp, Homo sapiens
agaccccgcgggccagcgccgcgaccccttcccagcgctcctcgcgctgtgtgcggcgcgtcctctcgccggtgacccggtgtgcgtggggtcgaggcgccgggcggagtggctccgggccgaaacgccatgcggaggggcgagcgcagggacgccggaggtccgcggcccgagtccccggtgcccgcgggcagggcctcgctggaggagccgcctgacgggccgtctgccggccaagccaccgggccgggcgagggccgccgcagcaccgagtccgaggtctacgacgacggcaccaacaccttcttctggcgagcccacaccttaaccgtgctcttcatcctcacctgtacgcttggctatgtgacgctgctggaggaaacacctcaggacacggcctacaacaccaagagaggtattgtggccagtattttggttttcttatgttttggagtcacacaagctaaagacgggccattttccagacctcatccagcttactggaggttttggctctgcgtgagtgtggtctacgagctgtttctcatctttatactcttccagactgtccaggacggccggcagtttctaaagtatgttgaccccaagctgggagtcccactgccagagagagactacgggggaaactgcctcatctacgacccagacaatgagactgacccctttcacaacatctgggacaagttggatggctttgttcccgcgcactttcttggctggtacctgaagaccctgatgatccgagactggtggatgtgcatgatcatcagcgtgatgttcgagttcctggagtacagcctggagcaccagctgcccaacttcagcgagtgctggtgggatcactggatcatggacgtgctcgtctgcaacgggctgggcatctactgcggcatgaagacccttgagtggctgtccctgaagacgtacaagtggcagggcctctggaacattccgacctacaagggcaagatgaagaggatcgccttccagttcacgccgtacagctgggttcgcttcgagtggaagccggcctccagcctgcgtcgctggctggccgtgtgcggcatcatcctggtgttcctgttggcagaactgaacacgttctacctgaagtttgtgctgtggatgcccccggagcactacctggtcctcctgcggctcgtcttcttcgtgaacgtgggtggcgtggccatgcgtgagatctacgacttcatggatgacccgaagccccacaagaagctgggcccgcaggcctggctggtggcggccatcacggccacggagctgctcatcgtggtgaagtacgacccc

SEQ ID NO: 62586 - DNA, 579 bp, Homo sapiens
gtccagtgcggtggaattcctctccgcatcaaagtcatctccatgggcaacgccgaagtggggaaaagctgtattataaagcgatactgtgagaaaagattcgtgtctaaatacctggcaacaattggaattgactatggagtcacaaaggtacacgtcagagacagagaaatcaaagttaacatctttgatatggctggacatcccttcttctatgaggttcgaaatgagttttacaaggacacacagggtgtgatactggtctatgatgttgggcagaaagactcctttgacgcccttgatgcgtggctggcagaaatgaagcaagagcttggacctcatggaaacatggaaaatattatatttgtagtttgtgccaacaagattgattgtaccaaacatcgctgtgtagatgaaagtgaaggacgtctttgggctgaaagcaaagggttcctgtactttgaaacttcagcacaaactggagaaggcattaatgagatgttccagaccttttatatatccatagttgatttatgtgaaaatggcgggaaacgcctaccaccaatagcagtgctagtt

SEQ ID NO: 62587 - DNA, 963 bp, Homo sapiens
ggctggcctctggaaaaagcatataactatgtaaagcagaagcgcagcatcacgcgccccaacgcgggctttatgaggcagctgtctgagtatgaaggcatcttggatgcaagcaaacagcggcacaacaagctgtggcgtcagcagacagacagcagcctccagcagcctgtggatgaccctgcaggacctggcgacttcttgccagagaccccagatggcaccccggaaagccagctgcccttcttggatgatgccgcccagcccggcttagggccccccctcccctgctgtttccggcgactctcagacccccttctgccttcccctgaggatgaaactggcagcttggtccaccctggaggatccggagagggaggctctgttggaggaagctgctccccctgcagaggtgcacaggccggccagacagccccagcaaggttccggactctgtgagaaggatgtgaagaagaaactagagtttgggagtcccaaaggtcggagcggctccttgctgcaggtggaggagacggaaagggaggagggcctgggagcagggaggtgggggcagcttccaacccagctcgatcaaaacctgctcaactcggagaacctaaacaacaacagcaagaggagctgtcccaacggcatggaggtaggcagagcccggcctgcagggtggcacaccccatcccttccatcccactctaattggcctacctcagcctctgtagtagggactacaggcacccgccaccacacccagctgatttttttctattgtctcctctgggcccccagctcccatctccagggacctgagggttctttcacagggtgattctgctggtgggtacgtagtgcataccttatatagcaaattgagaatctgttgggaataacacatatctctgcacaccatcttcaccccatgtaccttattcataccctggacagggc

SEQ ID NO: 62588 - DNA, 798 bp, Homo sapiens
cccgtgtcgagccttccctccctccccacccttttccctccccaactgcagagccaaccctgtgtggctggatcccttctgtcggaacctggagctggccgcccaggcggagcatgaggatgacctaccggagaacctgagtgagatcgccgacctgtggaacagccccacgcgcacccatggaacttttgggcgtgagccagcagctgtcaagcctgatgatgaccgatacctgcgggctgccatccaggagtatgacaacattgccaagctgggccagatcattcgtgaggggccaatcaagctgatacagactgagctggacgaggagccaggagaccacagcccagggcagggtagcctgcgcttccgccacaagccaccagtggagctcaaggggcccgatgggatccatgtggtgcacggcagcacgggcacgctgctggccaccgacctcaacagcctgcccgaggaagaccagaagggcctgggccgctcgctggagacgctgaccgctgccgaggccactgccttcgagcgcaacgcccgcacagaatccgccaaatccacacccctgcacaaacttcgcgacgtgatcatggagacccccctggagatcacagagctgtgactagacagggaagccttgtgggtgtgagcagcacccatccaccgtcccctcccagggagcaagggcagggacagggccggtcgggggggaccctccaaggccaggccttggggacaaccttagctttgccctggcagcccgcatcagctgctcagatcccacttttg

SEQ ID NO: 62589 - DNA, 1956 bp, Homo sapiens
aaactccgaacacatccaaacatcagaaggaacaaactccagacacaccgcctttaagaactgttacgctcaccgcgagggtccacggcttcattctccaagtcagaccaagaacccaccaattccggacacaaaaggcgtagcgtgcctcctgtgattgttgaagagctgtggtgtgctgctgagtggcgtgtgtattccatgtgaggggaagggtccaacagtcctggtcattcagactgcagttccccaggacagacccacgaagtcaagcatgcggagtgcagccaagccctggaacccagccatcagagcagggggccacggcccagaccgggtgcggcctctgcctgcagcctcttccggcatgaagagttctaagtcttcaacttccttggcttttgagtcccgactcagcaggctcaagagggccagcagtgaggacacgctcaacaagccaggaagtaccgctgcatcgggggtggttcgcctgaagaagaccgccactgccggagccatctcggagctcacggagagccgcctgaggagcggcacaggggcctttacaacaactaaacggacaggcattccagccccacgggaattttcagtaactgtctcaagagagaggtctgtgccacgtggtccctccaaccccaggaaatcagtgtccagtccaacttcctccaacactcccactcctacgaaacacctgaggaccccttccacaaagcccaagcaagagaatgaaggtggagaaaaggctgcgcttgagtcccaagttcgggaacttttggcagaagccaaagcaaaagatagtgaaattaacaggcttcgaagtgaactaaagaaatacaaagagaaaaggactctgaacgctgaggggactgatgctttgggcccaaatgtcgatggaacatcagtctccccaggtgacacggaacctatgataagagctcttgaggagaagaacaagaactttcagaaagagctttccgatctagaggaagaaaaccgggtcctgaaggagaaactgatctatcttgagcactccccaaattcagaaggggcagcaagtcacactggcgacagcagctgcccaacatccataactcaagagtcaagcttcggaagcccaactggaaatcagttgtccagtgacattgatgagtataaaaaaaacatacatggaaatgcattacggacatcaggctcctcaagtagcgatgttaccaaagcttctttgtcgccagatgcttccgactttgagcacattacagcagagacaccctcaaggcccctgtcctccaccagtaacccctttaagagttcaaagtgttctactgctgggagttccccaaacagcgtaagtgaattgtccctggcttccctcacagagaagatacaaaagatggaagaaaaccaccatagcactgcagaagaactacaggctactctacaagaattatcagaccagcaacaaatggtacaggaattgacagctgaaaatgagaagctggtggatgaaaagacgattttagagacatcctttcatcagcatcgagagagggcagagcagctaagtcaagaaaatgagaagctgatgaatcttttacaagagcgagtaaagaatgaagagcccaccactcaggaaggaaaaattattgaactggagcagaagtgcacaggtattcttgaacagggccgctttgaaagagagaagctactcaacattcagcagcagttgacctgtagcttgcggaaggttgaggaagaaaaccaaggagctttagaaatgattaaacgtctgaaggaagaaaatgaaaaactgaatgagtttctagaactggaacggcataataataacatgatggccaaaactttggaagagtgtagagttaccttggaagggctaaaaatggagaatggatctttgaagtctcatttgcagggtga

SEQ ID NO: 62590 - DNA, 813 bp, Homo sapiens
aaccgggagctctgggccaggggatccaagggccttggggtggggaaggctggccaggagcagcaatgtctgtgcaggtagcggctcctggaagtgcagggctgggcccagagcgcctgagccctgaggagctggtgcggcagacgcggcaagtggtccaggggctggaggcgctgcgggcagagcaccatggcctggctgggcacctggcggaggccctggcgggacagggcccggcagccggcttggagatgctggaggaaaagcagcaggtggtgagccactcgctggaggccatcgagctggggctgggcgaggcccaggtgctgctggccctgtcggcacatgtgggtgcactggaggcagagaagcagcggctgcgctcgcaggcccggcggctggcccaggagaacgtgtggctgcgggaggaactggaggagacgcagcggcggcttcgggccagcgaggagtccgtggcccagctggaggaggagaagcgccacctggagttcctggggcagctgcgacagtacgacccaccggcggagagccaggtgccacgggcagggcgaggcggggggtgctgggcccttcatagagccccacagtcccccagaccctccttagaatcccacagtccccaagatcctccttagaatcccacagtcccccagaccctccttagaatcccacagtccccaagatcctccttagaatcccacagtcccccagaccctccttagaatgccacagtcccccaaccctccacagagcccccagacccaccagaacttccacagacgcccccactag

SEQ ID NO: 62591 - DNA, 777 bp, Homo sapiens
ctctccgggtctacccacgcgtccgcccacgcgtccggtcggcgtgtcgagtggctcttcctggctgctgaggcgggttaaggtctgagggtcttgtggggccacggcgctgatcaccaggtgtttggcttggtcggttcttatttctcgcctggcaatggcgacgtacacctgcataacttgccgggtggcgttccgcgacgcggacatgcagcgggcccactataagacggactggcaccgctacaacctgcggcggaaggtggccagcatggccccagtgaccgccgagggcttccaggagcgagtgcgggcgcagcgggccgtcgcggaggaggagagcaagggctcggccacctactgcaccgtttgcagtaagaagtttgcctctttcaacgcctacgagaaccacctcaagtcccggcgtcacgttgagctggagaagaaggccgtgcaggcagtgaatcggaaagtggagatgatgaatgaaaagaacttggagaaaggactgggcgtggacagtgtggacaaggatgccatgaacgcggccatccagcaggccatcaaggcccagccgtccatgtctcccaagaaggcgcccccagcgcctgcaaaggaggccaggaatgtcgtggccgtgggtactggtggccgtgggacccacgaccgagacccgagtgagaaaccaccccggctccagtggtttgaacagcaggcgaagaagttggcaaagcattctgaggacgacagcgaggatgaggaacatgatctgtgtgg

SEQ ID NO: 62592 - DNA, 474 bp, Homo sapiens
gcgactccctcgctcgccctcactgccggcggtcccaactccaggcaccatgttccccgcgggcccccccagccacagcctcctccggctccccctgctgcagttgctgctactggtggtgcaggccgtggggagggggctgggccgcgccagcccggccgggggccccctggaagatgtggtcatcgagaggtaccacatccccagggcctgtccccgggaagtgcagatgggggattttgtgcgctaccactacaacggcacttttgaagatggcaagaagtttgattcaagctatgatcgcaacaccttggtggccatcgtggtgggtgtggggcgcctcatcactggcatggaccgaggcctcatgggcatgtgtgtcaacgagcggcgacgcctcattgtgcctccccacctgggctatgggagcatcggcctggcggggctcattccaccggatgccaccctctactt

SEQ ID NO: 62593 - DNA, 753 bp, Homo sapiens
ctcttcaaccaggagccgagatttctgttgctctgaagccatccaggggtctttaaccagaagagagaggagagcctcaggagttaggaccagaagaagccagggaagcagtgcaatggcttcaaaaatcttgcttaacgtacaagaggaggtgacctgtcccatctgcctggagctgttgacagaacccttgagtctagactgtggccacagcctctgccgagcctgcatcactgtgagcaacaaggaggcagtgaccagcatgggaggaaaaagcagctgtcctgtgtgtggtatcagttactcatttgaacatctacaggctaatcagcatctggccaacatagtggagagactcaaggaggtcaagttgagcccagacaatgggaagaagagagatctctgtgatcatcatggagagaaactcctactcttctgtaaggaggataggaaagtcatttgctggctttgtgagcggtctcaggagcaccgtggtcaccacacagtcctcacggaggaagtattcaaggaatgtcaggagaaactccaggcagtcctcaagaggctgaagaaggaagaggaggaagctgagaagctggaagctgacatcagagaagagaaaacttcctggaagtatcaggtacaaactgagagacaaaggatacaaacagaatttgatcagcttagaagcatcctaaataatgaggagcagagagagctgcaaagattggaagaagaagaaaagaagacgct

SEQ ID NO: 62594 - DNA, 722 bp, Homo sapiens
ccgcgaattcccgggtcgagcacagtacccttccactgctccactggctcgttgccttccttccagccgtgttgaatgcggcagcccacgatgttcctacgagtgaggaaagtgggcttgcgccgttgcttcctgtgggtgtgccttttcttcatcaggtatgcggacacgccatctacccccatcggaggcacggttggaggagacatagctcagggattaagagggcttggggaaagctgctgccctggtcgattaaactgacaaaaagtcaacactatgcaatatgatatatatattttttgcgatctcaaagacctggtctgtgctcccttctccaagtgcaaggctctcaccaaggttttggcagaaacgctcgaactctaaccgtgagcactgggacagcgtgtgcctctccacagtgctttcctctctcgccctagaagggttactgcagcagtggcggctgacgtagagatggcgggctcgcgagtgctgttcgtgccttgcgtccgccccaaccccgaccccaagtccccgaatcggccacttagctgttgtcgatgctggtgcggctgcggcacggcggcagaggagacgacggggacgaaaggcaaggagtaagagggatggctgcagcggcaaaggcgcaggcggcggcaagtctctggggagtccgcgcggccacgaaatcgtcgacccggaaattccggagcggtgcc

SEQ ID NO: 62595 - DNA, 616 bp, Homo sapiens
gccgccaccgccgaaaccgtcgacctcctgggccttagttccgcgtccagccccgcggcagcatggactacctgacgacgttcaccgagaagagtgggcgccttctgcggggcacggccaaccgcctgttggggttcgggggcggcggcgaagcccggcaggtgcgcttcgaagattacctgagggagccagcccagggggacctcgggtgcgggtccccgccccaccggcccccggcgccgtccagcccggagggacctgacactggccaaaagaagaccctagacaagaaagatggaagacgaatgtcttttcagaaacctaaagggactattgagtatactgttgaatcaagggattctttgaatagcatagccctgaagtttgatacaacacctaacgaacttgttcaattaaataagttattctcccgagcagttgttactggacaggttctgtatgttcctgatcctgaatatgtctccagtgttgagagctctccatctctaagccccgtaagtcctctgtcaccaacatcatctgaggctgaatttgataagaccactaatcctgatgtccatccaacagaagcaactccctcatctactttcactgg

SEQ ID NO: 62596 - DNA, 734 bp, Homo sapiens
gcgctctcatcctgccctccggcccctctgcagctatgaggtcctccgtctctcggcaaacatactccacagaagggggcttcagctccaactctgccagcggagggagtgggtcccaggcccgcaccagcttcagctcagtgacggtgtctcggagcagtggcagtggtggcggggcccactgtggccccggcacaggtggctttggcagccgaagcctctataacttggggggccacaagagtatctctgtcagtgtggccggaggggccttgttggggcgggctctggggggctttggctttggcagcagggcatttatgggacagggggctggcaggcagacgtttgggcctgcttgtcctcctggggggatccaggaggtcactgtcaaccagagcctgctgacccccctccatgtggagattgaccccgagatccagcgagtgcgcactcaggagcgggagcagatcaagaccctcaacaacaagttcgcctccttcatcgacaaggtgcggttcctggagcaacagaataaggtgctggagaccaagtgggcactgctgcaggagcagggccagaacttgggtgtcaccaggaacaacctggagcccctctttgaggcctacctgggtagcatgcggagcacgctggacagacttcagagcgagcgggggaggctggactcagagctcaggaacgtgcaggaccttgtggaggacttcaagaacaag

SEQ ID NO: 62597 - DNA, 1153 bp, Homo sapiens
tgcggggccgcgcccgagtcttgggctaaggtttgcctcggccgcccggcgctctttgttcccgcggtggcgaggaggcgcggtctcagctcgcggagccgccggcccgctgcccggcagatggcctcgctctctcgctccctccctttttgccgagacgcaggtgaaatgatgtcacccaggagaacgcggaacccggtcgaaagggtcctctctggcgtccttctgcttccgtgggtttctggataggctgcgttttgttctcaggggatgcaagttcttcctttcagggttgaagcgtgagagagagtgaagatagtccaagtcctaagagacagcgcctctctcattcagtctttgattatacatcagcatcaccagctccctcaccaccaatgcgaccatgggagatgacatcaaataggcagcccccttcagttcgaccaagccaacatcacttctcaggggaacgatgcaacacacctgcacgcaacagaagaagtcctcctgtcaggcgccagagaggaagaagggatcgtctgtctcgacataattccattagtcaagatgaaaactatcaccatctcccttacgcacagcagcaagcaatagaggagcctcgagccttccaccctccgaatgtatctccccgtctgctacatcctgctgctcatccaccccagcagaatgcagtcatggttgacatacatgatcagctccatcaaggaacagtccctgtttcttacacagtaacaacagtggcaccacatgggattccactctgcacaggccagcacatccctgcttgtagtacacagcaggtcccaggatgctctgtggttttcagtggacagcacctccctgtctgtagtgtgcctcctccaatgcttcaggcatgttcagttcagcacttaccagtaccatatgctgcattcccaccccttatttctagtgatccatttcttatacatcctcctcacctttctccccatcatcctcctcatttgccaccaccaggccagtttgtccctttccaaacacagcaatcacgatcgcctctgcaaaggatagaaaatgaagtggaactcttaggagaacatcttccaggagcccacccccagcacccccatctgttaataaatatctcaactcc

SEQ ID NO: 62598 - DNA, 424 bp, Homo sapiens
ctctaccccttggagactgcttttctccagctctgtcaactcaacctttcccaccatgagtcggcaactgaacatcaagtccagtggtgacaagggcaacttcagtgtgcattcggcagtggtgccaaggaaggctgtgggtagcctggcttcttactgtgcagctggcagaggggctggcgctggctttggcagtcggagcctctatagccttggagggaatcggcgtatttctttcaatgtggctggtggcggcgttcgggctggaggttacggcttcaggcctggctctgggtatggagggggccgggccagtggctttgctggcagtatgtttggcagtgtggccctggggcctgcatgtttgtctgtgtgcccacctgggggcatccaccaggtcactgtcaacaagagcctcttggcg

SEQ ID NO: 62599 - DNA, 736 bp, Homo sapiens
accactgagacgagcgggagcgcggagcagcagcctctgctgccctgactttttaagaaatctcaatgaactatttgtagagaatcactgatccggcctgcaagcattttgcacggcaaaaatatcgatcagtgttaagtgaagatcacattttatatgcgatcttgacttttttgtcttacattatatttttatagattttgttataaacatggtgctgggaaaggtgaagagtttgacaataagctttgactgtcttaatgacagcaatgtccctgtgtattctagtggggataccgtctcaggaagggtaaatttagaagttactggggaaatcagagtaaaatctcttaaaattcatgcaagaggacatgcgaaagtacgctggactgaatctagaaacgccggctccaatactgcctatacacagaattacactgaagaagtagagtatttcaaccataaagacatcttaattgggcacgaaagagatgatgataattccgaagaaggcttccacactattcattcaggaaggcatgaatatgcattcagcttcgagcttccacagacaccactcgctacctcattcgaaggccgacatggcagtgtgcgctattgggtgaaagccgaattgcacaggccttggctactaccagtaaaattaaagaaggaatttacagtctttgagcatatagatatcaacactccttcattactgtcaccccaagcaggc

SEQ ID NO: 62600 - DNA, 698 bp, Homo sapiens
cttgattttccatttggagttgtaaccaggtaaagtcagtgtgcagcagatcaggtagcctcttctttgggttagctgtgctgtgagcaggttgtatgcccacaggctaatgaggtctcctcttgccctgtcaggtgatgccaaacttaactctcctgggcctttccaccaaagccttcctcgcacatgtgacttcagagctaggcaaatggtgggttttgggaggctgctcctggttctgaagttagtctcccgttgtgggtccccacagcatcccactccaagacaacagctcttgggataggatctgcacctccgccccacttgtctgtgctgttcctcttttctttccctccacagcttggagaccctctggaggctttcccagtgttcaagaaatatgatagaaacgggttgaatgtctccattgaatgtaagcgagtgtctggactggagccagccaccgtggattgggccttcgacctgaccaaaacgaatatgcaaaccatgtatgagcagagcgagtggggctggaaggaccgagagaaacgggaggaaatgacagatgaccgagcctggtacctcatcgcgtgggaaaacagctccgtccctgttgccttttctcacttccggtttgacgtggagcgaggggatgaagtcctgtactggtaggagccatggcttgggggaggtagggg

SEQ ID NO: 62601 - DNA, 488 bp, Homo sapiens
tttggctgggcctttgtctctcgctcccaccagagcttggaatccgtctctgctcttctgcattctccacctcgggagcccctggggactctgtgacggcctctgttgccctgtgatctgcaggtccggagagacgcacagctaagatgtcaggacatcctggaagctgggaaagggtcttgccatctctaagctggacctggtgacctttttggagggaaagaaagagccctggactgtgaagagtgaggagaccatagctgcacagccagtccagatgtataatctcatccctgaacatttctgatggtgtgattatgacatgtgactttatctggcaacagagtgagttgttgctcccgcctgagcccagcccccagaaaggattgtgacatatcgttggacccagaattgaggtgcagttttgacacacttctgtctagcagctgagtattgtgatcttcagaactggcccagcctacaaatag

SEQ ID NO: 62602 - DNA, 1391 bp, Homo sapiens
aagggataggagggctcaaagccggcacacatctgagtcctcatggacgggaggatgatgagaagcatgaggctgagagaggaggagtcacccggacccagccacacagcgtcctgcctctgcggctctgccccctgcatcctgtgcagctgctgccccgccagccgcaactccaccgtgagccgcctcatcttcacgttcttcctcttcctgggggtgctggtgtccatcattatgctgagcccgggcgtggagagtcagctctacaagctgccctgggtgtgtgaggagggggccgggatccccaccgtcctgcagggccacatcgactgtggctccctgcttggctaccgcgctgtctaccgcatgtgcttcgccacggcggccttcttcttctttttcaccctgctcatgctctgcgtgagcagcagccgggacccccgggctgccatccagaatgggttttggttctttaagttcctgatcctggtgggcctcaccgtgggtgccttctacatccctgacggctccttcaccaacatctggttctacttcggcgtcgtgggctccttcctcttcatcctcatccagctggtgctgctcatcgactttgcgcactcctggaaccagcggtggctgggcaaggccgaggagtgcgattcccgtgcctggtacgcaggcctcttcttcttcactctcctcttctacttgctgtcgatcgcggccgtggcgctgatgttcatgtactacactgagcccagcggctgccacgagggcaaggtcttcatcagcctcaacctcaccttctgtgtctgcgtgtccatcgctgctgtcctgcccaaggtccaggacgcccagcccaactcgggtctgctgcaggcctcggtcatcaccctctacaccatgtttgtcacctggtcagccctatccagtatccctgaacagaaatgcaacccccatttgccaacccagctgggcaacgagacagttgtggcaggccccgagggctatgagacccagtggtgggatgccccgagcattgtgggcctcatcatcttcctcctgtgcaccctcttcatcagtctgcgctcctcagaccaccggcaggtgaacagcctgatgcagaccgaggagtgcccacctatgctagacgccacacagcagcagcagcaggtggcagcctgtgagggccgggcctttgacaacgagcaggacggcgtcacctacagctactccttcttccacttctgcctggtgctggcctcactgcacgtcatgatgacgctcaccaactggtacaagcccggtgagacccggaagatgatcagcacgtggaccgccgtgtgggtgaagatctgtgccagctgggcagggctgctcctctacctgtg

SEQ ID NO: 62603 - DNA, 691 bp, Homo sapiens
tcaaacttaagcataaaagaagcccaggtaaagtaaaagacatatcaattgatgttgaaagaaggaatgaaaacagtgaggtagacaccagtgctggaagtggctctgcaccctctgttttacaccaaaggaacggacaaactgaggatgtggcaactgggcctaggagagcagaaaagacttctgttgccactagtactgaagggaaggacaaagatgtcaccttaagtccagtgaaggctgggcctgccacaaccacttcttcagaaacaagacaaagtgaggtggctttgccttgcaccagcattgaggcagatgaaggcctcataataggaacacattccagaaataatcctcttcatgttggtgcagaagccagtgaatgcactgtttttgctgcagctgaagaaggtggggctgttgtcacagagggatttgctgaaagtgaaaccttcctcacaagcactaaggaaggggaaagtggggagtgtgctgtggctgaatctgaggacagagcagcagacctactggctgtgcatgcagttaaaatcgaagccaatgtaaatagcgttgtgacagaggaaaaggatgatgctgtaaccagtgcaggctctgaagaaaaatgtgatggttctttaagtagagactcagaaatagttgaaggaactattacttttattagtgaagttga

SEQ ID NO: 62604 - DNA, 793 bp, Homo sapiens
  misc_feature (1)...(793): n = a,t,c or g
gcggccgcctggggaccagctccgcgcctcggcctctccgccctctccccagcctttctctcgccctcttctcccacactcccggccggcgcctcggctttgtgcgaggagatggtgtagccccctggccgccgaaggaggagccggacacttgtctcccgtctccgagctgctccccacccctggaggagagacccccccctcggctcggcgccttctgcgtctcccggctggtggggaagcctctgcgccgccggcaccatgagtgaacagagtatctgtcaggcaagagctgctgtgatggtttatgatgatgccaataagaagtgggtgccagctggtggctcaactggattcagcagagttcatatctatcaccatacaggcaacaacacattcagagtggtgggcaggaagattcaggaccatcaggtcgtgataaactgtgccattcctaaagggttgaagtacaatcaagctacacagaccttccaccagtggcgagatgctagacaggtgtatggtctcaactttggcagcaaagaggatgccaatgtcttcgcaggtgccatgatgcatgccttagaagtgttaaattcacaggaaacagggccaacattgcctagacaaaactcacaactacctgctcaagttcaaaatggcccatcccaagaagaattggaaattcaaagaagacaactacaagaacagcaacggcaaaaggagctggagcgggaaaggctgaagggaaaagaagagagaagaaagnaagaagagagagagagagaaagag

SEQ ID NO: 62605 - DNA, 1195 bp, Homo sapiens
gaaggaggaagtttcaaagccagcttgacctggttgtggccgttgggcgagatgaagctacactgtgaggtggaggtgatcagccggcacttgcccgccttggggcttaggaaccggggcaagggcgtccgagccgtgttgagcctctgtcagcagacttccaggagtcagccgccggtccgagccttcctgctcatctccaccctgaaggacaagcgcgggacccgctatgagctaagggagaacattgagcaattcttcaccaaatttgtagatgaggggaaagccactgttcggttaaaggagcctcctgtggatatctgtctaagtaaggccaattccagcagtttaaaaggtttcctttcagctatgagactggctcatagaggctgtaatgttgatacaccagtttcaacgctcacaccagtgaagacttcagaatttgaaaactttaaaactaaaatggttatcacatccaaaaaagactatcctctaagtaagaattttccatattccttggaacatcttcagacttcttactgtgggcttgtccgagttgatatgcgtatgctttgcttaaaaagccttaggaaattagacttgagtcacaaccatataaaaaagcttccagctacaattggagacctcatacaccttcaagaacttaacctgaatgacaatcacttggagtcatttagtgtagccttgtgtcattctacactccagaagtcacttcggagtttggacctcagcaagaacaaaatcaaggcactccctgtgcagttttgccagctccaggaacttaagaatttaaaacttgacgataatgaattgattcaatttccttgcaagataggacaactaataaaccttcgctttttgtcagcagctcgaaataagcttccatttttgcctagtgaatttagaaatttatcccttgaatacttggatctttttggaaatacttttgaacaaccaaaagtccttccagtaataaagctgcaagcaccattaactttattggaatcttctgcacgaaccatattacataataggtaagattttaatagtcatgtaatgtggtgtctttgatagcattctaatattcctatcaaactcagagtaataaagtctaacattgcttacagtgctatgcacagtctgaccctttgctataatggtcttcttgttcctt

SEQ ID NO: 62606 - DNA, 1020 bp, Homo sapiens
gatgggaaaaagacgttgtgttcctccactcgagcccaagttgtcagcaggctgttgtggggtcaagaagcccaaattatctggaagtggaacgcacagtcacgggaatcagtccacaactgtccccggctctagttcaggacctcttcaaaaccaccagcatgtggacagcagcagtggacgggagaatgtgtcagacttaactctgggacctggaaactctcccatcacacgaatgaatcccgcatcgggagcgctgagccctcttccccggcctaatggaactgccaacaccactaagaatctggtggtgactgcaaagatgtgctgctactgcttcgacgtactctactgtcacctctatggcttcccacagccacgacttcctagattcaccaatgacccctatccgctctttgtgacgtggaagacagggcgggacaagcggcttcgtggctgcattgggaccttctcagccatgaatcttcattcaggactcagggaatacacgttaaccagtgcacttaaggacagccgatttccccccctgacccgagaggagctgcctaaacttttctgctctgtctccctccttactaactttgaggatgccagtgattacctggactgggaggtaggggtccatgggattcgaattgaattcattaatgaaaaaggtgtcaaacgcacagccacatatttacctgaggttgctaaggaacaagataattatactggggtaacatctgacaggaaggacgcaggagcagggagcctggggacagccattatggcatgtgtcgggctatcatctcatgtctcagagtctccacgggactggcagacagactgggcgccagactgggatcagatccagacaatagactccttgctcaggaaaggtggctttaaagctccaattaccagtgaattcagaaaaacgatcaaactcaccaggtaccgaagtgagaaggtgacaatcagttacgcagagtatattgcttcccgacagcactggtt

SEQ ID NO: 62607 - DNA, 886 bp, Homo sapiens
gccccggcctggggcaccgccaagcagcggtttgcggcctctaggaacagcggtcggatttggggggtcggtgtgctttggcttttttagatacctgtcctggccggggcggtgcggcctcgcgggccttccaggctggcgcgcctgtggggctctccccgagcgcaggcccctctctctttgccttatttatttttggaacataacctgccgcctttctagacggctcgaggggcgggctctttgcacttggaagcaggctgatgggcgtgagtgtccggggctcgtccacccggccggacgggctgggggctgtggcgccacatggctcctttttcctgggaagcgccagggggcagtgggaaccgccaccggggccgctgtagcgggccttaaaggatgggaaaccttgatcacagatgccccccgccggccttccttccaccagaccagtgggagagggaccgcaggggcatcaggcctttctcaacatgcgactcttaatttgggacggacagaacagccgtacagaccagtagttctcagcgcctttgcttaccctgggttgctcagaagacttactggttactggttccttcttcccttttgaaggacttaaaggagaagaaggaagttgtggaagaggcagaaaatggaagagacgcccctgctaacgggaatgctgtgagtgtctgctttgctcctgagccctggcagctaccgccccacaaaatttttcctgttctactttaaacatacctatatatgtgtgtgcatgtgtatatgtatagctttgcacagtggcagtatcgtagccaatgagctttacccgaggcgcgattattgctagttaaatatttataaaaacctttcgagcagcgcctgg

SEQ ID NO: 62608 - DNA, 1330 bp, Homo sapiens
atatttttttcagaatatgatcattattgtcattgctgaggctgtgctaattatagttactgatttgctacagttcggcaacactctgagtgggcttgtcctcccaccacttggttccctgcacgtgtctgtctccatgccatgctctcctcaggccccatcacacccctggcatagctattttatcctgccgttgcatctgcatacagtttctctcgctatcgctttttcttctggctggctcagctctgctcagcaattttcatattgtttatccccaaatccctccttcatctttctaatcagagtaaaatctatctctcaatatagatacatgtttgcatttactcccaattgagttgtgctttgatggagcaggatctgctactttaagacaaaattttattgcccttgagccaaaggattaattacatccattgatagacaaaattccagtcatcatagagattctgcctgctgtacagttgctctatttttccttgattgaagttgaggcagatgtcttttgcctttcaagcagagtattcaaacgaggctctattagcagaggaactaaaagctctgcatctcaaaacttgaaggcagaatgggtttcatgccagttctttctgcttcaaccacgtggtccattgtgggaaatcttttgtacacagcagtgctcaccgagcgaaagatgagcagggaggtgagattgacgtagcgcatcagcgtccttctaagcaggcgcccgtgctcgtcgcttccgtgaacactgctagagatgaggaacattagcctgtctggccagggcaaattcacaaactggttccaccatcggttcactaccagagtaacataaaaccctgtagaataacaggaaattataaagcagtttcttacagcagacacgttggtgacactgatgcttttagctgaattttagcctttttagaggttggaggacaaaaatatattattatccatatcttctgattttgccttccagaaaaaaaatgtcatttgtgcctggcaatgcctaagcaccctgtaagtgggtattagatctcaaatattgactgcaaaaatggagagttagtgaagagaaagcttaaatgtccaatagcagattatttcctcaaacttgtttggtgttaatttcgcaaaagcagccgtgaaggcaaaccttatggatgattctggttctattgcaagcggtggcttttcaggcatgcctctcagcttggaaacactcccatgcaaagtcatgggtgaattctaaccggacacggttttgggctggaattgcgtgtgacctatactttacaagccc

SEQ ID NO: 62609 - DNA, 502 bp, Homo sapiens
gtggcgcggcgggccccggcgggcgaaaaggctggcaggtggcgccgtggggtgggtgctcctggtgagaggagtccactccgtgcgtgcgggcggaggccggcccccgagagccgccgacatgaagaaagacgtgcggatcctgctggtgggagaacctagagttgggaagacatcactgattatgtctctggtcagtgaagaatttccagaagaggttcctccccgggcagaagaaatcaccattccagctgatgtcaccccagagagagttccaacacacattgtagattactcagaagcagaacagagtgatgaacaacttcatcaagaaatatctcaggctaatgtcatctgtatagtgtatgccgttaacaacaagcattctattgataaggtaacaagtcgatggattcctctcataaatgaaagaacagacaaagacagcaggctgcctttaatattgggtgggaacaaatctgatctggtggaatatagtagg

SEQ ID NO: 62610 - DNA, 593 bp, Homo sapiens
aaaggatgtagacagatcaagtaaccttggatgaaagagaagaatagatttggagtggtaataaagggaaggcactatactagaatattttattcagtctggaagcaacaagaagccactgataattctgaagaggactgcttgcattaaaggacttcctcatcctttttttcatgaaactgagcttgcttaatcagagatggagcaaactgactgcaaaccctaccagcctctaccaaaagtcaagcatgaaatggatctagcttacaccagttcttctgatgagagtgaagatggaagaaaaccaagacagtcatacaactccagggagaccctgcacgagtataaccaggagctgaggatgaattacaatagccagagtagaaagaggaaagaagtagaaaaatctactcaagagatggaattctgtgaaacctctcacactctgtgctctggctaccaaacagacatgcacagcgtttctcggcatggctaccagctagagatgggatctgatgtggacacagagacagaaggtgctgcctcacctgaccatgcactaagaatgtggataaggggaatgaaatcagagc

SEQ ID NO: 62611 - DNA, 513 bp, Homo sapiens
ctcagcaccacaaggaagtgcgggacccacacgcgctcggaaagttcagcatgcatgaagtttggggagagctcggcgattaacacagcgacccgggccagcgcagggcgagcgcaggcggcgagagcgcagggcggcgcggcgtcggtcccgggagcagaacccggctttttcttggagcgacgctgtctctagtcgctgatcccaaatgcaccggctcatctttgtctacactctaatctgcgcaaacttttgcagctgtcgggacacttctgcaaccccgcagagcgcatccatcaaagctttgcgcaacgccaacctcaggcgagatgagagcaatcacctcacagacttgtaccgaagagatgagaccatccaggtgaaaggaaacggctacgtgcagagtcctagattcccgaacagctaccccaggaacctgctcctgacatggcggcttcactctcaggagaatacacggatacagctagtgtttgacaatcagtttggattaac

SEQ ID NO: 62612 - DNA, 721 bp, Homo sapiens
gggtcatcctaatagaattgttttgcgaattgaaagagataatacaaatgaaagccttaaagttgtccctgtcacttggtgagtggtctcttgttgcctgatattttaaaacgtttgatatcatttcaaagctatagaaaaattgcaaaaacagtataagaaattctcatataccctttacccaaatttgccaagtgtttacatttttcctgtttgctttgttgatgaccatcaaccaaataccaccaggaacatacctgtaaccagagacagctgattggtagctttctgcagcaaggaagcccacataccacggcacaattctgctttccctggaactgtgtcattcaggactctgcaaattccctaaagtaggaggaaaaatgaccatgtccaaggaggcagtgaccttcaaggatgtggctgtggtcttcactgaggaggagctggggctgctggaccctgcccagaggaagctgtaccgagatgtgatgctggagaacttcaggaacctgctctcagtggggcatcaaccgttccaccgagatactttccactttctaagggaagaaaagttttggatgatggggacagcaacccaaagagaagggaattcaggaggcaagatccaaactgagttggagtctgttccagaagcaggagcacatgaagagtggtcctgccagcaaatctgggaacaaattgcaaaagacttaaccag

SEQ ID NO: 62613 - DNA, 661 bp, Homo sapiens
gtttctcttaacttcttccttccccagttttctttcatttttaccaagttaacttcacattcttatctccagataagttctttagtataatctattcctttgtcttccccattaattacctaaatctcattggatgttcttttcataccactcataactcaaattctcctaatacagctccataattaataagaaacagtcatcaatcacaagttttaaggactattctctcctctgtcttccctccctccaggtcaccccagctctgatatttgccatcacagttgctacaatcggctctttccaatttggctacaacactggggtcatcaatgctcctgagaaggtgagtgccaggccacaataattagaatttagaatagggaagttattcctttaagtagggtttcaggaattcagaatttaaggccaggcatggtggcatctgcctggagtcccagctactcctgaggctgaggcttaaagatcacttgagtccaggagttaaacaccatcctgagcaacacagttagtgagggtccctccccaaactaggggattttaagacaaactttgtatctatcccgtccaagactgaagatggagacaatattggtggggaaaattagtggggtcatctaatcgaagcacacagctcact

SEQ ID NO: 62614 - DNA, 883 bp, Homo sapiens
ctttacattttaaaattgcattctgaagaggctatgcattaaataatatgatatccgggagtataagtaaaataacccactagtacacatgaggaccgatgaaacataaatgactatgaaatgataaatggtgaaggaaaaaaaaatagtgaaggaagactggagaaaggttcatctggcttcataacagtcttttccatctttttttgtaattgaacacagcaaggcaataagaggcagttggttcccacagttggtgatttgaaggctggcaaactctatcaagagtcatgtgagaccaacaatatcctgaaatatgtagtccctcttttcaggtcaccagcagagtcctctggaccaaactgggtcaggtccatggcctaactcatcagaaaggattaaaaaacacccgaactacctgcttaggcttttaacaaactcctcccttaacccgaaccctgagggttacccttacttgtacacccatgggaatgggcgagtggtgcacactggtggtcacctgccaggcggtagaggtaaaatggcttccactatagtatcagcagagacataaatctgacatgggccctgggcagggcaaaaggtgcaatgcagttcacacataccgctgaatgcttttgtgtgttctccacagttgtaatgagtttttcctctgtgactgatggccccaccgtcgcttttgctattggattgctccccagtgtgagcagcctgttgatggagaaatcccaacttggccaggaagtccttcccaaattctctgcaggtggaaggctcccctgacacatggaatgtgcaggtcttcacaaacaaggctcggcccactttgcttgtgaaatgattttctccagggtgctgcttc

SEQ ID NO: 62615 - DNA, 375 bp, Homo sapiens
  misc_feature (1)...(375): n = a,t,c or g
ggaatgtaaagaactgtatgtcaagtgtggactttatctcctcaggctagcttagagtggctgctgaacttaagggtgattaagagctgcttgcacctgggtggagctgaaactgcataaggtgaataatacctttgtgcaacagaagnnnnnnnnnnnggtaccagcttacttacaaccccaagggattcctgaatttgacaacttgtacctggatatgaagggaattatacatcagggctcccatcctaaggatgatgaggttcactttaaaatttcaaatgataaaatctttactgatatttttcactacctggaggtgttgtttcgcattattaaacccaggaaagtgttctttatggctgtaaatggggg

SEQ ID NO: 62616 - DNA, 569 bp, Homo sapiens
ttttgtttttattaatgcaaattataattattcagtattccttcctttttttttctttgacaattttaagccttgtcctaggttaagactgatgaacaggagccaaagaagagctttgttgcaaatgtatacactttttcctaaagggattttccatgacctgatacttggtcactgagcaccttgacaaatgaatgactgggtagttttattaagccagttttttgttgctgttgtttttcccgctctctgtcttcttcttcttcatgtagctcagtcccagttccagaatgaggaagctgcctcagggtcgccctgttcctccccttggacctgagacaagagtttctgtagtctgggtggaacgctatgatgatataggtactgtatgaggactttgtccataaataaaatggcaatatatgacagtgacttgctaaatgtctacagggagtgggcacataagcctggtgtggccaggagctagtcctggagttcagcaagccttggtttgtaccccagctccactactcagtttctttaagccttagattactcctctggtaaac

SEQ ID NO: 62617 - DNA, 2130 bp, Homo sapiens
gagagcggcgcctcactactgactatgctgcgaaaacactacataaggggggggcggggtggcgccacccctgattgcggtgccacggactgctcctgctgggcggagaggacagattttgcaaagcggaggctgcgacgggtcctgcagggggacagtgaggaaagggccgcctcgtctccgctcctgggggaccgcagaaataagaatcaaactccacaatgacaacctatttggaattcattcaacaaaatgaagaacgagatggagtccgatttagttggaatgtttggccatcaagtcgactggaagctacaagaatggttgttcctgtggcagccctgtttacaccactgaaagagagacctgacttaccacctattcaatatgaacctgttctgtgtagtaggaccacttgccgtgcagttttgaatcctttatgtcaagtggattatcgagcaaaactttgggcttgcaacttttgttaccaaaggaatcagtttccacctagttatgctggtatatctgaactgaatcagcctgctgaacttttacctcagttttctagcattgaatatgtagttctgcgtggtcctcagatgcctttgatattcctctatgtggttgatacttgcatggaagatgaagatttacaagccctgaaagaatccatgcagatgtcattaagtcttttaccacctacagctttggttggacttattacttttgggagaatggttcaggttcatgaacttggatgtgaaggcatttcaaaaagctatgtcttcagaggaacaaaagatttgtctgccaaacaactgcaggaaatgctggggctctctaaagtaccagttactcaagcaacacgtggtcctcaggtacagcagccacctccttccaacagattcttacaaccagtacagaaaatagacatgaatctcacagatcttctgggagaactccagcgagacccttggcctgtaccacagggaaagagacctttgcgttcctctggggtggcactttccatagctgtaggactgctggagtgtacttttcccaacactggtgctcgtatcatgatgttcattggtggtcctgctactcaggggcctggaatggtggttggagatgagttgaagacacctataagatcgtggcatgacattgacaaagacaatgccaaatatgttaaaaagggaactaagcattttgaagcattggctaatcgagctgctacaactggccatgttattgatatctatgcgtgtgcattagatcagacaggtctcctggagatgaaatgctgtcccaaccttactggaggatacatggtaatgggtgattctttcaatacttccttattcaaacaaacttttcaaagagtctttaccaaagacatgcatggacagtttaaaatgggctttggtggtacgctagaaataaaggtaagaaccaaaacttgacatgtgcgatatgttatcaaaagacaacttataggcttgagtgtaattctaaaatgccattaatcaaatttaatatttactttcaaaattgtggttattttatattgaaacctgagttagagattttcttcaccagaagagtgtcatcattcaatgtgtgagactttacttgagcatttctgaacaattgttagaaaagtagaacaatattggtaaaatattctttaactttttaatttttttctttatatagggcttagctctttaaagtatgttttatcttcttttttttgagacagagtcttcctctgtcgcccaggctagagtgcagtggcatgatgttgtctcactgcagcctccgcctcctgggttcaagtgattctccagcctcagcctcctgagtagctgggactacaggtgtgtgccactgtgtctgtctaatttgtgtttttagtagagacgcagtgtcaccatgttggccaggctggtctcgaactcctgacctcaggtgatctgcctgtctcagctttccaaagtgctgagattacagacatgagccaccacgtctggcctgttctatcatttgtagagccaaatctatttatgatagtgctagagtataatgataggaattgttatctaacttaagaggaaactgtattta

SEQ ID NO: 62618 - DNA, 911 bp, Homo sapiens
ttttttttttttaaataaatgtttcctagcttgctgcaaggggaacatttgctgcttgctggaataaatgttccaaagttgtgaaaaatctgattctcacagttttgtcagtatttgcatggcttgtacggggcaaaaaacttctggaggtccttacttagccattcttgctgacatcactcaggattctttcttggaagtttctggcttctttcgcccttactcccagatggtagcgacagcggcaggaggcagacaaatcctggatagaaaggtcgttggatttctccctctgatatccatggctcttctccttgctccaatttgaagatcacctctggcttggaaacttgatatccaagagaaaccaggtggctatagttctccagcatcacatccctgtataagctcctctgagcagggtcgacatggtaccattcttcctgggtgaagtccacagacacatctttgaatgtcactgattcctggggcgcggcggtcggaggcctcggggccattcctgcctcgccagggcccggctccggggcaggagctttgaaggaatgaaaattagaagatggctagctgggcgtgatggctcccagctactcaggaggctgaggcaggaggatggcttgaacctgggaggtggaggttgcagtaagctgagattgcaccattgcactccggcctgggcaacagagcaagactctctcttctccgctccaggtccgcgctcggggctggcggcgggggtgccggaagggaagcggcaggctagttgcaggggaggcgcctcgcccagcacctgccgcagggggtcgggcagccagactccgtcccggcagttgtcgagttgcaaggcgcgaaacccaccaggtgctaaaagccagcagccatgttctccctcc

SEQ ID NO: 62619 - DNA, 424 bp, Homo sapiens
cgtctgccgcgcccttgttcctgcagctgtccagttatcttttgactgccacatatggaccccaaaagatctcaaaaggaaagtgtcctcattacaggaggaagtggctattttggttttcgcctgggctgtgccctgaaccaaaatggagtccatgtgattctgtttgacatcagcagccctgctcaaaccattccagaaggaatcaagtttatacaaggagacatccgccacctgtctgacgtagagaaagccttccaggatgcagacgtcacttgtgtgttccatattgcctcttatggtatgtcagggcgggagcaactcaatcgaaacctgatcaaagaagtcaacgtcaggggcacagacaacatcctccaggtttgccaaaggagaagggtgcccaggttagtttacaccagcactt

SEQ ID NO: 62620 - DNA, 1489 bp, Homo sapiens
tttcgtggagaggcgcccccgccggccgccgcgccgcccggcagcctcggcaggttctgccggagacttccatttggcctcaatgtgaaattaaagtagaaaatcacatctacatgcatgttgctatcaggatgttgattcattagtcatgcctgaagagggaaagtctgttttaggtggctgactaccagcaaaaataaatgcttatcctacatgtcaagcatccctactttttactggagtgaaaatcccctccagataccaacagaatatcaactgcagaaaatgcttcacattttaaggatgtcggcaacctaaattcatgtaccctatctgtacagttgttgtggatggtttgccatctgaaagctcctcaagttcttatccaggccctgtgtctgtttctgaaatgtctctgcttcatgctttgggtccagtgcagacctggctgggacaagagctcgagaaatgtggcattgatgccatgatttacactcggtatgtcctcagtcttctgctgcatgacagctatgactacgacctgcaggaacaggagaatgacatcttcctgggctgggaaaaaggagcttataagaaatggggaaagagtaagaaaaaatgttcagatctaactctagaagaaatgaaaaaacaggctgctgtccagtgtcttcgatctgcttctgatgaaagctctggtatcgagactttagtggaggagctctgctccagactgaaagaccttcagagtaagcaagaagagaagattcacaaaaagttagaggggtctccctctccagaggcagaattatcccctccagcaaaggatcaagtggaaatgtactatgaagcatttccaccactttctgagaaaccagtttgcctgcaagaaatcatgactgtgtggaacaagtctaaagtctgttcttactctagctcttcttcatcatccacagccccaccagctagcacagatacttcctctcctaaggactgcaacagtgaaagtgaagtcaccaaggaaagaagcagtgaagtacccaccactgtgcatgagaaaacccagagcaaaagcaaaaacgagaaggaaaacaaatttagtaatggcacaattgaagaaaagcctgctttgtacaaaaagcaaatccgacataaacctgaaggaaagattcgccctcgctcgtggtcttctggctccagtgaagcaggctcaagttccagtgggaatcagggagaattaaaagcatccatgaagtatgttaaagtaagacacaaggcacgagagattcgaaacaaaaaagggcggaatgggcaaagcaggctttctttgaagcacggtgaaaaggctgaaaggaacattcatactggaagtagtagcagtagcagcagtggttctgtcaaacagctgtgcaagcggggtaagagacctttaaaagaaatagggagaaaagatcctgggagcactgaaggaaaagacctgtacatggag

SEQ ID NO: 62621 - DNA, 783 bp, Homo sapiens
cccacgcgtccgctctaggtgatgtttgcagacagaaaaagtaaactgtcaaggaattcagagcattgggtacttgttatttggaccagtttgaagcatctttgatttattggaccaactggcaacagaaaatgaaaagtagtgtggcacagataaaaccttcttctggtcatgacagaagggaaaaccttaattcatatcagaggaactcctctccagaagacagatatgaagaacaagaacgatccccccgggatagagattactttgattacagcagatcagactatgagcattcaagaagaggacgttcttatgatagtagcatggagtcacgaaacagggaccgagaaaaacgcagagaaagagaaagagatacggatcggaaaaggtctcggaaatccccatctcctgggaggagaaacccagaaacatcagtaactcagagttcctctgctcaggatgaacctgctacaaagaaaaagaaagatgagctggatcctcttcttactcgcactggtggagcatatattccccctgcaaagctcaggatgatgcaggaacagattacagataaaaacagcttagcataccagaggatgagttgggaggccctgaagaagtcaattaatggccttatcaacaaagtcaacatttccaacataagtattattattcaagagcttcttcaagaaaatatagttagaggaagaggactgctgtccaggtctgttttgcaagcacagagtgcttctccaatcttcacccatgtttatgcagcat

SEQ ID NO: 62622 - DNA, 588 bp, Homo sapiens
tttggtagacccacgcgtccgagagattcaaacccagcaagtatgtcccggtctctgcagccgccatcttcctagtgggagctacgacactcttctttgcctttacgtgtccaggactaagcctgtatgtgtcacctgcagtgcccatctacaatgcaattatgtttctctttgtgttggccaacttcagcatggccaccttcatggacccagggattttccctcgagctgaggaggatgaggacaaggaagatgatttccgagctcccctttacaaaacagtggagataaagggcatccaggtgcgcatgaaatggtgtgccacctgccgcttttaccgtccccctcgatgttcccactgcagtgtctgtgacaactgtgtggaggaatttgatcatcactgcccctgggtgaataactgtattggggccctgagactggggtagcaacccccccttttatcttttaagaccttcccttccttgatccctggaccagactcagtggacatttgtgcaattgctcgccctggagggaaccagatcatttttaaaccagaaataatttttttttttattaaaaaaaaaa

SEQ ID NO: 62623 - DNA, 759 bp, Homo sapiens
cgagagatgaggccggagcccaccaagttctgggaagttctttctgacacaagtaagataacatctctgccatgcccacaggtgctgagaacaagagaaatcaagtgaaggaaggaggcggagtttccaagacttgggtgtcatcatttctggggacatccttgattggagattgaagtttttgaaccgaaatttagagctgattcagaagagacaaatacagaacgtccaagttagcagtcatttcccaaatttaggagacaatgatgcaggcccaggaatccctaacactggaggatgtggctgtggacttcacctgggaggagtggcagttcctgagccctgctcagaaggacctgtaccgggacgtgatgttggagaactacagcaacctggtggcagtggggtatcaagccagcaaaccagatgcactctccaaattggaacgaggagaagaaacttgcacaacagaagatgaaatctactctcgaatctgttctgattcaggaggtgcatcaggaggtgcatatgcaggtttgtctcatggatatattgcctgatgccgaggattcactagaagctcaatcctgtcacccaagtagtgaacatagtaccaaataggtggttcttcaacccttgccttcctcccttcttcctcttggagtccccagtgtctattgttcctgtcttgatgtccctgtgttcccaatgtttagctcttgcctacaagtgagaatacacagtatttggttttcaaaa

SEQ ID NO: 62624 - DNA, 648 bp, Homo sapiens
gagaagataagactggagaaattactgtttatttggcggttaagggctttctgcaagtgcttgagactatccctgtggcaccccctaccacagccctaggaacaatagcataagatccttgcaccaataaatgtcacagaaaggatggagttttctgcctttaaatgtaatgtggactttggcattgagcatctcagcagccactgtgatgaattgaagaccagagaaattttcctattttctgggcactaggtcctattcactggaaggaatttttccctattgctgatggtgatcagcaatctccaattgagattaaaaccaaagaagtgaaatatgactcttccctccgaccacttagtatcaagtatgacccaagctcagctaaaatcatcagcaacagcggccattccttcaatgttgactttgatgacacagagaacaaatcagttctgcgtggtggtcctctcactggaagctacaggttacggcaggttcaccttcactgggggtccgctgatgaccacggctccgagcacatagtagatggagtgagctatgctgcagagctccatgttgttcactggaattcagacaaataccccagctttgttgaggcagctcatgaaccagatggactggctggct

SEQ ID NO: 62625 - DNA, 1192 bp, Homo sapiens
ttttttttttttgtctctgactctccagagcctcttgttcagcctttagtttcaagagggccaagtctctttcatggcgttgctgttgtgcctttattatctgagctagagacacactctcctgctgagcaagtgaaatgcctctaactctttctacatctgacagttggcgcaccgactcctcaatggcgttcagataactgagttctgctgccatacgatgatggaggccagcaggagaaaagcgcttagaacctggtattggagccatgttctctgtcgttgttctgctggctgccgggttcagatcagtgagaggtgcattaggcttaaatcctgttatagttggaggcattactgacgacttagatctttctgaagaagttcctgcaacgtcaaactgcaatgatttctgggaacttggtgacaggggagaagttggagttttctgagatcttcccttatctgatgagacactcacagaatgtccagaaagatcctccaaagtgctatctgtatcaagagtctgctcaaaatctttaacagaaagtttgctgctggtcccagatttctttccttgatgggagccacgttctgctttttcctcatcaagaagtgagttctgaacatttccagtgaatgaatccaaccattctgtcttttccttttttcctttctttcctttagaagaagtagatgaacgagacgatgcagcagactgggctcctgatgaatgctgggaggtaacatccacagaggaaggatcataggcagactttctgttagaatggtcctcctgagggcttaaagtgctatgaggttcaagagttgattttttttctgtcgaagtcccagtccctggagaggagacaaaatcatcttcatatgaaacaccacttagaggagttgcggtggcattcaaaggccgtgatgttgatgttcctctgtccaacttgtcttcaaacccttttccatataactgataggattttgtaaaaatattaatgacgctatgtggacttccctttgccaattcttcccatggtcctttgctttgtgtaccacctatgtgcccaaaaagtggcaagaatttttcagcttctttctgaaactctttgatgggttcataactatttctttctccaggacaaaattccttttcttttaaaatttctgctactttcaaaagggg

SEQ ID NO: 62626 - DNA, 424 bp, Homo sapiens
atcaggaagcctggattgagttccagctctgtgcctagtagctctgagatgatgtttctcagctgtgaagtggtgaaaacagccatttctaactcacaaaatagctgtgaggccaaaacaagtcttgagctctaaagtggcacataaattggaggtattgagattatatgttttgtgtcaagagcacgtgagcagatacctaagccaggtgtgggactgtacagggctggggtggggcagatgttccaggaccaggtaagctaccacttgtttctctgcccgtaaccttactttcccacccgcaaatctgatgtggtggctctgtgcttctccattgccaaccccaattccctacaccatgtcaagaccatgtggtacccagatatcaagcacttctgtccccgagcacctgtcatcttggggg

SEQ ID NO: 62627 - DNA, 1461 bp, Homo sapiens
cgatccgctccactatttccagtggcagagtctgggaatctgcattagtgccataaagggtgacgtaaaaggtgggctcaatttctcccatgttcttgtaactgaagacatggattttcatctgataatggtaaactctgaaaggcatgcctgcccgggtttttaggtacattttgctgttcctcttgttcctcattttcttggcattgtagccaatgctattacaacggttcttgcggcagctcagacagatcccctttttgaagcgattggagtcagtgcactggaaggcaaaactcggcttgtcctgattcaccagagagtcaacaaagaggtggacggctcgctcatgctcacattttaccacctctgtgattgttccatatgcaattgatcccaagacatcgttgagtccacagcctggctggaagtcacccccattggggtagatgtcaatgtggcccacaggcatctgaataccaatgctcaagccgaaggaacgcgtgtaggtgtggaggacatccacaaaatctgcatcgtccggagagagcctcttgtggatgtcggccccttcaaacatgggcccggcaggatccaaacctgtgattcggcccaccgttcctttcacgaagttgcctgcatacccggccacgtgcgctccgaggctgtagccgatcaagtggacattcccgagagaaaaatcgtccttctcctgcagccagtcgagcatcctggcaatgctgtgtcccaccaccctggtattattgaccgcatccgtgtaaagctggtgggccagggggagccagtcaaccacaactacattggcgtctttctctcttgtgtgcagggctgacacgagtttgtgcagccagttttcaaagataccgctcatcgtccatccgtgaatgatgaaaaaggttttagctgtcatgttgaaactgcagtcttctaagggctggctgtggccgacggagaggtagcatccttcatgctctgggtccttggaggtgcggaggttaaacctcacagatggtttgacctcagtctgtgtagctttgggtttgtggagcttatcgcgtggacgccgcacgctcggccccgcttcctcccgggcccgctccgcaggcagctgcgactccagcagctccagctttctcccactgccctcctccggacacccagatcctcctctccccactgccatcccaagtggcggaggcggacatttccctgaaactctgcgtccgctggggaggcgatccctggagaaggagagcatcctctccaaggctcaaagccacactctctctgggagtggtctatccgctccctgggccgggagtccgtcgggggagagccacctggtcatcccctttgtcctcctcttctccctcccttcccgcctagcgagggccgcaacaggtgcagaaggcgcggccgctctggaagatccgaagtatc

SEQ ID NO: 62628 - DNA, 669 bp, Homo sapiens
taaataaagagcctgcctgagtcagagggaggcggatggggccccggggggcttggggcaaccacgccaaacaaggcaaggaggggagcgatgtataaaaccgggcccagggctgagcacctgcctgcacccctactgtgccatccagaagggctctgtgctgcctgcaatccagccagtcgactcaagtccctaggtcaacccctccacgatgtctaaagcagctcctgccaaaaagccagtggctgtggccccagctcctggatgtaccctggacatcaatgacccacaggtccagagtgcggccattcgtatccaggcctcttaccggggccacaggtcccggaaggagctgcgcgagaaggggccgccgcgggtgctggagccgctgaaggacgtggtgctgatcgaaggcagcgcggccaagctcacttgccgcatttcggctttcccggacccattcatccgctggagtaaggacggcaaggagctacgtgacggtcccaagtaccgctacgtcttcgaggaccctgacgtggtggcactggtggtgcgcgacggcgagctggcagacctgggccagtacagcatcaacgtcaccaaccccttcggccagtgctccgactcggcgcgcatcctcgtggaagccctgacgagattcaaaaggac

SEQ ID NO: 62629 - DNA, 430 bp, Homo sapiens
gtcatttcgtggtgttggcagccctggaagccttggctgaccgtggtgagatcgaacccaaggtggtggcggacgccatcgtcaagttcgggatcaacccggaaaaacgcaacccactggactgctgaggagacaccctgtgagcgaactcattcgcgtacctgacatcggcagcggtgaaggtgaagtaatcgaactgtttgtgaaggtcggcgaccgcatcgaagccgaccagagcatcctgacgctggaatcggacaaggcgagcatggaagtgcccgcgccgaaagccggcatcatcaagagcctgaaagtgaagctgggcgaccgcctgaaagaaggcgacgagttgctggaactggaagtcgaaggtgccgctgctgcggcgcctgcggctgcaccagcccctgccgcccaggcggcaccggtt

SEQ ID NO: 62630 - DNA, 551 bp, Homo sapiens
ccgctcctgaattcccgggtcgacgatttcgtgggacgcccaggagatgcgcgcggtggtgctggctggcttcggggggctcaacaagctgcggctcttcaggaaggccatgcccgagcctcaggacggcgagctcaagatccgcgtcaaagcctgtggattaaacttcattgacttgatggtgcgacaagggaatattgacaaccctcccaagactcccctggtaccaggatttgagtgttctgggattgttgaagctctgggggacagcgtgaaaggatatgagattggagaccgtgtcatggcatttgtcaattacaatgcctgggcagaggtggtctgcacaccagtggagtttgtctacaagatcccggatgacatgagcttctccgaggctgctgcattccccatgaacttcgtcacagcctatgtgatgctgtttgaagttgccaacctccgggaagggatgtctgtgctcgtgcactcagctggtgggggcgtgggtcaagctgtggctcagctgtgttccactgtccccaacgtgactgtct

SEQ ID NO: 62631 - DNA, 543 bp, Homo sapiens
tttcgtacgggcctatgtcagggacctccgcagcatcgtggaggactacctgggccctctgctggacggcggggtcctggggctgagcgtggagcaggtgggcacgctgtttgccaacattgaggacatctacgagttcagcagcgagctcctggaggacttggagaacagcagcagcgccgggggtattgccgagtgcttcgtgcagaggctccctggccctgctccgggagctgtcgttgtctccgccagcagccctgtggctgcaggagcgccaggcccagcttcgccactcgctgcccctgcagagcttcctgctgaaacctgtccagcgcattctcaagtaccatctgctgctgcaggaactagggaagcactgggcggagggcccaggcactgggggtcgcgagatggtggaggaagctattgtgtccatgacagcggttgcctggtacatcaacgacatgaagcgcaagcaggagcatgcagcgcgcctccaggaagtgcagcggcggctgggtggctggaccggaccagagctca

SEQ ID NO: 62632 - DNA, 712 bp, Homo sapiens
acagacatggttccagctctgtagaactgagagaaagaataaacaagtcacacattagcccttcaaaaagatgaccgacctcttgagaagtgttgtcaccgtaattgatgttttctacaaatacaccaagcaagatggggagtgtggcacactgagcaagggtgaactaaaggaacttctggagaaagagcttcatccagttctgaagaacccagatgatccagacacagtggatgtcatcatgcatatgctggatcgagatcatgacagaagattggactttactgagtttcttttgatgatattcaagctgactatggcctgcaacaaggtcctcagcaaagaatactgcaaagcttcagggtcaaagaagcataggcgtggtcaccgacaccaagaagaagaaagtgaaacagaagaggatgaagaggatacaccaggacataaatcaggttacagacattcaagttggagtgagggagaggagcatggatatagttctgggcactcaaggggaactgtgaaatgtagacatgggtccaactccaggaggctaggaagacaaggtaatttatccagctctgggaaccaagagggatctcagaaaagataccacaggtccagctgtggtcattcatggagtggtggcaaagacagacatggttccagctctgtagaactgagagaaagaataaacaagtcacacattaaa

SEQ ID NO: 62633 - DNA, 1452 bp, Homo sapiens
cggcacctgttcggaattcccgggtcgagctgcctgggactcaactcgcagtcccacctgtccggttagggtctgcaggatggagagcgtgttcaaggtggtcgttttgcccacttctcatggcaaccctctaggggaggcaccattagtgtgcccatttcacagggcttcctcagccgccgcctcaagggctccatcaagcgcaccaagagccagcccaagctggaccgcaaccacagcttccgccacatcctgccggggttccggagcgccgccgccgccgccgcggacaatgagaggtcccatctgatgccgaggctgaaggagtctcgctcccacgagtccctgctcagccccagcagtgcggtggaggcgctggacctcagcatggaggaagaggtggtcatcaagcccgtgcacagcagcatccttggccaggactactgcttcgaggtgacgacgtcatcaggaagcaagtgcttttcctgccggtctgcagctgagcgggataagtggatggagaacctccggcgagcggtgcatcccaacaaggacaacagccggcgtgtggagcacatcctgaagctgtgggtgatcgaggccaaggacctgccagccaagaagaagtacctgtgcgagctgtgcctggacgatgtgctctatgcccgcaccacgggcaagctcaagacggacaatgttttctggggcgagcacttcgagttccacaacttgccgcctctgcgcacggtcactgtccacctgtaccgggagaccgacaagaagaagaagaaggagcgcaacagttacctgggcctggtgagcctacctgctgcctcggtggccgggcggcagttcgtggagaagtggtacccggtggtgacgcccaaccccaagggcggcaagggccctggacccatgatccgcatcaaggcgcgctaccaaaccatcaccatcctgcccatggagatgtacaaagagttcgctgagcacatcaccaaccactacctggggctgtgtgcagccctcgagcccatcctcagtgccaagaccaaggaggagatggcatctgccctggtgcacatcctgcagagcacgggcaaggtgaaggacttcctgacagacctgatgatgtcagaggtggaccgctgcggggacaacgagcacctcatcttccgggagaacacactggccaccaaggccattgaggagtacctcaagctagtgggccagaagtacctgcaggacgccctaggtgagttcatcaaagcgctgtatgagtcagatgagaactgcgaagtggatcccagcaagtgctcggccgctgacctcccagagcaccagggcaacctcaagatgtgctgcgagctggccttctgcaagatcatcaactcctactgtgtcttcccacgggagttgaaagaggtgtttgcctcgtggaggcaggagtgcagc

SEQ ID NO: 62634 - DNA, 600 bp, Homo sapiens
gaccgttcctgagttcccgggccgacgatttcgtagaacatttgggtggcacaactcacaaaggagagtgtcctgaatacagagaataagttgataagcatcttgggcagaataacagttgtgtagaagatttcagagatagaaagaatacctagaaagaagtacatgggtgtgtggaggctgtgatccaaatgaatgactgagatgatgatgatgtttccactcaagataatcaaatagaggcagagaaagactgcaaagaggacaagctgcaattccccaaggctagagaagcccagcactaagaactcagtgacagaggaagaactggccatgaagagttgatcccacggaataaagtcaatatgatcaggtccagagatctttggaacttaaaattcagggagacctaccctcataaagtagctatgccagtcttgtttgaatgagaaacaacaagcatgggagagaaaaaagaattgtaaatttaaccagaagttcttctaaattgagtagaaaactgcttcaagatattgatatatatctgctggagataaaggaacacagtggattgctatctgagctcacctgagaaatctg

SEQ ID NO: 62635 - DNA, 423 bp, Homo sapiens
  misc_feature (1)...(423): n = a,t,c or g
tttcgtagcacctcaccatggactgcacctggaggatcctcttcttggtggcagcagctacaggcacccacgcccaggtccagctgatacagtctggggctgaggtgaagaagcctggggcctcagtgaaggtctcctgcaaggtttccggatacagcctcagtgaattatacgtacactgggtgcgacaggctcctggaaaagggcttgaatggatgggaggttttgatcctgaagacggtgagaccagttatgcacagaagttccagggctcagtcaccatcaccgtggacacatctgcaaaaacagcctacatggaaatgaccaggctgagacatgacgacacggccgtctatttctgtgcaacagatcggcccagattgctcggccccttcaggtatagtagctcgccccacaactttn

SEQ ID NO: 62636 - DNA, 985 bp, Homo sapiens
tttcgtcctactgtccctgtcctgcccttgcagacatgtgtcctgcccttgcagacagccgcaggcaggcagggaccaccatgagcaaccccgtctctcctcctgaggggcagcacagagcctggaggaggcctgagtggggttgaggcctggggcgagctggggtggaggggcactggctgccgggctccagggatcttctccccttcctgccccggagggtgctggcacaggggtggggctcactcccactccgtagacacaatgatcagaggtcctgggtgtctggggaagctgggctgtgcgtgtatgcgtctaccatgtgggggtgcctgtgagtgtgctggggcgtctgcagtgaaggcctcctgagaccactccacggaaacaccgggaatccctgcagctgagcctgtctctcacgggaccgggaagctggagagagccccaaccctgcccgctggggccgagctccctgctcctgcagcagtcccgtgccccacactctgagtctgccctatccacagctgctgggcctctctgtggccaccatggtgactcttacctacttcggggcccactttgctgtcatccgccgagcgtccctggagaagaacccgtaccaggctgtgcaccaatgggggactcagcagcgacttatccaacatccagagagcgggagcgagggccagagcctgctggggccactcagggccttctctgcggggttgagcctggtgggcctcctgactctgggagccgtgctgagcgctgcagccaccgtgagggaggcccagggcctcatggcagggggcttcctgtgcttctccctggcgttctgcgcacaggtgcaggtggtgttctggagactccacagccccacccaggtggaggacgccatgctggacacctacgacctggtatatgagcaggcgatgaaaggtacgtcccacgtccggcggcaggagctggcggccatccagga

SEQ ID NO: 62637 - DNA, 451 bp, Homo sapiens
tttcgtgtcatcgcggcttagcgttacaagacttggctgccaaattaccaaactggttgaaaggagcgtcacacgattaagtatcgtgtcacataataggatgacaaagtttttaattgtttcagatacacatggtgatcgtgagatcattgctgatatttttgacaaatggcgggatagcgttgccggcattttttacaatggggattctgaattagcggctgatgacacagtatttgatggcgtatccactgtgattggcaatatggatgatgatcctgatttcgtggccgcaagggcgacaacgattgatgggattacttttttccaaacgcacggacatctctatgacgcgacccaatttaacgcttgggcgaacctaaaattaatggccgtggcagcacaggaagctaacgcacaggtcgccctctttgggcatacccatctggaa

SEQ ID NO: 62638 - DNA, 1208 bp, Homo sapiens
tttcgtcctacagggagagactgttctgcacagtttctgagtagggtagcttgagtgtcaatcattgttattcagaattgttcatttttcttataagttgggcagacctggtcaacatctgtgttcttcctataaattagaattggagatgttaaatctcaaagcatgcatcttgttgatattttacataattgcattttaattttttcttccccttctccagattacaattcctagaccttctgtggcatctacacagtcaacttcaggaagctttcactgtggtcagcagccagagaagaaagatcttcagcccatggagcccactgtggaactttactctccaagggaaaacttctctggcttggttgtgacagagggtgaacctcctagtggaggaagcagaacagatttggggcttcagatagatcacattggtcatgacatgttacccaacattagagaaagtaacaaatctcaagacctgggaccaaaagaacttcctgatcataatagactggttgtgagagaatttgaaaatctccctggggaaactgaagagaaaagcatccttttagagtcagataatgaagatgagaagttaagtagagggcagcattgtattgagatctcctctctcccaggagatttggtaattgtggaaaaggatcactcagctactactgaacctcttgatgtgacaaaaacacagacttttagtgtggtgccaaatcaagacaaaaataatgagataatgaagcttctgacagttggaacttcagaaatttcttccagagacattgacccacatgttgaaggtcagataggccaagtggcagaaatgcaaaaaaataagatatctaaggatgatgacatcatgagtgaagacttgccaggtcatcaaggagacctctctacttttttgcaccaagagggcaagagagagaaaatcacccctagaaatggagaactatttcattgtgtttcagagaatgaacatggtgccccaacccggaaggatatggttaggtcatcctttgtaactagacacagccgaatccctgttttagcacaagagatagactcaactttggaatcatcctctccagtttctgcaaaagaaaagctcctccaaaagaaagcctatcagccagacctagtcaagcttctggtggaaaaaagacaattcaagtctttctttgcggact

SEQ ID NO: 62639 - DNA, 420 bp, Homo sapiens
tttcgtagcctcgcctcgggtgtagggattgcatagaaaagcaaaactacacagtcttgactgtgtagttttgtttttaggattagaggctcaccgattcatgtcggagatggtcagaaaaaccaactctccataggacgtcgtttcagaagcaaccttgggcttagtcccaccctttttaggcactcttgagaaatcagagtgcctagaaagatgacaactcaagcaccgacgtttacgcagccgttacaaagcgttgtggtactggagggtagtaccgcaacctttgaggctcacattagtggttttccagttcctgaggtgagctggtttaaggatggccaggtgatttccacttccactctgcccggcgtgcagatctcctttagcgatggccgcgctaaactgacgatccccgcc

SEQ ID NO: 62640 - DNA, 924 bp, Homo sapiens
cggggttttacccgacttttttgcgcggtaaagtggtgcgtactgaagatgaaatgggtttgcgcgtggcagaaacaccggaatcagtgattgcccgtacccgcaaagaaaacgaccttggcgtgggttattatcagccgtaattctcaggcctgccgttccggtgggccttgttttttctctctttatccccatctttattgcaatgcttgcgcctttttcctgtggcgtgaataatttccttataggccggtgaatgttcagcttccggcggcatacagataagaggaacggtttgaacatagacactcgcgaaatcaccctggagccagcagacaatgcgcgtctgttgagcctgtgcggcccgtttgatgacaacatcaagcagctcgaacgccgtctcggcatcgagatcaatcgccgcgataaccactttaaactgaccggccgtccgatttgcgtcaccgctgcggcagacattctgcgtagcctgtatgtcgatactgccccgatgcgcggtcagattcaggatatcgaaccggaacagatccaccttgcgattaaagaagcgcgggtactggagcaaagcgcggagagcgtgccggagtacggcaaagcggtcaatatcaaaaccaaacgcggcgtaattaagccgcgcacgccaaaccaggcgcagtacatcgccaatattctcgaccatgacattaccttcggcgttggcccggcgggtacgggtaaaacctacctggcagtggctgcggcagttgatgccctggagcgtcaggaaattcgccgtattctgctgactcgtccggcagtagaagccggtgagaaactgggcttcctgcctggcgatttaagccagaaagtagacccgtatctgcgcccgctgtacgacgcgctgtttgaaatgctgggctttga

SEQ ID NO: 62641 - DNA, 435 bp, Homo sapiens
agggtgtctatatcgaagaacatgatggtcgtaagcaagtttggtgctatgtcatcaagcctcgtgatgcgcaaagcaccctgttgaaaggggaaaaattatgagtcaggctaaatcgaacaaaatgggcgtcgttcagttaaccatactgacgatggtcaacatgatgggctccggtatcatcatgctgccgacaaagcttgccgaagtcgggacaatctcaattatctcctggctggtgacagccgtaggctcaatggcactggcatgggcattcgcaaaatgcggtatgttcagccgtaaatcaggcggtatgggcggttatgccgagtatgctttcggtaaatccggtaactttatggcgaactatacctacggcgtctcactgctgattgctaacgtcgcgattgctatttcggcggttggttacggcac

SEQ ID NO: 62642 - DNA, 307 bp, Homo sapiens
gatctttattgaccttcccacgcccggcgtgcagcataaaaatacaacaaacacataacataaacaggagttaaccatggaaagtggtcatcgctttgatgctcagacgctgcacagttttattcaggctgtatttcgtcagatgggtagcgaggaacaagaagcgaaattagttgccgatcatttaatcgcggcaaacctggcagggcatgattcacatggtattggcatgatcccaagctatgtacgctcctggagtcaggggcacctgcaaattaaccatcatgccaaaaccgttaaagaggcg

SEQ ID NO: 62643 - DNA, 445 bp, Homo sapiens
gcaggacttcggccgagtggtctgtacaggcggcacggtttgatggcagagatattttctttccaactgttttatatgatgaacgaagatgcagctcagaaaagcgaccgtggagagaagttcaacggcagtagtcagaggagaaaaagacccaagaaggtaaatcgccggaattaggaatgtctgtgtataaatatgtatgtgtgtgcatgtgtgagtgtgtaatatcagcaaggctatggaaaccgtggagcattatgagtaactgtagacgataacagtgccaagccttgctttttaaagaggcaggtgcaaactgctgctttttgagaatagtaaaggagccatggctcataatggatacactgactggagcatggtgaagtgaatagagataaggtgtgttccacatgtggattactgaggaccgtggccactgatggat

SEQ ID NO: 62644 - DNA, 464 bp, Homo sapiens
cacgctgcaggaaataccgcgtgcggcatacaacagttgaagctggttaagataaaccggcttgtaacctgcgggtaattgagattcgatttgcgtgcgggctttttctgccgcaccttcaggcaatggctggatccccgccattattgccgtggcttgcgcctgcggcagtgcctcgccctgttcactgacagccaccgggctgtcgccagggattacttcaggctcatcggcctgcgcattgaacagtggagcgaatgttacggccaggcacaaactgattgccgacagctgacgaccacacatcatattaagcaacatcccttgccccctgtttttatcatactctgaatagccaggctgttattttacgacttgcctgtacaacgccaatactcacgaaagtatgacgagcaagcctgttactcatcaggcttatcttcagtatataaacgccgatacgg

SEQ ID NO: 62645 - DNA, 728 bp, Homo sapiens
cgtggaatgttaaataaatggtggctcagtagcatcttggatatgaaggacaccgcatcagaaatgacctcacagcacctaatcagttccagaaaagggctttgttctcctttggagtcttctttggccaagtcaccacagggaccccagtgatggccagactagggtcatcatctgcgtgctccttcaggacgttcttcacaccctccaggagtgcctgggggtcctcgatgccctcggggacacacttcttgttctccgggagggattccagtttctccaccagagctttcaggcccttcagttcaaactcagtgagatgggtccatttggcagagacctccgtggcgggagagccggtgggggtcttggggtagtctacggccaatgtggtggacttcacactttcctccgactcattagacaaagtccttttgaggaatcgcagggcaggtgctttgggcttcttcccgagggcctcctggtcctcagagggcgtgctggtgggtgaagtggagccatcggtgggcggtttgggtgccctgtccctgccctcgccctcctcgtccttctcctcctcctcctgaggctgctgatcacaggcctcctcctccatctccagccaggaatccgaagagaagccgtctatgctgggcttcctcggggcatcaataagcatcgactccctctggtattcctgagtgaggtgggagcgctgggtcacacag

SEQ ID NO: 62646 - DNA, 1237 bp, Homo sapiens
ggttatacaaactcttaacaaagtgtgcctcagattttcttcttctcttttctctctgaactgaaaagggatactgggtttcctcctagcttttttttttaaacccgtcctagccagggtccacacattttaacacgctgcctgaatgggggctctttctctctgcaggttcagtgaacagcattttggacaggacatttggtgccaggtctgagtagccagtttgctgaattattgtcccagtcagccaggattgtgagctgtttgggaagtttcgtggaaacgcccaagtgccagcacaggtggagggacacctggaggccagtttcaggaacttttgccacaagtataaaagacttcagaagtgcaaagatgctgaaacagatactgtcggagatgtacatagatcctgatctactggcagagctcagcgaagaacagaaacagatcctgttcttcaagatgagagaggaacagatccgacgatggaaagaaagagaagcagctatggaaagaaaggagtccctgccagtgaaacccagaccaaagaaagagaatggcaaatcggttcattggaagcttggagctgataaggaagtctgggtatgggtgatgggcgaacaccatctagataaaccctatgatgtgctctgtaatgaaattattgctgagagggcccggctgaaagcagaacaggaggcagaagagcccagaaaaactcactctgaagaattcaccaatagcttgaaaacaaaatcacagtaccatgatctgcaggctccggataaccagcagactaaagacatctggaagaaagtggcagaaaaggaggaactggagcaaggatcgaggccagcaccaaccctggaagaagagaaaatccgatcactctccagttcttcaagaaatattcaacaaatgttggcagattcaatcaatcgtatgaaggcatatgcatttcaccagaagaaagaatctatgaagaaaaaacaagatgaagaaataaatcaaatagaagaagagagaacgaagcagatttgtaagagctggaaagaagactcggaatggcaggcatctctgcggaaaatccaaagcagcttgatgaggaagagacgctccttgggcttaaacaagcacggggaagacttccaaggggtttttcccttcgggggccccaggaaagggaaggagggcggttgaggaggctttccaaacccccttttgcgttgttttcccg

SEQ ID NO: 62647 - DNA, 3464 bp, Homo sapiens
gcggccgcgggctgcatgggcagcgcccgcgccccgccgctgagccgtcgcggagccgcgcagccctcggagcacgcccgtgcagcctgccaggactcttccagacacgggatttgtcggtgaacaacgcagagctgatgcagacataatatatacagccctgcacctgggacacacttccattggatttaaaagacagtcctcgtcagcactgactttcagctatggaatcgcagacggttgatgatgaagcgccggccgtgtaaatgaagatcgagtgaggagcaggacgatgcccaagggtagggtgcccttaaagccccccaacaaggaagagctttcccctcagcagcgaccatggtggagaaccagcctgggaaaaaagataaagataaagtttctctaaccaagaccccaaaactggagcgtggcgatggcgggaaggaggtgagggagcgagccagcaagcggaagctgcccttcaccgcgggcgccaatggggagcagaaggactcggacacagagaagcagggccctgagcggaagaggattaagaaggagcctgtcacccggaaggccgggctgctgtttggcatggggctgtctggaatccgagccggctaccccctctccgagcgccagcaggtggcccttctcatgcagatgacggccgaggagtctgccaacagcccagtggacacaacaccaaagcacccctcccagtctacagtgtgtcagaagggaacgcccaactctgcctcaaaaaccaaagataaagtgaacaagagaaacgagcgtggagagacccgcctgcaccgagccgccatccgcggggacgcccggcgcatcaaagagctcatcagcgagggggcagacgtcaacgtcaaggacttcgcaggctggacggcgctgcacgaggcctgtaaccggggctactacgacgtcgcgaagcagctgctggctgcaggtgcggaggtgaacaccaagggcctagatgacgacacgcctttgcacgacgctgccaacaacgggcactacaaggtggtgaagctgctgctgcggtacggagggaacccgcagcagagcaacaggaaaggcgagacgccgctgaaagtggccaactcccccacgatggtgaacctcctgttaggcaaaggcacttacacttccagcgaggagagctcgacggagagctcagaagaggaagacgcaccatccttcgcaccttccagttcagtcgacggcaacaacacggactccgagttcgaaaaaggcctcaaagcacaaggcccaagaacccagagccacagaaggccacggcccccgtcaaggacgagtatgagtttgatgaggacgacgagcaggacagggttcctccggtggacgacaagcacctattgaaaaaggactacagaaaagaaacgaaatccaatagttttatctctatacccaaaatggaggttaaaagttacactaaaaataacacgattgcaccaaagaaagcgtcccatcgtatcctgtcagacacgtcggacgaggaggacgcgagtgtcaccgtggggacaggagagaagctgagactctcggcacatacgatattgcctggtagtaagacacgagagccttctaatgccaagcagcagaaggaaaaaaataaagtgaaaaagaagcgaaagaaagaaacaaaaggcagagaggttcgcttcggaaagcggagcgacaagttctgctcctcggagtcggagagcgagtcctcagagagtggggaggatgacagggactctctggggagctctggctgcctcaaggggtccccgctggtgctgaaggacccctccctgttcagctccctctctgcctcctccacctcgtctcacgggagctctgccgcccagaagcagaaccccagccacacagaccagcacaccaagcactggcggacagacaattggaaaaccatttcttccccggcttggtcagaggtcagttctttatcagactccacaaggacgagactgacaagcgagtctgactactcctctgagggctccagtgtggaatcgctgaagccagtgaggaagaggcaggagcacaggaagcgagcctccctgtcggagaagaagagccccttcctgtccagcgcggagggcgctgtccccaaactggacaaggaggggaaagttgtcaaaaaacataaaacaaaacacaaacacaaaaacaaggagaagggacagtgttccatcagccaagagctgaagttgaaaagttttacttacgaatatgaggactccaagcagaagtcagataaggctatactgttagagaatgatctttccactgaaaacaagctaaaagtgttaaagcacgatcgcgaccactttaaaaaagaagagaaacttagcaaaatgaaattagaagaaaaagaatggctctttaaagatgaaaaatcactgaagagaatcaaagacacaaacaaagacatcagcaggtctttccgagaagagaaagaccgttcgaataaagcagaaaaggagagatcgctgaaggaaaagtctccgaaagaagaaaaactgagactgtacaaagaggagagaaagaagaaatcaaaagaccggccctcaaaattagagaagaagaatgatttaaaagaggacaaaatttcaaaagagaaggagaagatttttaaagaagataaagaaaaactcaaaaaagaaaaggtttatagggaagattctgcttttgacgaatattgtaacaaaaatcagtttctggagaatgaagacaccaaatttagcctttctgacgatcagcgagatcggtggttttctgacttgtccgattcatcctttgatttcaaaggggaggacagctgggactcgccagtgacagactacagggacatgaagagcgactctgtggccaagctcatcttggagacggtgaaggaggacagcaaggagaggaggcgggacagccgggcccgggagaagcgagactacagagagcccttcttccgaaagaaggacagggactatttggataaaaactctgagaagaggaaagagcagactgaaaagcataaaagtgtccctggctacctttcggaaaaggacaagaagaggagagagtccgcagaggccgggcgggacagaaaggacgccctggagagctgcaaggagcgcagggacggcagggccaagcccgaggaggtgcaccgggaggagctgaaggagtgtggctgcgagagtggcttcaaggacaagtccgacggcgactttgggaagggcctggagccgtgggaacggcaccacccagcacgagagaaggagaagaaggatggccccgataaggaaaggaaggagaagacaaaaccagaaagatacaaagagaaatccagtgacaaggacaaaagtgagaaatcaatcctggaaaaatgtcagaaggacaaagaatttgataaaaaa

SEQ ID NO: 62648 - DNA, 429 bp, Homo sapiens
ggggccgctgcggataccacctttatatcatttcccggataacctccaacggaacttaagccgtcaggtgccagggcgatataccccgccttcgccactcgccgtgccacatcttcgatatacggattcagtccacgattctcatgcaccaccactacggctggcgttttgccgctcatctttgcgggcttcaccagataaccccgcacctcgccgtgaccatttggcgaaggatacgtgatgtactcagcaacaatttccgggtcggtaaactctacctgagtcgccagcgcataatttggcttgagcaaatcaaacaacgctaatgccgacatcccgcctaccgcacttcgccgcacggttgaggaactcacgtttcgagattttcccgtgagcgaaaagacatagacatcagcagctcttgtgcga

SEQ ID NO: 62649 - DNA, 556 bp, Homo sapiens
gtcttgaggaattcttcagctcgctggtcgtcggctcaccactccagcccatacggcgataaacatcacgtccggaggttgaagcttttaactgcatcaaaccaatggcattcgatttactcaccgcgttcggattaccacccgattcgatagcgataatcgccgtgatcaattgtggatcgacgccccaggctgcaccggctttctggcttattggcatccactgcatcgcacgttgcaccggaactttcgcgttccacggcgggttcgtatagtcatgctttgatgaacaacccgctaataacacaatcaaaaaggcaaaccatctcaatttcacttcttctatccttatagcctggaatcgccgttgaggtgacaacggcacacctaagcggcatgatatacatttcgtttctgttgtcagcaaggaattgccatgtctctgtttcacttaattgccccatcgggttactgcattaaacagcacgccgcgctgcgtggtatccagcgccttaccgacgcggggcatcaagtcaataacgtctaggttattctc

SEQ ID NO: 62650 - DNA, 890 bp, Homo sapiens
accacgctgcaggaattcggcacgaggccaaaccaaagagaagtttttatgctgccagggatttgtacaagtaccgacaccagtacccaaacttcaaagatatccgatatcaaaatgacttgagcaatcttcgtttttataagaataaaattccattcaagccagatggtgtttacattgaagaagttctaagtaaatggaaaggagattatgaaaaactggagcacaaccacacttacattcaatggcttttccccctgagagaacaaggcttgaacttctatgccaaagaactaactacatatgaaattgaggaattcaaaaaaacaaaagaagcaattagaagattcctcctggcttataaaatgatgctagaattttttggaataaaactgactgataaaactggaaatgttgctcgggctgttaactggcaggaaagatttcagcatctgaatgagtcccagcacaactatttaagaatcactcgtattcttaaaagccttggtgagcttggatatgaaagttttaaatctcctcttgtaaaatttattcttcatgaagctcttgtggagaatactattcccaatattaagcagagtgctctagagtattttgtttatacaattagagacagaagagaaaggagaaagctcctgcggttcgcccagaaacactacacgccttcagagaactttatctggggaccgcctcgaaaagaacagtcggagggaagcaaagcccagaaaatgtcttcccctctcgcctccagtcataacagtcaaacttctatgcacaaaaaagccaaggactccaaaaattcctcctcagctgttcatttaaatagcaaaacagctgaagacaaaaaagtggcaccaaaagagcctgtg

SEQ ID NO: 62651 - DNA, 433 bp, Homo sapiens
ctgctgaattcggcacgagagacaatggcacctcgcaagggtaaggaaaagaaggaagagcaggtcatcagcctgggacctcaggtggctgaaggcgagaatgtctttggcgtgtgccacatcttcgcatccttcaacgatacctttgtgcatgtcactgacctctccggcaaggaaacaatttgccgtgtgactggtggaatgaaggtgaaggccgacagagatgagtcctctccttacgctgctatgttggccgctcaggatgtggctcacaggtgcaaggaactgggcatcactgccctgcacatcaaactgagggccactggtggtaacagaaccaagactcctggaccaggtgcacagtctgccctcagagctctggctcgttctggcatgaagattggccgcattgaggatgtcacccctattccat

SEQ ID NO: 62652 - DNA, 437 bp, Homo sapiens
atgactgctctatgtcagaccaggcgggatggaggcggcgggaccggctcgcgggtgcgggtccgggtgaagcgggaggcagccagagtcggagccgggcccgagcaccaggcgcagacgccacagccatggccatgatggtgtttccgcgggaggagaagctgagccaggatgagatcgtgctgggcaccaaggctgtcatccagggactggagactctgcgtggggagcatcgtgccctgctggctcctctggttgcacctgaggccggcgaagccgagcctggctcgcaggagcgctgcatcctcctgcgtcgctccctggaagccattgagcttgggctgggggaggcccaggtgatcttggcattgtcgagccacctgggggctgtagaatcagcttctcgcgaggggcggcgacggtcccctggtggcagg

SEQ ID NO: 62653 - DNA, 1076 bp, Homo sapiens
ttatgtgagaatgggcacatttatcttcctgttggagtattaattacaatagtgacaataccagtagccaccactcagtgggccagagcttatgccagacatgaagctcagtccttatctggttgaatcctcgcaacctcctatggggtgtagatcattctccaattttatcagatggggaaactgaggctcatggagaaactcagtaacaggcccatggccacacagataggtctatttgaatccaaagcctgtgcctctaacccactcttgagcctcctgctgagaatgccctgggatggccccatatgtgaggctggtcctgggggaggtaggcacccatgatctgcctctgctcctctgacttgcagttccggtacaaagaggctttcctgcgggaccgaggcctgcagatcgggtactgcagtgtcgacgatgacccaaggatgaagcatttcctcaacgttggcaggctccagagtgacaatgagtacaagaaggactttgccaagagtcggtcccagtttcacagcagcacagaccagcccggcctccttcaggccaagaggagccagcagctggccagtgatgtgcactacaggcagcccctgccccagcccacctgcgacccggagcagctgggcctcaggcatgctcagaaggcccaccagctgcagagtgatgtcaagtataaatcagacttgaacctgaccagaggtgttggctggacccctcctggctcctacaaagtggaaatggctcggcgggctgcggaactggccaacgcaaggggcctgggtctccagggagcttaccggggggcagaagcagtggaggctggagatcatcagagtggggaggtgaacccagatgccactgagattctgcacgtcaaaaagaagaaggccctgctgttgtgagccatgtccaccctgattcctgagaggccagagaggaagtttgttcaccagagacaggcttcagatggctttgatttcggcaagctggaatggcccaccagcccatcccagatcttcctttattaaaataataactctgaaagcagaaaaaaaaaa

SEQ ID NO: 62654 - DNA, 762 bp, Homo sapiens
atcattacgccaagcttggcacgagggtgtatgctgtaacatgaccacagttgggaagctgcagagttcaccaacttttctggggatcagcttttctttttctcaacggtaacttaagaaaccacctaaaaataaaatatactttaattattcccactagcatcctactgtgtctgcttgtctgctttccatgctctttcctgggagtaatgagatccacaagcagaagagtaaccagaaaggatcaaatgtctttgcgttgcttcattttctgttaggtgggaaactttcagcgacaattggcagaagctaaagaagacaactgcaaagtcacaatcatgttggagaatgtgctggcttctcacagtaagatgcaaggtgctctggagaaagtacaaatagagcttgggcggagggattcagagattgcaggcctcaagaaagaaagggatctcaatcaacagagggtgcagaagctggaagctgaagtggaccagtggcaggccaggatgcttgtcatggaggaccagcacaacagtgagattgaatctctacaaaaagctctaggtgtagctagagaagacaacaggaaacttgctatgagtctggaacaagctctccagacaaataatcatctgcaaacaaagctagatcacattcaagagcaattggaaagcaaagaacttgagcgacagaatttggaaaccttcaaagaccggatgactgaagagtccaaagtggaagcagaattgcatgctgaac

SEQ ID NO: 62655 - DNA, 1119 bp, Homo sapiens
tttttttttttcttccttttcaaagctggctcctcgatgactggctgctctaccttctttttggacttcatctttttctttgcggaggccttagggtcatcacttatggggatgtattccggagcctcaactttgactggcttctttttacttcctttcctagggctgctctccatggacctggagggcttggagtggcctgggagggcatctccctcctggtggattttttttttcttcttcaccttcccattgtgttctctggggctcttccgcttccgtttctgccccaaggctgcctgttcctcatccttcttccccactgagcaagtgtccccaacatcccttgcctccctggcctcacagaaccaagggtcctggaccgagaaggctgtggggtcctgggccccctttttttccttcttgtgttttttgagcttcttgccaactctggtttcctcctcaccctgtctagggtctggggaggttttcaccccagaggcatgggacatggctagaggtgacttcttatttttcttttccccactgaggaactccaagtggccaaacacctgcttcctgaggctgggtgacttctctgtccgtctagcaggcagcgtggtctcaggttctacatgctcctcgcaaagggtgctgacacccttctttttcttcttctttttcttcactagaggcatctcaggtgcctgcccatgggccacactcttagagggggatgtagctcttaaaggagaaacatcagcaaagtaatcatcattgtttaaaactgagtatcgagtctctggttctttgaccactttcttcttctttttcttctctgggagcccaaggtctactttgtgtgtcttggtgatcattccttgaaatagtgtagtcaggagagccaagacgacttcagaataggggagtagtcaagagagccaagacgacttcagaataggggagcagtcaagagagccaagacgacttcagaataggggagtggccaagagatctggtaagaacaaagaatccaccgggaggttgcgggtcaactcttaatccccttctctccccatctcttgccatttagaaaagtatagcatcctcctctttagc

SEQ ID NO: 62656 - DNA, 1255 bp, Homo sapiens
tagattggcacgagggcggcaggactcgggccggagcgtggccggacccccttccttcgaggggcccagggaggacgcgagtcacggtggcagcattgagagttggacacccgggtccttgaagtgatctctaggccccagccccaaatccgccaccattccgtgctgcggggacaccatggctccagaagaggacgctggaggggaggccttagggggcagtttctgggaggctggcaactacaggcgcacggtacagcgggtggaggacgggcaccggctgtgcggggacctggtcagctgcttccaggagcgcgcccgcatcgagaaggcttatgcccagcagttggctgactgggcccgaaagtggagggggaccgtggagaagggcccccagtatggcacactggagaaggcctggcatgcctttttcacggcggctgagcggctgagcgcgctgcacctggaggtgcgggagaagctgcaagggcaggacagtgagcgggtgcgcgcctggcagcggggggctttccaccggcctgtgctgggcggcttccgcgagagccgggcggccgaggacggcttccgcaaggcccagaagccctggctgaagaggctgaaggaggttgaggcttccaagaaaagctaccacgcagcccggaaggatgagaagaccgcccagacgagggagagccacgcaaaggcagacagcgccgtctcccaggagcagctgcgcaaactgcaggaacgggtggaacgctgtgccaaggaggccgagaagacaaaagctcagtatgagcagacgctggcagagctgcatcgctacactccacgctacatggaggacatggaacaggcctttgagacctgccaggccgccgagcgccagcggcttcttttcttcaaggatatgctgctcaccttacaccagcacctggacctttccagcagtgagaagttccatgaactccaccgtgacttgcaccagggcattgaggcagccagtgacgaagaggatctgcgctggtggcgcagcacccacgggccaggcatggccatgaactggccacagttcgaggagtggtccttggacacacagaggacaatcagccggaaagagaagggtggccggagccctgatgaggttaccctgaccagcattgtgcctacaagagatggcaccgcacccccaccccagtccccggggtccccaggcacggggcaggatgaggagtggtcagatgaagagagtccc

SEQ ID NO: 62657 - DNA, 1380 bp, Homo sapiens
cggcaggcccgggttgacccacgcgtccgggggggaggagctgctgtttgggtcagcagctgccctgctggagggagagggggggctgtgctcatcccctgttctcagattggatagccccgggccagcgctggaggaggagcagaggcagggaggtgggaggagcgtgcgcacaggcgtgggaggcctgaggagtaagcggctggatgtggaccctgagagccactggcagggaggtggggtctttcagttgtgaagacaccgtggccccggtgccctacgagacgctgaacaaacgctttcgcgccgctcagaagaacattgaccgggagaccagccacgtcaccatggtggtggccgagctggagaagacgttgagcggctgccccgccgtggactccgtggtcagcctgctggacggcgtggtggagaagctcagcgtcctcaagaggaaggcggtggaatccatccaggccgaggacgagagcgccaagctgtgcaagcgccggatcgagcacctcaaagagcatagcagcgaccagcccgcggcggccagcgtgtggaagaggaagcgcatggatcgcatgatggtggagcacctgctgcgttgcggctactacaacacggctgtcaagctggcgcgccagagcggcatcgaggacctagcgaatattgagatgttcctgacggccaaagaggtggaggagtccctggagaggcgtgagacggccacctgcctggcctggtgccatgacaacaagtcccggctccggaagatgaagctattgtggacgatgaaaggctctctgcagaggagatggatgagaggaggcggcagaacattgcttatgaatatctgtgccacttagaggaagccaaaagagcttccttgggtcttttccccactcgcagcccaatgatgataaatgcccagcaggacagtggcatatcagactgaagtccatcagtccctaagcaggtttatgacagcaatctcctctttaaaccgtgggtgtgtggccacttagggtatattgtctctaaaatcacattgactcttttaggctttttagattaaataaatgttgcgttctccaaggagaaagtgaagataaagagtcctaagtgcaaatactttcctcatgagaggaactgagagaactttatcctttgtggggtgaatactacagagttcatataccatgagttagagtttgattgaatgctttatgccagggtggagcgacagtattgttccctggacaaagatatgttccagccctcttagctatatagaaataaatacttggttaaatggtcactggtgttaattatctctgatcactgatgaatggctatctacagaactagaatgatgag

SEQ ID NO: 62658 - DNA, 1139 bp, Homo sapiens
attcggcacgaggcactctgcggcggcctctgcgcctcgggcgggcgggagagagaggccgcggccgccagcgtggggatgtctaggagctcgaaggtggtgctgggcctctcggtgctgctgacggcggccacagtggccggcgtacatgtgaagcagcagtgggaccagcagaggcttcgtgacggagttatcagagacattgagaggcaaattcggaaaaaagaaaacattcgtcttttgggagaacagattattttgactgagcaacttgaagcagaaagagagaagatgttattggcaaaaggatctcaaaaatcatgacttgaatgtgaaatatctgttggacagacaacacgagtttgtgtgtgtgtgttgatggagagtagcttagtagtatcttcatcttttttttggtcactgtccttttaaacttgatcaaataaaggacagtgggtcatataagttactgctttcagggtcccttatatctgaataaaggagtgtgggcagacactttttggaagagtctgtctgggtgatcctggtagaagccccattagggtcactgtccagtgcttagggttgttactgagaagcactgccgagcttgtgagaaggaagggatggatagtagcatccacctgagtagtctgatcagtcggcatgatgacgaagccacgagaacatcgacctcagaaggactggaggaaggtgaagtggagggagagacgctcctgatcgtcgaatccgaggatcaggcatcagtggacttatcgcacgaccagagtggggattccctcaacagtgatgaaggagacgtgtcttggatggaggagcagctgtcctacttctgtgacaagtgccaaaaatggataccagccagtaaggagcttctcaattcctttgatttgtcaattcctgtgtgaaggtttgtttttccaacctgtgaaagaaacgtgaatgtaaaagagacctaaataaaaggataattatatttattctctaggttgatcagctattaaatttatataaaacataggcatgtttgtactaatgaaacgtactgtcaacctctatcacattgttaaattaacacttttggtggtaactcaataaaattgagaaaattggaaaaa

SEQ ID NO: 62659 - DNA, 756 bp, Homo sapiens
  misc_feature (1)...(756): n = a,t,c or g
cggggcaagaagcacagcatcatcctaaggacccccgccagctgggtgccgagcgcgaggtcctcgcggaacgtgaacagcggcggccggctgggctcggggaagttggtgctgttgaaagggtccgtgtcgtccaagaactgcatcatggccacgctggcttgccgggtgctgttcttggacgacacggaccctttcaacagcaccaacttccccgagcccagccggccgccgctgttcacgttccgcgaggacctcgcgctcggcacccagctggcgggggtccataggctgctgcaggcgccgcacaagctggatgactgtactctgcagctctctcacaatggcgcctacctggatttggaggccaccctggcagagcagcgggatgagttggaaggcttccaggatgacgccgggcggggcaagaagcacagcatcatcctaaggacgcagctgtctgtgagggtccatgcctgcatcgaaaaactatacaactccagcggacgagatttgagaagggccctcttctccctgaagcagatatttcaggatgacaaggatttggtgcatgaatttgtagtggctgaaggtctgacatgtttgatcaaggtgggagctgaggctgatcaaaactatcagaactacatcttaagggctttgggccagattatgttgtatgtggatggaatgaatggagtaataaaccgcaatgaaaccattcagtggctgtacactctcattgggtcanagttc

SEQ ID NO: 62660 - DNA, 495 bp, Homo sapiens
ccgccatgccggaaccgcgcgggtcgtcgcagctgcgggtgaacgcggcgtttgccgcgcggtacaaccgctaccgggagcgcgaggaactgcagcggctgaaggatcgctacggggaccgagacagcagcagcgactccagttccgagtcggactcaagcgacgagcgcgtggaatttgatccccagcaggagcgggacttttacaaaacgctctccttgttgaagaagaaggacccccgcatttatcagaaagatgccaccttctataacagaacaggtccggggccactcctgtctaaacctctccttcctctggagcagaatccggggtcctttcctgactgtggattcagagaagtgacttgacttctctgagcctcttttcctgtctgtaaagtatatctaacggtagcatctcccctcagggctgttttaaggatggattgggatttacccagtttacacagttcatctgttttgactattgaatgaa

SEQ ID NO: 62661 - DNA, 978 bp, Homo sapiens
gtgattacaggcatgagccatcgcacctggccatgaaggcttttagatgggtctggagcttggaggagaagtctgaactaaggataaactaaagagaggccaatgagacttgaaccctgagcctaagttgtcaccagcaggactgatgtgcacacagaaggaatgaagtatggatgtgaaagaacgcaggccttactgctccctgaccaagagcagacgagagaaggaacggcgctacacaaattcctccgcagacaatgaggagtgccgggtacccacacagaagtcctacagttccagcgagacattgaaagcttttgatcatgattcctcgcggctgctttacggcaacagagtgaaggatttggttcacagagaagcagacgagttcactagacaaggacagaattttaccctaaggcagttaggagtttgtgaaccagcaactcgaagaggactggcattttgtgcggaaatggggctccctcacagaggttactctatcagtgcagggtcagatgctgatactgaaaatgaagcagtgatgtccccagagcatgccatgagactttggggcaggggggtcaaatcaggccgcagctcctgcctgtcaagtcggtccaactcagccctcaccctgacagatacggagcacgaaaacaagtccgacagtgagaatggtaagttttctttttggctttataatgttggcattcagtgcttctgtctgttttggttgactccgcgggggggggatgtttttctttctctctttcctctcatccttctttctctctctttcttgtccatttctttttgttttaatgtagtagaactcaagaaatgtccttgaataatgcattttttcctggaaaaaaaaatcaatatttgacatcagattgttaaattaggcaagcagtctacaatgttttggctatagttttgaaaaacaggttaatcatctacagaaaaaaaaaa

SEQ ID NO: 62662 - DNA, 362 bp, Homo sapiens
ccaggtggaacgcggacttgccctcggggtctagcttcgtgggcaccagccccttgcgggcgatgagggcggccacccgaggtgcatcgttgttttccacggcttgtagcagcctctcgtcactcttgccccagtcttgactctggcgcctgcctctggctgccggcttcgggatggggcaggggccgcagggcgggcaggagccaaggtcagtggggctgagccgcagctctgtcttcttaaatcgcgccctgagagtcttcatagttggtgccctgtgtttctcctctccacaggccacctgcatgcaaagaggcaggcttccttctgacagcagataacacgaaatcgtcgacccggga

SEQ ID NO: 62663 - DNA, 393 bp, Homo sapiens
accggctgccatcttagtctagggactgaggagtcgccgccgccccgagtcccggtaccatgcatttcacggtggccttgtggagacaacgccttaacccaaggaagtgactcaaactgtgagaacttcaggttttccaacctattggtggtatgtctgacagtggatcacaacttggttcaatgggtagcctcaccatgaaatcacagcttcagatcactgtcatctcagcaaaacttaaggaaaataagaagaattggtttggaccaagtccttacgtagaggtcacagtagatggacagtcaaagaagacagaaaaatgcaacaacacaaacagtcccaagtggaagcaaccccttacagttatcgttacccctgtgagtaaattacatt

SEQ ID NO: 62664 - DNA, 843 bp, Homo sapiens
gcggccgccaagcgatccctgctccgcgcgacactgcgtgcccgcgcacgcagagaggcggtgacgcactttacggcggcagcgtaagtgcgtgacgctcgtcagtggcttcagttcacacgaggcgccagcggaggcaggttgatgtgtttgtgcttccttctacagccaatatgaaaaggcctaagttaaagaaagcaagtaaacgcatgacctgccataagcggtataaaatccaaaaaaaggttcgagaacatcatcgaaaattaagaaaggaggctaaaaagcggggtcacaagaagcctaggaaagacccaggagttccaaacagtgctccctttaaggaggctcttcttagggaagctgagctaaggaaacagaggcttgaagaactaaaacagcagcagaaacttgacaggcagaaggaactagaaaagaaaagaaaacttgaaactaatcctgatattaagccatcaaatgtggaacctatggaaaaggagtttgggctttgcaaaactgagaacaaagccaagtcgggcaaacagaattcaaagaagctgtactgccaagaacttaaaaaggtgattgaagcctccgatgttgtcctagaggtgttggatgccagagatcctcttggttgcagatgtcctcaggtagaagaggccattgtccagagtggacagaaaaagctggtacttatattaaataaatcaggtgagtaaagagggtaccctttgtcttctgtgtacatgggtgaggtacgaggaaacagtctgatagtcactgaagactgattagatccaactctgatctcagcaaagccagagtacgtgcactttgcca

SEQ ID NO: 62665 - DNA, 346 bp, Homo sapiens
ggctgttcatttgaagatggagcgtgttctgggaattgtctctggagatggtgaatctgcccttcacggagtctgcgtagtatgtgttaccacccctataaataatggagacccactccagccccttccctggagcctggcggacccaagtcatgtagttgtcactgacggtgaatccagaggctgcacaggagagtctcagggacccccccggctggaccaagcctcccccagaccccaccagcagcacctcacactggacaccttttaaaaaagcaacaaggaaaacccagctcagcccaaactccatggcgagtcctctgtgttcagtgcagatcactgaatg

SEQ ID NO: 62666 - DNA, 942 bp, Homo sapiens
ttatattttaagagttgcaaatttcagtagggacggtgggtaaaaattactgaatgactgtgaatagttcatgcctccttaactctgttcctcctcttcagaatgtggctgagaccagcttcctggctctgaagatcagctattattgacacccattaaaataacttaaacacaagttagaattattcctagtcagttgttcaaaacagtggggtttatgttcatttataagtatagtgtgagatttttccaagtgtgacttccaaactgctttttatctcttgcagatctttgtagaatttgatggctgtaactggaagcaacactcctgggtaaaagttcatgctgaggaagttattgtgcttctgctggaagggtctcttgtatgggcgccccgtgaggacccagtccttctccagggcattcgagtctccattgcacaatggccagccctgacttttactccccttgtagataaactgggtttgggttctgtggttccagtggaatatcttctggatcgagagcttcggttcctgtcagatgccaatgggttgcatctgtttcagatgggaacagatagccaaaaccagattcttttggaacatgctgcactgagagaaacagttaatgctttgatcagtgaccaaaagctacaagagatattcagccgaggtccctacagtgttcaaggtcacagggtcaaaatatatcagccagagggggaagaagggtggctctatggtgttgtgagccatcaggactccatcactcgtcttatggaggtgtctgtaactgagagtggtgaaatcaagtcggtagatcccagactaatccatgtgatgctgatggataattcaacgcctcaaagcgaggggggtacgttaaaagcagtaaaatcttccaaaggaaagaagaagagagaaagcatagaggggaaag

SEQ ID NO: 62667 - DNA, 645 bp, Homo sapiens
gacccacgcgtccgggggaagactgttaaccccatccacgccaccagaattagctctttcccttttggtttgcaagcactgcctgtaaagccctcgcatgagaggccagcctgctagggaaatccaggaatctgcaacaaaaacgatgacagtctgaaatactctctggtgccaacctccaaattctcgtctgtcacttcagacccccactagttgacagagcagcagaatttcaactccagtagacttgaatatgcctctgggcaaagaagcagagctaacgaggaaagggatttaaagagtttttcttgggtgtttgtcaaacttttattccctgtctgtgtgcagaggggattcaacttcaatttttctgcagtggctctgggtccagccccttacttaaagatctggaaagcatgaagactgggctttttttcctatgtctcttgggaactgcagctgcaatcccgacaaatgcaagattattatctgatcattccaaaccaactgctgaaacggtagcacccgacaacactgcaatccccagtttaagggctgaagctgaagaaaatgaaaaagaaacagcagtatccacagaagacgattcccaccataaggctgaaaaatcatcagtactaaagtcag

SEQ ID NO: 62668 - DNA, 395 bp, Homo sapiens
gtttcacaggagaccctactatgaaaagcgaccttaattgactttattcacaaaaaatgaaaatcagcccgctgaatatgtaacattaattaacccgaacaatacgggcaaaaaacattcatgataaaaatatttattggtcattatattaacgtattttatagcactgccgatatcacgctcaaaaaacaaccactgctatttttagcaaagcttatggtatactccgccgccttaacatttttcaccgcaaattttcattgcaacatgacgaggaaaataaatgagtacgcctgatttttctactgccgagaataatcaagaactggcaaatgaagtctcctgcctgaaagcgatgctgacgctgatgctgcaggcgatgggacaagctgacg

SEQ ID NO: 62669 - DNA, 597 bp, Homo sapiens
atcgcttgccagataatctgggcactaaggcagccaatcatacctgccagcaatccaccgagcatatccagcggccagtggacgccaagataaacgcgcgaccaggcaatgacgacggccagcaccattaaaagtgagccggaccacaggcgatgccagcataaaaatgccagtgcaaaggtgaaaatcaccgtaccgtgatcgcttgggaatgagtcatccgccgcatgatgcaggaagttatagccgatattttcgacaaagggtcggtcgtgcggaaaaagatgtcccatcgtccaggacacaaacaggctgaccgccagcgcgatagcgatttttatcaccagttgccgttgtgctgtaagcccccacaaccaaagtaccacggccagcaacggcaccacggtaatcaaatctttagcaataaaaatcgccaacgagatcatccacggagccgagtctggcgtcgcgttaataagagagaatagagagagattcaaattttccagcataacttcccgacgcaaagtgattaaaagggagccaatacaggcaagtcgttgagaataaagtgcaggttaaactgggtaaagcggg

SEQ ID NO: 62670 - DNA, 207 bp, Homo sapiens
aatctcggtacccggacatccagcccatcgtaacggcccccatggttttacttaacacatgcgcgccaaaagcgcccagagccacaaaaatgaagccgctaatggcggcgaaaatcagcataaaacggctggtcatggtcgtaccctacgtaaattattgttcataacgaaagcggaatttttcttgttcagcagcggctttcgcca

SEQ ID NO: 62671 - DNA, 331 bp, Homo sapiens
aacgcgttgagcgggcaaatcaaaggcatgatgaacgttttacagagcggaaattaacggatggcactgctgaatatttttgatatcgccgggtcggcgttaactgcccagtcccagcgcctgaacgtggcggccagtaatctggcgaatgctgatagcgtgaccggtcccgatggacagccatatcgggcaaaacaggtggtattccaggttaacgctgcaccaggtgctgcgacaggcggcgtaaaggttgccgatgttatagaaagtcaggccccggacaaactggtttatgaaccgggtaatccgctggcagtagccacgggcttcc

SEQ ID NO: 62672 - DNA, 437 bp, Homo sapiens
gcattccttgaaagaaatgttacagccagatcacagcgcagaacgataaaatggcacaatccaacaacaattttacattttcgcgaccgctttggctgctttcaggtccgtttcaatgatatactgccagtcgttaattcaaaaatagttgataattacaacaatctattgaattgaaacgctttccttcgtaattcgcaactggaacacgcacgctatgagtaaacccattgtgatggaacgcggtgttaaataccgcgatgccgataagatggcccttatcccggttaaaaacgtggcaacagagcgcgaagccctgctgcgcaagccggaatggatgaaaatcaagcttccagcggactctacacgtatccagggcatcaaagccgcaatgcgcaaaaatggcctgcattctgtctgcgaggaagcctcctgcc

SEQ ID NO: 62673 - DNA, 397 bp, Homo sapiens
aagacttagcggacaggccacggaagtcacggatacgaggtacagcaatagtgatcaggcgctcaaagaactcccacatgcgttcgccacgcagagttactttacagccgatcggatagccctgacggattttgaagcctgcaacagatttgcgtgctttggtgatcagcggtttttgaccggagattgctgccaggtctgctgctgcgttatccagcagttttttgtcagcgatcgcttcaccaacacccatgttcagggtgatcttctcgacccgagggacttgcatgacagaattgtagttaaactcagtcatgagttttttaactacttcgtctttgtagtaatcatgcagtttcgccatcgtactactccaaattacttgatagtttcgctg

SEQ ID NO: 62674 - DNA, 494 bp, Homo sapiens
attaatggggccgaagaaaccgtaattgaccatttgcgccacttcgctcaaatgcaggtcaacgaaactcaccgcgccctgaatgatctttttacgtaaaccggacgatgtttgatatggcgcacgccaggaaacagcatcggcgtcagaaagtacatcgtcagcggcggcgctgattgacgcacccgtcagaaggcgaatttgatacggctttttggcctcatgctgttcgttagctctgcgggcaatcgcggggggtagggctttcggcgaacccgccggggtaaagccgctaaatgccaccatgtcgttatgctggataatttctgccgcttcattggcgggcatccttgtccactgagtttccatttttactccttcgttcgcagggattaatgaccaacgaaattaggtttacgtttttcgaggaaagcgttcatcccttcctgggaatcttcgctgtcatacaccgcgcggcgcatcccctgaatacc

SEQ ID NO: 62675 - DNA, 604 bp, Homo sapiens
aagccgataattagcgacgaatttcggaggttggatccttatgctcaatcagaaaattcaaaaccctaatccagacgaactgatgatcgaagtcgatctctgctatgagctggacccgtatgaattaaaactggatgagatgatcgaggcagaaccgcaacccgagatgattgaagggctgcctgcctctgatgcgctgacgcctgccgatcgctatctcgaactgttcgagcatgttcagtcggcgaaaattttccccgacagtaaaacctttcccgactgcgcacctaaaatggacccgctggatatcttaatccgctaccgtaaagtgcgccgtcatcgtgattttgacttgcgcaagtttgttgaaaaccacttctggctgccggaggtctactccagcgagtatgtatcggacccgcaaaattccctgaaagagcatatcgaccagctgtggccggtgctaacccgcgaaccacaggatcacattccgtggtcttctctgctggcgctgccgcagtcatatattgtcccgggcggccgttttagcgaaacctactattgggattcctatttcaccatgctggggctggcggaaagtggt

SEQ ID NO: 62676 - DNA, 355 bp, Homo sapiens
actgtgcaggtgcagtgccgtggcattcgttttctcccggctggcactgtattcgcctattaacgccatacgcaattcagtaaatccttgcgcgccgagtttttgggcaaatttcactatgctcgactggctaatgccgagctgtttcgccatctgccgtgaagaaacggattgcagctcactcacgttggcctgcagaaagtcagcgattttttgctcgttttcggtgaattcactccccgcattgcttattttcgtcaggtacaacatcttccactctcctgggctggcagcataaattccgcttaagttcttatgacgctcttcacactctgcgagtgtagactcaatgatt

SEQ ID NO: 62677 - DNA, 392 bp, Homo sapiens
cctggggaataagcgtgctcttggatgggtacttatgaatgtggcaatgagacaagaaccattcgagagtcgggtctgtttgcggtttgccaagcaccatgcgcggttatcctctgttataagctttctccagagccagataacgccgctgtctctggattgccgaaatatgcttcccgctacctgggaaggggctatcaactgtactgcacggtaatgtgacgtcctttgcatacatgcagtacatcaatgtattactgtagcatcctgactgttttagcatagctttcgctttgtgtctcctggtggctcgcttcagcatgacccaggtcgccttccgttgcgcgatttggttattacgcgtactctgtcaggaaaattgacgcagggga

SEQ ID NO: 62678 - DNA, 600 bp, Homo sapiens
aataaggcgatgcaggtaaaaaaggcggcaagcgtcgtcaggtcggtaaaaaggtaaactttgagccagacagcgccttccgcggtgagaaaaaaacgaagccgaaagcggcgaagaaagacgcgagaaaagcgaaaaagccatcggcgaaaacgcagaaaatagctgcagcgaccaaagcgaagcgtgcggcgaagaaaaaagtggcagagtgatcaataccctctttaaaagaagagggttagattgctgacaaaatgcgctttgttcatgccggatgcggcgtgaacgccttatccggcctacataatcacgcaaattcaatatattgcagagatcatgtaggccggataaccgtagtgcatcaggcaaaacgtaaacagcgagtacattaatgagcgaaatgatttacggcatccacgcagtgcaggccctgctggagcgcgcccctgaacgttttcaggaagtctttattttaaaaggccgtgaagataaacgtctgttaccgctgattcacgcccttgagtctcagggcgtggttatccagttggcaaaccgccaatatctcgacgagaaaagcgacggtgccgtgcatcaggg

SEQ ID NO: 62679 - DNA, 791 bp, Homo sapiens
acaaattcaatgtccgtacccgtacatcatgccgaccgggataaccctggccgtacccaacttgatctgcttgcgcccgacgatgaccagcgtcacttcgttatcggtaaaaccttgccccgcctccagactttcttgcatcagctcgatatttaatgagaagtagctcaacagttccggtaacggtgtaccaaacaatttgcgggagctttgggcgagcagttgttgcgcggcagggttggcgtaatggatcgccaggttgtcatcgattaacaaaatactgttaatcagcgagttgaggatctgcccagcatcgggctgcgtgcctgttgccataaagcagtctcctgaacaggttgcaccattttagtgcattatagctttttacggataaaaagcgcgaagcatcagagaattgacggagaaaaaagcccatgcagagatgggctacagatagctgacaaacttcacgttggagagcgactcacctgctccggcctaccacatcatcaccgtgtaggccggataagacgcatttgcgtcgcatccggcgtgatgtgcttgccaccgatcccaggcctgccagagacaggcgaaaagtttccacggcaactaaaacacttagacgctgtagtacagctcaaactctaccggatgcggagtcatacgcacgcggtcatcttcttcgcgacgcagagcgatgtacgcatcaattgcatggtcagtgagcacgccaccggcattcaggatctagcggtccagatctccgggtacggacgatggaattcgtg

SEQ ID NO: 62680 - DNA, 607 bp, Homo sapiens
ataactgaagccagttgactttcgttatcggaataacggaacagggcagagtgcagcaccacgttgccgccaaagaaagcaaaggcgttaatttcgtcgttgttgatcagaaaaaaatgaaacggtgtcttaaccgaattggcatgcgaaaccagacgcatccccagcgaattaatatattgcgttaacagcgggtcattaattaacggcgcgctgccgcgtagctggcggacataatagtcgcccatctgcatttcctgaccaatggaaagcgtgcttcctgcggaggttcccatatccggcaaggtgtctgcgctgtcggcaaacgccggggctacctgaccaatggtcatagcagcaatgagggttgcaaccaggttttttttcaactgcctgaacataacctctatcctgtatttctggagatagtcatttgaccgatactgtgaaatatcgttcccaccgcgccgcctttgagtgtaacggcgaagattagcccactcaaatgccttttcagtttcctgaatccgctcataaaaataaaagtgttttttgcggcgtttcgacactattgcggatctccgggtcggagatgaattgtaatcga

SEQ ID NO: 62681 - DNA, 555 bp, Homo sapiens
gccacaatggtcgtatcacgcgtaacggcggcttcaactgctttaacaatatcgcggctgttgccacgggtggaaatggctaacaatacatctcccgcatgacccagcgcccgcacctgttttgcatacacttcatcatgtaagcgatcgttggcaatcgccgttaagacaacattatcagtatttagtgcaatggcaggtaagctgggccgctccgtttcgaaacggttgatcatgctggcagcaaaatgctgtgcattggcagcggaagttccattaccacaacagaggattttgttgccattgagcagagactgaaccagcgtcatggctgcacgggagatggcatccggaagcgcctctgccgccgcaatttgagtttgaatgctttcagtgaagcaagctttaattctttcttgcacgctaatccttaaaccttaattatgagtggccattaaaggcatccttaatccactcaacctcattcccggtgaaggctaccacatcgaaccggcaatccacagtatcaaaactcccattatgacgcgcgagcca

SEQ ID NO: 62682 - DNA, 553 bp, Homo sapiens
tgtcccggggatgggttcgatagtaatcgtaccgtcatcgaagttgatgtggctgcgggtctgatattgatcggtgtatttcacgtagtccttaggaccagcgatcaccacctctttgaagccccagatgttctcaatattgtgggcaaattgccccatcagaatatcaaaaccgttggtatctttgacccaggcttcgttataggtatcgccttttttggtcgtcgaacaggagatgagcaacggcgcaatcaaagccagcgcgagatattttttcatcattccgggtgcgtgttgtgtttgtttttatgcaagttgccggaggcgtgctccggcactgtttttattttttatcttccggcgtatagccctcgatatgcacctctttaccctcgaacaggaagttgaccatctcctgctcaagcagcttgcggtgctcggcattcatcatgttgagtttcttttcattaatcagcatggttagcttgtgtagccacagcgtcctggcattttggagatctcgggtcggacctgaattgtaatcaggtcatag

SEQ ID NO: 62683 - DNA, 310 bp, Homo sapiens
ggagaggatacgcacatagttgctcaccccaacaaacgttgactcgatgttgggattgagcggcagacgtaaaaaactgatttcgatattcgacaccatcggccacgccaccagaccgcccagcagtaataagctgggcgcgagaagcagcagcgcaaagggcatatcggaacgacctgaaaaaagcctgttcattgcggattcctgtcctgggtttagtgctgttcgatcagttcatccagttttttctggctcgcttgcagcgatagtagagagatccccgggtccaacgctcgaagtcgtaacgaga

SEQ ID NO: 62684 - DNA, 423 bp, Homo sapiens
cgcttaaacaataacgtgcgctgttctggctgggtaaatgcatcgccgtaacgggtccattgcaaaacaagggtatcgaagccttgcaaacgtaactgactcatcagcccctgccactgggtatcggtaacctgactatctcggttttgtggttgccagataatacctttcatcgcaaaggaaaaagggctgaccaaaagcagtgtcagcaatacgaaaatgaacttacgcatttaccagtgcactccaatggtgagaaacgcgttgttgcgctctccgttacgttgattaatcgccttaaaggtatgttgatactcgacgccgagactgactttgtgcggacaggcgtcgtaaagcgtctcgccggtccagatattccaacggaccccgacttcgccaagctgcgcgctctgaagtgcctta

SEQ ID NO: 62685 - DNA, 335 bp, Homo sapiens
atccgcttcttcttccagggcccagcgatgctgacgaaaactcgctaaccactgttctggcgtatctccagtaaagcgatacgccagactctcgccagagatcgcgcatgtcagttgcataccattcacgagagcgggaaaacatacacattttttattctcgtcccactcttccctgtccggaaactggatggcctgattcacgcggacaattcctcctgcaattgctttataactggttctacgtcaggcagaacaccgtgccagagaagaaaggcatgagccgcctgtgccaccagcattcctaaaccatcagcattacgctttgagcctcg

SEQ ID NO: 62686 - DNA, 279 bp, Homo sapiens
ttacgaattccatgtccgtacccgtacatcacggctggtgggacgaccctcacgatccccaactaaggttgcctgaaggacaattgccatatggcgaagcggcaaatttcgatcttgtgggtcagcgcgcactacaaatcggcgaatggcagggggaacctgtttggttagtacaacagcagcggcgtcacgatatggggtcggtacgtcaggtcattgatctcgatggtgggctgtttcaactggccggacgaggcgtacaactggcggaggtttacc

SEQ ID NO: 62687 - DNA, 529 bp, Homo sapiens
  misc_feature (1)...(529): n = a,t,c or g
aggccgaaaagaaaaacatcagacttggacatatacaactcctctgtgaatcggtttagtcagaagaagcaaaaagacactttaccgaagggtttaacattttttcgtgatactcatcaccatgacgcaaatgcgttgcataaatttacccaccaaaagtgatgcaaatcacataaatcacccttcattctgcaggactgcataaaagatgagccgattcaggcaatgtgatttgttgcatgctgactatagttaacattgcgcaacatttttataagggtacggagaataccatggcaacaacacaacaatctggatttgcacctgctgcatcgcctctcgcttcgaccatcgttcagaccccggacgacgcgattgtggcgggcttcacctctatcccttcacaaggggataacatgcctgctttccatgccagaccaaagcaaagcgatggccccctgccagtggtcattgtagtgcaggaaattttcggcgtgcataaacaaaacccccccatttgtnncttttg

SEQ ID NO: 62688 - DNA, 471 bp, Homo sapiens
gcaggaaattcaaatcacttctgtcagagaagactactggcagcgccactatgttggcgctcgtcgggtaatgaccccaaaaacacttcgctaaaactttaccctgttgttacggcaacagggtaagttcatcttttgtctcaccttttaatttgctaccctatccatacgcacaataaggctattgtacgtatgcaaattaataataaaggagagtagcaatgtcattcgaattacctgcactaccatatgctaaagatgctctggcaccgcacatttctgcggaaaccatcgagtatcactacggcaagcaccatcagacttatgtcactaacctgaacaacctgattaaaggtaccgcgtttgaaggtaaatcactggaagagattattcgcagctctgaaggtggcgtattcaacaacgcagctcaggtctggaaccatactttctactggaactgcctggcaccga

SEQ ID NO: 62689 - DNA, 344 bp, Homo sapiens
tgggttagcatccgcctgcgcaaggatagatttaccgatactgtgggtttcggcagcagtaaacgctttgccgtagtaaggttcccatttcacataccagagaccggcaatgacaacgagaaagaaaagcgcgggtttccaccactgaatgggcgttgccgcctgagatgaagactgaccagtcatagcattccccaggaataagttatgataattgagcgcgtgaatattacgctcactatcaattcttgggaataattattcagctcttttgcgtaattctgaagagcttaaaatcgtcacgccttcatgctcaggccgtgtagactctgccatacatgagg

SEQ ID NO: 62690 - DNA, 434 bp, Homo sapiens
gagtgactcatagacacctctgatactcgtttcgatgtctgccaccttagtgtctgtagctaaaggcaatttgatgtaaatcaaacgataagataactttatctatcattgatatttatcattacccatagtgagtacagtgacttcataaaaattatgagatttttcacggtgctgtaaaatccctacccttaccgatgtaaagcgactaaccacacggcaaataaggagtaactctttccgggtatgggtatacttcagccaatagccgagaatactgccattccagaatgtatcgtcacattcattaaggttattgctcatttaaagcctgaaggaagaggtttacatgcttaaacgttgtctctctccgctcaccctggttaatcaggttgcgcttattgtgttgctttctactgctattggactggcag

SEQ ID NO: 62691 - DNA, 703 bp, Homo sapiens
  misc_feature (1)...(703): n = a,t,c or g
cctcgcgggcttgccagcgcatcgcttcttctgcaccatcgtaatggattgcgcatcgttgataacattcacaaaaagtgacctcagcaccgcgcgccgtcagggtatccccaattagctcacgaccaccattgccacgtaatatcagcgcacgtttgcccgcaatattttgtaattcaggtaattgtagcaagacttcgctgatttcccgatcctgcgggtagagaatcttctgtccacttacggtatgtagtgccagtgcggtggtgcgtccaatggcgaaataatcaggtagtcggggccatttacgatcttgctgatgcagctgtgattgggcaaaagcaaccgcgtgttgcgagagggcaaacaacagatcgctctcccccagcgctgccagttgatcagcaagttgcggtaattgttgacccggagaaaactcaatcagcggaaaatgccaggccacctgccccagtgtgcgcagacggctcactaactcttctccagcgggagacgggcgggtgacaaggatactcatgccggggcgtctccgttatagacttcagcgaggatctcgcgcgcgccgttattcagtagctcttctgccagcgaaatccccatttgttcggcatcttgcggcgcaccgcggcgttcaccgcgaataatctgcgaaccgtccggcgcgccgaccagcgcacgcagncag

SEQ ID NO: 62692 - DNA, 345 bp, Homo sapiens
aacagttccggcagcaggctgctggagctttttgccatgtgctgatacagctggcgatagtcgtgcgccatggtatccagtaattccgcgctgcgggcaaagtggctaaccagctcttcgcgatactcgtccagttcagctttattcttttccagttcgtactgcaacgcctgttgctggcgtagtttacgattaccaaaacgcatggccacagcaccaataatgatgccgacgactaacccaattagcgcatattcccaggtcatgaacatctcccgttgtcttttgtttccgtagggtgttggcttcaggctccatgcctgcggctgattatgccactataag

SEQ ID NO: 62693 - DNA, 418 bp, Homo sapiens
taccaattcaaggtcggacgcgcggatcatggaactgcgagctgaatacccggctttgttcgcggtgtgaacattaagctgggcctgccctttattcgcacatcagtggaccacggcaccgcgcttgaactggcgggacgtggcaaagccgatgtcggcagttttattacggcgcttaatctcgccatcaaaatgattgttaacacccaatgaataatcgagtccaccagggccacttagcccgtaaacgcttcgggcaaaactttctcaacgatcagttcgtgatcgacagtattgtgtctgccattaacccgcaaaagggccaggcgatggtcgaaatcggccccggtctggcggcattgaccgaaccggtcggcgaacgtctggaccagctgacggtcatcgaacttgaccgcga

SEQ ID NO: 62694 - DNA, 211 bp, Homo sapiens
tgctggtggaggcgtaagcgtatgaagatgttgcgcgatccgctgttctggctcattgctctgtttgtggcgctgattttctggctgccttacagccagccgctgtttgctgccttgttcccacaactgccacgacccgtttatcagcaagaaagttttgcagctctggcactggctcatttctggctggtgggaatttcgagtttgtttg

SEQ ID NO: 62695 - DNA, 196 bp, Homo sapiens
ccaggaagcccgcccagcttagtaagcccagggaaacagccacccatccccagataccggagagaatgcctgttgtgattgcaatagagagaagtatgttcatgccgcgcatgatagcagaaaacgcggccatgaatgagatcgagcacacattttatgcaacaacaaattatccgttgcagttatgagtgacgta

SEQ ID NO: 62696 - DNA, 526 bp, Homo sapiens
aacacaacaggtgattatgcgcatattgctgagtaatgatgacggggtacatgcacccggtatacaaacgctggcgaaagccttgcgtgagtttgctgacgttcaggtggtcgcccccgatcgtaaccgcagcggcgcttcaaattctctgacactggaatcctccctgcgcacgtttacctttgaaaatggtgatattgctgtgcaaatgggaaccccgaccgattgcgtctatcttggcgtgaatgctctgatgcgtccgcgcccggacattgttgtgtccggaattaacgccgggccgaatctgggggatgatgttatttattccggtacggtagccgccgcgatggaaggccgtcatttaggttttccggcgcttgccgtctcgcttgacgggcataaacattacgacactgccgcggcggtaacctgttcaattttgcgcgcactgtgtaaagagccgctgcgcaccgggcgtattcttaatattaacgttccggatttacccttggatcaaaataaaggg

SEQ ID NO: 62697 - DNA, 691 bp, Homo sapiens
  misc_feature (1)...(691): n = a,t,c or g
ggagtgtatttctccattttgagtcagttgaaaaggaatattgaatggaagatttgaatgttgtcgatagcataaacggcgcgggaagctggctggtagctaaccaggcgctgctgctaagttatgcagtaaacatcgtggcggcactcgcgatcatcatcgttggtttgattatcgcgcggatgatttccaacgcggtgaatcgcctgatgatctcccgtaaaatcgatgccactgttgctgattttctttctgcattagtccgttacggtattatcgcctttacgctaatcgctgcactgggacgcgtgggtgtacaaaccgcgtcagtcattgctgtactcggtgccgcaggcttagctgttggtctggctttgcaggggtcactgtctaacctggccgctggcgtgttacttgtcatgttccgcccgttccgtgccggagaatatgttgacctgggcggcgtagccggtactgtgctgagtgtgcagattttctccaccaccatgcgtactgcagacggtaaaattatcgttattccgaacggtaaaattattgccggaaatattattaacttctcccgcgagccagttcgccgtatggaannnnnnnnnnnnnnnnnnnnnnnnnnnnnnnnnnnnnnnnnnnnnnnnnnnnnnnnnnnnnnnnnnnnnnnnnnnnnngaggtgac

SEQ ID NO: 62698 - DNA, 643 bp, Homo sapiens
gctttcgctcatcgtccgctattaacgtcgttaggttgcttattgcgtctgttacaaaccagtgaactggcattaccggcgctgcgtgggcgtttacagaaaaacgccagtgatgcgcagttatgtaccacacttaaactttcaggccgcaagatgttactggtccgtcagcgggaagaggccgcgcaggcgctgttcgcacttaatgatgttcgcactgagcgtctgcgcgatcgcataacgcaatggcaattatttcactgactccttcaattttatctcatggtcattgggagacagcggcgtaaaattaatgacatcagttaaggagttcgccatgaaacatgaccattttgttgttcaaagcccggataaacctgcgcaacagttgttactgcttttccacggtgtcggggataacccggtggcaatgggggaaataggcaactggtttgcaccgctgtttcctgatgcgctggtggtgagtgtcggtggcgcggagccgagcggtaatccggcggggcgtcagtggttttcggtgcagggtattacggaagataatcgccaggcgcgtgtggatgcgatcatgccgacgtttattgaaacggtgcgctactggcagaaacagagcggagtaagggcg

SEQ ID NO: 62699 - DNA, 609 bp, Homo sapiens
ggaatggattaaggctccttgttgacgaatctcgacacgagcctgagaggtgttggctataccagtaacttgcacaccactgccgctggtttgcaatgcgttgtccggtgcgatttcgataccgtaaatactggctccttccaacacgctattattgaggttaacttcacctgctcgcatgagtgttttaagatcaccgcatcaacctgacgctctaccgcctggatgaagtgatggaaggtaagctggatatgctgattgaaccgattatccaggaacatcaggccgaccaactggcggcgttgtccgagcaggaataatggaatatcaacactggttacgtgaagcaataagccaacttcaggcgagcgaaagcccgcggcgtgatgctgaaatcctgctggagcatgttaccggcagagggcgtacttttattctcgcctttggtgaaacgcagctgactgacgaacaatgtcagcaacttgatgcgctactgacacgtcgtcgcgatggtgaacccattgctcatttaaccggggtgcgagaattctggtcgttgccgttatttgtttcgccagcgcccttaattccgcgcccggatacggagtg

SEQ ID NO: 62700 - DNA, 696 bp, Homo sapiens
ttattagaacatgacacggattcattgtccgacgctgtacaacggagtgactgggaataccctggggttacccaccttaatagccttgcatgctagtgcaggtgcgacagaaagcgcattcaccgaaaccagacgtaataatgcttcacgcacaggtgtaatactcatacctaattgctccgccagatttttagtaatcaggcgtgcgccaggttttaatgcgccaatactaagctgatgtttcaggtcgttctcaacctgcagagtcaaactgacatgtttcatttttcccgttccaggcattttaattccttcgcgtgttttctgtccaaccctgcctgcatggcagaaggaattcacctggtgtattaaagtgaataatcataaaccactcacctttgttgttattagcagcagaacaatgatgtggttagttaattaaagctgaaaataagctttttgcctggattttaatggcggcttacgccgccgttgaaactttaatcatcacccgccacgcggatcaccactttgccgaagtttttacccttcagcaggccgataaacgtctgtggcgcattctttaaaccgtcagtaatttcttcgcggtagtggattttatcctctttcacccattgccccatctccctctgaaactcatggatgcggtgcccataatcctgagcgataataaat

SEQ ID NO: 62701 - DNA, 358 bp, Homo sapiens
caccgcaggttgtatctatcgcggcgaatgataagagtgtgtcggcggtcaatttcccttaagtaacgctatgttagggtgttgtgttctggatatctggggcatgacatggaagacgactgcgacattattattattggtgccggtattgcaggcaccgcttgcgcgttacgctgcgcgcgagcgggtttatccgttttgttactggaacgcgctgaaatccccggcagcaaaaatctttccggcgggcggttatatacccatgcactcgcggaactcctcccgcaatttcatctgaccgcgcctcttgaacgacgcatcactcacgaaagccctttccttgtaacgcccgatgggg

SEQ ID NO: 62702 - DNA, 451 bp, Homo sapiens
cgctggaagcactggctgaaagcatgggtattggttgaggaacgcgcaatgacgatcatccatcctctgcttgccagtagtagcgcaccgaattatcgccagtcctggcggttagcgggagtgtggcggcgggcgattaacctgatgacggaaagcggcgaactgttaacgttgcatcgtcagggtagtggtttcggccccggaggatgggtgcttcgccgtgcgcaattcgatgcgttatgcggtggattatgcggcaatgaacgaccacaggttgtggctcaagggattcgcctcgggcgtttcacggttaaacagccacagcgttattgtttgctgcgtattacgccgcctgcgcatcctcaaccacttgcagctgcatggatgcaacgcgcggaggaaaccgggcttttcgggccactggcgttggcggcaagcgatcctctagagt

SEQ ID NO: 62703 - DNA, 569 bp, Homo sapiens
actggtcgcgtatggaaaggttccgggtttggcggcgtgaaaggtcgttcccagttaccgggcatggttgaagatgcgatgaaaggtgatatcgatctggaaccgtttgtcacgcataccatgagcctggatgaaattaatgacgccttcgacctgatgcatgaaggcaaatccattcgaaccgtaattcgttactgatttcccgcaggtttaccccgtccacttcaggcgggggttcttaatactctccccgggcagccgtccgggggattaaccctgagataatgactgatggaactcattgaaaaacatgtcagctttggcggctggcaaaatatgtatcggcattattcccaatcactgaaatgtgaaatgaatgtcggcgtctatctcccaccaaaagccgcgaatgaaaaattgccggtgctgtactggctttcaggcctgacctgcaacgagcagaatttcattactaaatcggggatgcagcgttacgcggctgagcacaacattattgttgttgcgccggacaccagtccgcgaggcagtcatgtcgcagatgctgaccg

SEQ ID NO: 62704 - DNA, 409 bp, Homo sapiens
gacacttaagtacctccgaaatcctcttaagagcatctacgtagttcttttcactgtcgacaactgaacccagtatatatcttcttacaacctgttggaaatttggaagtacaatgatagaaaactgctttataatacacacagatacattttacttctatgctgaggcttgctgataagtaacttttctatttttagaaaacagtgcacaagggtagcctaattaaataacattacaggtacaaaacatacttcgccccattaatacaattatataatgtcttaaacctcaaactatgaactataactacagctgggacaaaaaaaattacagcactgaaaagaaattccttcatttatgcaacgataatatactgaattaacagattgtcttttatgtatccaacat

SEQ ID NO: 62705 - DNA, 618 bp, Homo sapiens
taacgcgaaggccagactgcgcgtactccaccgccagcgattttgtcaggccaacaatcgccgctttcgttaaggcgtacgccgtttcgccaggatcggccaccatatcaccagggactgaagacatcatcacaatgcgaccatctttgcgggcaatcatctccggcagcaccgccttcgtgacgttccatacgcctttaatattgatgtcaatatggaaatcgcgatcgtcatcgctcatatcgaggaaactgcccagacgacaaacgcctgggttattcaccaggatatcaatgcgcccttctttttccttcgcgcgtttgatagctgcggctaccgacgccgggtcacgcacatcggcgacaaccgccgtacagcgatgaccacgaccacacagttcgtccgccagcttttcgatctcaggggagatatccagcaagattaggttcgcgccatgacgtgcaaaagttctggcaattccttcgccaattccctgcaatgcgcccgtaatcagtgctgtcttgcccgtgagtttacccattttaatgctctccttgttaatacagagcgttacactccattccctctgaaaatacaggataaacaaaatattgctgc

SEQ ID NO: 62706 - DNA, 579 bp, Homo sapiens
aacttccgtgtcgacgatcccgcggggcttggcctctgcccggccacagagccggagctggaggtgctgtcccgtctggcggcgatccccgggcagggcccggggccggggtttgaagatgctgaacgtcccttcccagtctttcccggcccccaggtcgcagcagcgtgtcgcctccggggggcgtagcaaggtacctttaaaacagggcagaagccttatggattggattcgactgaccaaaagtggaaaggatctaacgggattaaaaggcaggttaattgaagtaactgaagaagaacttaagaaacacaacaaaaaagatgattgttggatatgcataagaggtttcgtttataatgtcagcccttatatggagtatcatcctggtggagaagatgaactaatgagagcagcaggatcagatggtactgaactttttgatcaggttcatcgttgggtcaattatgaatccatgctgaaagaatgcctggttggcagaatggccattaaacctgctgttctgaaagactatcgtgaggaggaaaagaaagtcttaaatggcatgcttcccaaggg

SEQ ID NO: 62707 - DNA, 449 bp, Homo sapiens
tttcgtagcgagctgagctgacagcgcggagctggcgctgtggagcgcagggagccttgctggttcctccgaccggcgtctgcgagtacagcggcggctaacctgccccggcttcaggatttacacagacgtggggcgatgcttgtgaccctgcagctcctcaaaggcccctagaagcctgtttctccgtacagtccaggacctccagccccatggagcccccgatcccacagagcgcccccttgactcccaactcagtcatggtccagccccttcttgacagccggatgtcccacagccggctccagcacccactcaccatcctacccattgaccaggtgaagaccagccatgtggagaatgactacatagacaaccctagcctggccctgaccaccggcccaaagcggacccggggcggggccccagagctggccccgacgcccgcc

SEQ ID NO: 62708 - DNA, 768 bp, Homo sapiens
ggccccggactccgacggcggctcggacgccgactcggaggtgggtccggggagcccgactcggaccgcggaggcagcggaggaggaaatggcaggtcctaatcaactctgcattcgccgctggactaccaagcatgtagctgtgtggctgaaggatgaaggcttttttgaatatgtggacattttatgcaataagcaccgacttgatggaatcacattgctaacattgactgaatatgatctccggtctcctcctctggaaatcaaagtcttaggggacattaaaaggttaatgctctcagtccgaaaattgcagaaaatacatattgatgttttagaagagatgggctacaacagtgacagtcccatgggttccatgacccctttcatcagtgctcttcagagtacagactggctctgtaatggggagctttcccatgactgtgacggacccataactgacttgaattctgatcagtaccagtacatgaatggtaaaaacaaacattctgttcgaagattggacccagaatactggaagactatactgagttgtatatatgtttttatagtatttggatttacatctttcattatggttatagtccatgagcgagtgcctgacatgcagacctatccaccactcccagatatattcttagacagcgttcctagaatcccatgggcctttgccatgacggaagtatgtggcatgattctgtgctatatttggctcctggttcttcttcttcacaagcacaggtcaat

SEQ ID NO: 62709 - DNA, 437 bp, Homo sapiens
tgctactctaggcggcggcggccgtggcggtgaagcgtgaggccggcatcgtctttccgtcctctgaggcgacggccgcggctgcacaggaataatgtatttgtggccttggacatgaggcagtcagtcctctgttgctgttaacataaggtcagggactgatgaggaaagcatggacctaatgaacgggcaggcaagcagtgtcaatattgcagctactgcttctgagaaaagtagcagctctgaatccttaagtgacaaaggctctgaattgaagaaaagctttgatgctgtggtattcgatgttcttaaggttacaccagaagaatatgcgggtcagataacattaatggatgttccagtatttaaagctattcaaccagatgagctttcaagttgtggatggaataaaaaagaaaaatatagttctgcaccaa

SEQ ID NO: 62710 - DNA, 1187 bp, Homo sapiens
aattgacgctcgtaggaccttgcacgagcgcctaagtccacagagacgggagtcgggtgggatcccaggctgggccccgcggcggctggattctcttccctggccaagtctctgagatcttctcccagggcgatgcaaagctactcgctaccagcttggacctgtctgcagtatctcctctgggacctgccatgctgaggacccattctcacctctgagggactcctgtcctaggactaaggtggagcctgggccatggtacagctggctcctgcggcagccatggacgaggtcacctttaggagcgacactgtgctgtcagatgtccacctctataccccgaaccatagacatctcatggtacggctgaacagcgtggggcagccagttttcctgtcccaattcaagcttctatggagccaagactcttggacagattcaggagccaagggtggcagtcacagagatgttcacacaaaggagcctccttctgctgagacaggcagcacagggtcccctccaggaagtggccatggtaatgagggtttctccctccaggccgggactgacaccactggccaggaagtggctgaagctcagctggatgaggatggggatttggacgtggtgagaagaccacgagccgcctctgattccaacccagcagggcctctgagagacaaggtacatcccatgattctagcacaggaagaagacgacgtcctgggagaggaagcacaaggcagcccgcacgatatcatcagaatagagcacaccatggccacgcccctggaggatgttggcaagcaggtgtggcggggcgccctgctcctggcagactacatcctgttccgacaggacctcttccgaggatgtacagcgctggagctcggggccggcacggggctcgctagcatcatcgcagccaccatggcacggaccgtttattgtacagatgtcggtgcagatctcttgtccatgtgccagcgaaacattgccctcaacagccacctggctgccactggaggtggtatagatagggtcaaagaactggactggctgaaggacgacctctgcacagatcccaaggtccccttcagttggtcacaagaggaaatttctgacctgtacgatcacaccaccatcctggttgcagccgaagtgttttacgacgacgacttgactga

SEQ ID NO: 62711 - DNA, 628 bp, Homo sapiens
gcgaccgcgggatagcaagctcccggagccggcggcgcaccaccatgacccagtcggtggtcgtacaggtcggccagtgcggaaaccagatcggctgctgcttctgggacctggcactaagggagcacgccgcggtcaaccagaaaggaatttatgatgaggcaataagcagcttctttagaaatgtggacaccagagtggttggtgatggtggaagtatttccaagggaaaaatatgttctttaaaagcacgagcagtcttgattgatatggaagaaggggtagtgaatgaaattctgcagggaccactgagagatgtatttgatacgaaacagctcatcactgatatttctggctcaggaaataattgggccgtgggtcacaaagttttcggcagtctttaccaagaccagattttagagaaattcagaaagtcggcagagcactgtgattgcttgcagtgtttctttataatacattccatgggaggaggtaaaatttttcactcatttgcctgtaacagtgttaaaggataagtgggaattcattttgcaaacgtaagtcttgtttttagacctgtgcttgataaagatagaactattcggagggtgtgtagtttgagtatata

SEQ ID NO: 62712 - DNA, 675 bp, Homo sapiens
gcgaccgccaaacaaaggtaccagtcgccgccgcgttaggaggaggagccggagcctctgcctcagcagccgctggacccgccgcccttcttccccatctctcccccgggcctgctggttttgggggggagaaggagagaggggactctggacgtgccagggtcagatctcgcctccgaggaaggtgcagctgaacctggtgttttagaggataccttggtcccagagtcatcatgaaggcccttgatgagcctccctatttgacagtgggcactgatgtgagtgctaaatacagaggagccttttgtgaagccaagatcaagacagcaaaaagacttgtcaaagtcaaggtgacatttagacatgattcttcaacagtggaagttcaggatgaccacataaagggcccactaaaggtaggagctattgtggaagtgaagaatcttgatggtgcatatcaggaagctgttatcaataaactaacagatgcgagttggtacactgtagtttttgatgacggagatgagaagacactgagacgatcttcactgtgcctgaaaggagagaggcattttgctgaaagtgaaacattagaccagctcccactcaccaaccctgagcattttggcactccagtcataggaaagaaaacaaatagaggaagaagatacgaaa

SEQ ID NO: 62713 - DNA, 962 bp, Homo sapiens
ccaaccttttattatacatatgtagtcatttcaaccttgaaatattggcacagataatttttaaagatgatcaaaaaggtaacagtttatatcctaagtttatcttcattattctaaagaataatgcacaaaaggtttatatctcaaatgtttttttaatgagtttcaccttgacaagtgtaagcattgagtgaaatacattttgaagatatatgtaaatgaatgatagttgctgatatttaatttttgtgctctaggacaaagttggagaatttgctaaactcagcaaaattgaactcctcgaagccactgaaaagtcaattggtcccccagaaatgcacaaatatcactgtgaactcaaaaacttaagggagaaagaaaaacagctcgagacctcatgcaaagagaaaactgagtatctacagaaaatggttcagaggaatgaaagatataaacaagatgtggagaggttctatgaacggaagcgacatttagatttaattgagatgcttgaagcaaaaaggccatgggtggaatatgaaaatgttcgtcaggaatatgaagaagtaaaactagttcgtgaccgagtgaaggaagaggtcagaaaacttaaagaagggcagattcctataacacgtcgaattgaagaaatggaaaacgagcgtcacaatttggaggctcgaatcaaagaaaaggcaacagatattaaggaggcatctcaaaaatgcaaacagaagcaagatgttatagaaaggaaagataaacatggtctctgttacccaggttggagtacagtggtgtgatcttggctcactgcagcctccgcctctcaggctcaaataatcctcccacctcagcctcctgagtagctgggaccacaggtgcatgcgaccacacccagattgaggaacttcaacaggctttaatagtaaagcaaaatgaaaaacttgaccgacagagga

SEQ ID NO: 62714 - DNA, 720 bp, Homo sapiens
gcggccgcacggtcccaacacgcggacttcgagcggtaccggttgacccgcgcggcctcctcggagtggacagtgaaggagcagctgggctaggtagtggggctgggcctgcccatgggggacccgtccacgtctccaggacatcagcctgagcctcttcgcagcctcgttttctgttgaccgagttctgcaaggggacgtagaggaaccacagcgttcttgcgcttgagaccgctgtgattttctgacattttggaggcagaaatgcctggggaaaggcccacagatgcaactgtcatccctagtgccaaaagggaacggaaagcgattacccttgacctcaaattggaagtgttacgacgatttgaagcgggtgagaagctcagtcagatcgcaaaggccttagatcttgctatctctacagtggcgaccattcgagatagtaaagaaaaaatcaaagcgagttcacaaatagctactcctctgagagcctctcggttgactcgccatcgaagtgcagtgatggagagcatggagcagctgctgagcttgtggctggaagaccagagccagccaaatgcgaccttgagcgccgccatcgttcaggagaaggctgagtttgatgacttacagcgtgaacatggcgaaggttctcaaacggagaggtttcatgcaagtcaagggtggcttgtgagattcaaggagtgccactgtttgccc

SEQ ID NO: 62715 - DNA, 667 bp, Homo sapiens
ctgcccccgccggcaccctggccatgacaggcaagtcggtgaaggacgtggatcggtaccaggctgtcctggccaacctgctgctggaggaggataacaagttttgtgcagattgccagtctaaagggccgcgatgggcctcttggaacattggtgtgttcatctgcattcgatgtgctggaatccacaggaatctgggggtgcacatatccagggtaaagtcagttaacctcgaccagtggactcaagaacagattcagtgcatgcaagagatgggaaatggaaaggcaaaccgactttatgaagcctatcttcctgagacctttcggcgacctcagatagacccgtatcttttctggagcaacttagaaggctgagtggtattttgatgcttggggagagtcagacaagactccagtcctgtaatgtgactgggtcatctctatgtggattagtcagtgtccttgcttgtcctctgtcctgcaatcaaggtgcacaaaaagcacatgtatttgtgaatgtcggaattgtcatacggtgtcacttgaagaagactcactctggaattaagactgcagtgatttcactgtgaattcttctataaagttacatctccactagtttattttggatctctgaaactattggttgattaaaaagagtagtt

SEQ ID NO: 62716 - DNA, 966 bp, Homo sapiens
gctatggacccctgaccccgtggggtcgctcggactcttaacgtgtggactgaccgctactgactgcaccgccaatccccccgtctctgccggccccttagcatgagcgagggggacccagccgggtgacattgtgcccgttggcggattctcgatttcccctcttccccgtcctcgtcctcctcctcccccatgaagtgattctgagtatcggggggtctctggattattgttctgacgaacccctgcttgtggttggggggtatttaatctgaggccttagggtccttcggtgtctttgagtgttttgtgtgtacatattttgctcttaaagtttataaatatacgtatattgagagtgtccacgtctcctcgctgaaccttaggaatcccttggcaccatgtcctgtgtgcattataaattttcctctaaactcaactatgataccgtcacctttgatgggctccacatctccctctgcgacttaaagaagcagattatggggagagagaagctgaaagctgccgactgcgacctgcagatcaccaatgcgcagacgaaagaaggtaagggccgcttggtcttaagatatttggtggctggagagagatactagctagaaggtgcctggcaggaagctaaccgccattatgtctctagtggggactgttcgttctagtactttggatacaactttcattgatagccaaggtttgcagcagttggccttggagtttcactggtttattttatttctgcatacttgggtcatctgtaacaggctaacccaaaacgtggaagcctgattattcttctcgctgttttttaaaatgagggagggaggagagggggatagctatctagactctttgagtgcttgtcttagggcgttttctaacttattttccatcaggagggcaggagagcctgtgcaaagcttgtttgttcaatcagcaaaaaaaaaa

SEQ ID NO: 62717 - DNA, 2457 bp, Homo sapiens
aacttcccaggagctccgagaggcggggaagtggcggtgggacgcaattccccgcgcggagtcgggcagtggcagcgggagaagcggcagccaggggcgcggcggggccggagagaggcggtcccctgggaggacggggtctcccctcgttgcctttgtagtggagaaggtggacaagtggcagtcggcgtgatcgcagggaagcggggccggcgcgggcggccgagggtccaggcgagcccgcgggcggacgggagatgccgctgctacaccgaaagccgtttgtgagacagaagccgcccgcggacctgcggcccgacgaggaagttttctactgtaaagtcaccaacgagatcttccgccactacgatgacttttttgaacgaaccattctgtgcaacagccttgtgtggagttgtgctgtgacgggtagacctggactgacgtatcaggaagcacttgagtcagaaaaaaaagcaagacagaatcttcagagttttccagaaccactaattattccagttttatacttgaccagccttacccatcgttcgcgcttacatgaaatttgtgatgatatctttgcatatgtcaaggatcgatattttgtcgaagaaactgtggaagtcattaggaacaatggtgcaaggttgcagtgtaggattttggaagtcctccctccatcacatcaaaatggttttgctaatggacatgttaacagtgtggatggagaaactattatcatcagtgatagtgatgattcagaaacacaaagctgttcttttcaaaatgggaagaaaaaagatgcaattgatcccttactattcaagtataaagtgcaacccactaaaaaagaattacatgagtctgctattgttaaagcaacacaaatcagccggagaaaacacctattttctcgtgataaactaaagctttttctgaagcaacactgtgaaccacaagatggagtcattaaaataaaggcatcatctctttcaacgtataaaatagcagaacaagatttttcttatttcttccctgatgatccacccacatttatcttcagtcctgctaacagacgaagagggagacctcccaaacgaatacatattagtcaagaggacaatgttgctaataaacagactcttgcaagttataggagcaaagctactaaagaaagagataaacttttgaaacaagaagaaatgaagtcactggcttttgaaaaggctaaattaaaaagagaaaaagcagatgccctagaagcgaagaaaaaagaaaaagaagataaagagaaaaagagggaagaattgaaaaaaattgttgaagaagagagactaaagaaaaaagaagaaaaagagaggcttaaagtagaaagagaaaaggaaagagagaagttacgtgaagaaaagcgaaagtatgtggaatacttaaaacagtggagtaaacctagagaagatatggaatgtgatgaccttaaggaacttccagaaccaacaccagtgaaaactagactacctcctgaaatctttggtgatgctctgatggttttggagttccttaatgcatttggggaactttttgatcttcaagatgagtttcctgatggagtaaccctagaagtattagaggaagctcttgtaggaaatgacagtgaaggcccactgtgtgaattgctttttttcttcctgactgcaatcttccaggcaatagctgaagaagaagaggaagtagccaaagagcaactaactgatgctgacaccaaagatttaacagaggctttggatgaagatgcagaccccacaaaatctgcactgtctgcagttgcatctttggcagctgcatggccacagttacaccagggctgcagtttgaaaagtttggatcttgatagctgcactctttcagaaatcctcagactgcacatcttagcttcaggtgctgatgtaacatcagcaaatgcaaagtatagatatcaaaaacgaggaggatttgatgctacagatgatgcttgtatggagcttcgtttgagcaatcccagtctagtgaagaaactgtcaagcacctcagtgtatgatttgacaccaaaaaaaaaaatgaagatactccatgctctctgtggaaagctactgaccctagtttcaactagggattttattgaagattatgttgatatattacgacaggcaaagcaggagttccgggaattaaaagcagaacaacatcgaaaagagagggaagaagcagctgccagaattcgtaaaaggaaggaagaaaaacttaaggagcaaagctactaaagaaagagataaacttttgaaacaagaagaaatgaagtcactggcttttgaaaaggctaaattaaaaagagaaaaagcagatgccctagaagcgaagaaaaaagaaaaagaagataaagagaaaaagagggaagaattgaaaaaaattgttgaagaa

SEQ ID NO: 62718 - DNA, 627 bp, Homo sapiens
ctcgctgactcgcttcgcttccccgacgcgctgggttcccggagcgcagagcccagcgttagcgggtgggctccccgaggccccctgccctcgccgggctgctccagggtgtcgctcctctggctgctcccgaaggggcttctggccctgaggacggtggtgccaagcgaacttcatttttaaaaagaactggtggatgagaagagcgagcgagggcgagctatggaccctgtgagtcagctggcctctgcgggcaccttccgggtgctgaaggagccccttgccttcctgcgagccctggaattgctttttgcaatctttgcatttgcaacatgcggtggctattctggaggcctgcggctgagtgtggactgcgtcaacaagacagaaagtaacctcagcatcgacatagcgtttgcctacccattcaggttgcaccaggtgacgtttgaggtgcccacctgcgagggaaaggaacggcagaagctggcattgattggtgactcctcgtcttcagcagagttcttcgtcactgttgctgtcttcgccttcctctactctttggctgccactggtcgttacattttctttcacaacaaaaaccgggaaaacaaccggggcccactg

SEQ ID NO: 62719 - DNA, 1261 bp, Homo sapiens
cgggcgaatataaaatgtgccctttaaaaagagtttggaaaaagccaaaatttttttaaagccatatcccaattttttttaggagggctttatttgaaaaccccggcccttattttattttttcgggccgggccattttccctcccttggtggtgggggggtgggggatattttaaaaatttttttataatactgttcaagcggtacttgggaaaaaagcctttggcaaagggtagttttttaaccttgatgcaggacttttaaccttccttaaaattcttctcccttatttctgttaacagttttccataagatgagatctctgaaacattagtgtatttctgcacagaaaatcattttggatgatgttaatggaaaccttattaaatgggagactgattcctatccgttttctcagttgttccctcctaatatggatgaggaagccaataatatgagaaaattcccattgtgatggtttgcttaggaatataggcagagattttaaaacatgatgtgttttgctttcatttaaaaatcatttaaaaagtcaagtcttaaataaagtgttatatttccaataattacttttcgtgaaattcctatttcaaaattgctttgcaagaaaaatgattcacttttttttttccacccgaatatagaaagaaaaaaataattatcggcccactctaatttatagttaatgcttctgtgcgtaaagatgtgtttttactcttagccagtagcagttagtggattgctttgaaattccatctagcttttgctgcaacagccagtagtacattgttttcttctctttcctcctttcaggttttcccatcatatgattcccggtcctcctggtccccacacaactggcatccctcatccagctattgtaacacctcaggtcaaacaggaacatccccacactgacagtgacctaatgcacgtgaagcctcagcatgaacagagaaaggagcaggagccaaaaagacctcacattaagaagcctctgaatgcttttatgttatacatgaaagaaatgagagcgaatgtcgttgctgagtgtactctaaaagaaagtgcagctatcaaccagattcttggcagaaggtggcatgccctctcccgtgaagagcaggctaaatattatgaattagcacggaaagaaagacagctacatatgcagctttatccaggctggtctgcaagagacaattatgtaagcccctcctccataccagtggctctccactct

SEQ ID NO: 62720 - DNA, 896 bp, Homo sapiens
gcgacgcgcgtgccctgtggccaaacactgcctggagtgagagcaaactaccagcgcagtggggccggcgcgagtgtgcgtgtgtgtgcgtgtgtgtgtgcgagcgcggtggaggggggggaccaactgcttcacactttcaacactgcactgaagagggagagcgagagagagactggagacgcacagatccccccaaggtctcccaagcctaccgtcccacagattattgtacagagccccaaaaatcgaaacagaggaaacgaacagcagttgaacatggacgaaggaattcctcatttgcaagagagacagttactggaacatagagattttataggactggactattcctctttgtatatgtgtaaacccaaaaggagcatgaaacgagacgacaccaaggatacctacaaattaccgcacagattaatagaaaagaaaagaagagaccgaattaatgaatgcattgctcagctgaaagatttactgcctgaacatctgaaattgacagtaagatgcacattttcattctttgctgctctccaagggcgtgttaatagtctggtgcgactcccagaaaatataagaataaatgtaaatataagttcctgacttaaaacttgtgctataccgtacagagtttcccgcaaactggagtaggtgctcccagctgaaggcaagaaatcatttataacctgtcttgtggaaagctcaagaagtaaaagaacagtacttctttcaaagtgtttgcttaaattgctgtgctgaatggacagccaattaaggccaaatgtgtggttttaaagttaaccaagtgcccgttgtcttttttgcaccactgcagactctgggacatctgggagaaagctgtagtcttggaattaactttgaaa

SEQ ID NO: 62721 - DNA, 844 bp, Homo sapiens
ggacttgtcggccgccgtagcccctgctaggacagcccgtgcgagcctgctggaggaggaagagaaaggcagagagagtcgggttacaagatggcggatctgtagtagttaccgcggcggcgggagagcaagcgagccctggggggcaaagagacgggagagtgggtgtatgcgcgggtgaagtgagaggtaacggggcctccgggcggagaggcctcagtggctcttgtcaccccttctcgcggctgaacctttggagccatggtgaattcgggcctctccgaagccgccgccgccgccaccgccactactgcctttaccgtctcctaagagtgaggagcgcggacgaggtaagcgaggaggcggcggctagagcggtggagacagcagccaccatgtcggatacgcggcggcgagtgaaggtctataccctgaacgaagaccggcaatgggacgaccgaggcaccgggcacgtctcctccacttacgtggaggagctcaaggggatgtcgctgctggttcgggcagagtccgacggatcactactcttggaatcaaagataaatccaaatactgcatatcagaaacaacaggatacattaattgtttggtcagaagcagagaactatgatttggctctgagttttcaggagaaagctggctgtgatgagatctgggaaaaaatttgtcaggttcaaggtaaagacccatcagtggaagtcacacaggacctcattgatgaatctgaagaagaacgatttgaagaaatgcctgaaactagtcatctgattgacctgcccacatgtgaactcaataaacttgaagagattgctgaaaaaaaaaa

SEQ ID NO: 62722 - DNA, 424 bp, Homo sapiens
tttcgtgcggagcaagcatcacaccatggcgtatgagtgttcctctgtgtagactcaacctgcgcctcgccgtcccccattcgcacacccgatgcccgggggtcgctacggacttaaaatctccgcaccgcaccctccacctcagaaacgttcctggatccgaacactgccccctgacgacctagagagatcccggctcccagcccactgagtggcttcagcctcgctggaagaagtctggaagaagaggaagaggaaagaaaaggagtcagggatggcccttactcaggtacggttgacatttagggatgtggccatagaattctctcaggaggagtggaaatgcctggaccctgctcagaggatcttatacagggacgtgatgttggagaactactggaaccttgtttctctgggactgtgt

SEQ ID NO: 62723 - DNA, 465 bp, Homo sapiens
cctgggtggatgggcgcttgggcgcctgggctgccggacggtgggaacggaagtcgctgtgggacgctgaggaagccaggatggcgactccgagcaagaagacgtcaactccaagcccccagccttccaagagagctctcccgagagacccttcgtcggaggtcccgagcaagaggaagaattcggccccgcagctgccgctgttgcagtcgtccgggcctttcgtggaaggctctatcgtccgcatctcgatggagaacttcctaacatatgatatttgtgaagtatctcctggaccccacttgaatatgatcgttggagccaatggaacagggaagtcgagcattgtgtgtgccatttgccttggtttagctggaaaacctgctttcatgggacgagcagataaggttgggttttttgggaagagaggatgttctagaggcatggttgaaattgaaatgctcg

SEQ ID NO: 62724 - DNA, 510 bp, Homo sapiens
tcctagttaccgcctcgacgatttcgtgccgcggcccggtaccaacgggtggtctcgccgagggagctgtcgtgcctcgtggtcccgggactgcagtggtgtgcgctctcggcgcgtggcgctaggcatggcgatggatcaagtaaacgcgctgtgcgagcagctggtgaaagcggtgacggtcatgatggaccccaactccacccagcgctaccggctggaagccctcaagttttgtgaggagtttaaagaaaagtgtcctatctgtgtcccctgtggcttgaggttggctgagaaaacacaagttgccatcgtcagacattttggccttcagatcctggaacacgttgtcaagtttcggtggaacggcatgtctcgattggagaaggtgtatctgaagaacagcgtcatggagctgattgcaaatggaacattgaacattttggaagaggagaaccatattaaagatgctctgtctcgaattgtagtggaaatgatcaagcgagagtt

SEQ ID NO: 62725 - DNA, 1118 bp, Homo sapiens
catgaactcccggccttaagtgacccacctgcctcggcctcccaaagtgctgggactataggtgtgggccactgcgcccggccagtgtattttaaaattataaagccgatatattacaaagtaaaatgcaggggaaaaaaagtcacaagaagtataaagattggatgcttcttgtgcttctttttgtaaaatacagatgatcctcaagaagtaacttgagcagattttctactggctttcaaattgataaccctacaccccctataaatttttacattccttaacagagctaaccataggaacttccaaataatttctcagtggaaatgagtcttcaaaatcacacatggctcataagagttttgcttttttaatgccttctcaaaggacccagactgctagattttcataataactactttaaccagatagacttactatagggtggtagttccccactaaaagatacttttctcttgcttagtagtcaccttcctgtgttctagagcttccctatgcttttaaaatatgcattattacaacagttctcctaaaaacaaaacccccataagagctgctgcactcggggagccctgaatgaattttaaagcagcgcctgagtcctgcattctttcttcattgtcctttttgcttaatttgcctgtggtgtaccatcaaccttacaatggagacagagagaaagtactccccctaacctatttaagaaacatttgcaatatactgttttttttttttacaagtctttaattaaaaaactcaacaaaaatatataattgagcattttacataatgcatacattcttaatatctgcaggtaagataaacaacagaaggcaaaagcagatatgctgtattgcttctttggcaactcaccaatatcatcccctgcagaaacagagtttttttttttttttttttaaatccatggtcttaaaataattgtcccttagtataaacaaaatatttagcaataatacagtagacggattcttcaaattcacaacaatttataatactttataccacaagggtaaactagtaagctgctttctaaaattaaggcagcagcagtgtttagagggggagtaaaaaaaaaa

SEQ ID NO: 62726 - DNA, 361 bp, Homo sapiens
  misc_feature (1)...(361): n = a,t,c or g
ccgtacgctgctactcccaactccatgcctaattcttcagaggaccacagggctactatcacaagcctgtgagacaaggacaatgctgactatcctggatgaaaatccttgctaatgctcctgcatgtctacccacggacccaaaggctgtttcacggctatgtctacctgtcctcagcctctgccatcatggtctacccctatgtctaggcacatggcaagaaggtgctgacttccttgggagatgccacaaagcacctggatgatctcatgggcacctttgcccagctgagtgaactgcactgtgacaagctgcatgcggatcctgagaacttcaagctcctgggaaatgcgctggtgn

SEQ ID NO: 62727 - DNA, 556 bp, Homo sapiens
gaaatgcctattttcatttctgatcttacttacttgtgttttttctctttttaattattcttactagaagtttatcaattttattactctttccaaagaacaagcttttggctttgctaattttctctattatttacttgttttaaaaaatgtattggtttctgctcttatctttattatgtttttcttctacttagtattaatttagtttgttcttttcctagcctcttaaggtagaaacttagataattgattttaagccttcctttactatatgggcacttgaaaagctatacatttccctctgaacactaccttcatttgctacaaacatttgctacattcaacaaatatttgaatgtgtgtgttttaattttcattcatcacaaacccgtggtcccagctattcaggggactaatgtgggaggatcacttgagcccaggaggttgaggctgcagcaagccatgattgtgccactacattttggcctgggcaacagagtgagaccctgtctcaaaaaacaacaacaacaacaacaacaacaacaaaaaaaaa

SEQ ID NO: 62728 - DNA, 392 bp, Homo sapiens
ggctgttaagtgacactgattctccccgccccgcctgacccccgagaaggaggcttgttccccgctgcgtgagggggtggggaagtgcttactgaattatgatctacctgggaggcttgagtacgattattgcgcccgctgtctatactggcgcgtttgccctggataggatgaccctgcccttcctcatcaccatgacctacttaccgcacttacacctgagccacggctctgtccaggttaccggcctcggtaagaaggtgtgctatgcactgaccaacgccgtgacgcacgtggacgacatgcccaacgcgctgtccgctctgagcgacctgtacgcgcacaagcttccagtggacccggtcaacttctagctcctatgccactggctg

SEQ ID NO: 62729 - DNA, 356 bp, Homo sapiens
ataaaattggctgcccaacattctgaactactaaggggaatttgctgtaggagaaccctaaatctcagaaagagatgacattaggctttgctcttatgggccgagaattagttaatgatttaagcaacttgatttaggggtacctctagtacttctctgctaaagcatttgtccagacaccgcgaatggcttgcaagacgcctttcttacgtactttttattcatgagcgagatgtgcatatgggcatgtttgccaccaatgtgactggaaatgtgctgaacagcagtaggtaagggcggtgcatggtgtctaggtgggaagaggcagggatggacggtaggagtgggaggaggat

SEQ ID NO: 62730 - DNA, 403 bp, Homo sapiens
cacgcattgctgagctccaactccctcagtacctgagttgccgaactctgctgctatgagcttgctcacaaggttaccgccgtctgagtcaacggaggggcttctgcggctgcacactgacactgaggctgcgctgaacggaaagggccacgggactggtaccctttacatcgatgaaagcctactgtcttggttagacggctctggactaagatatctactggaataccccaccattagtttacatgcattatccagggaccgaagggactgtctaggatagcattggctagtgatggtgaatgccaaatttgaagaagaatcgctagaacctgttgctgatgaagaacatgaagacagtgatgatgatgtcgaacctattactgaatttagatttgtgcct

SEQ ID NO: 62731 - DNA, 543 bp, Homo sapiens
tgtgtgtgtgtttttctttttaattctcaagactgtatatatatatgtagcttacaaagatatctaaagtctgaaaatgggtgtgtgcattttcagaatctaaaaattttgaggctgtaacctttggtcttggcacctctcagtggtccaggatggataaatacaagggcagcttgcctgggaataaagttaagagacaagtatttttgtttcctcttcataactgaggtggaaaagcagtagcctaaacaatgttagtcttgctggagagcgcatgaatgcgatcttagcaagaccctaaacctgtaactagtgtaattttgtgtttcctttttagctccggaccaaaatttaacagtgccatccgaggaaagattgggttgcctcatagcatcaaattaaggtttttaaacatacttctgaattgtttaaattgtttttcaaggaactaacatgctgtacttgtttggataacttctgaaactttttaactttgcagcagacgacgttcccgaagcaaaagtccattcagaaaagacaaga

SEQ ID NO: 62732 - DNA, 352 bp, Homo sapiens
taccttatccttgcatggccaggcatttacacttggtgatcatcacttcgcacagaggactcaccatggagattgggctgtgctgcgttttccttgtcgcacttatagaaagtgtccctcgtgaggtacaactggtggagtctgggggaggcttggtccagcctggggggtccctgagactctcctgtatagcctctggattcgacttcaataaatacagtatgaactgagtccgccaggctccagggcaggggctggagtggatttcatacattagtataagtagtcggaccatatactacgcagactctgtgaagggccgattcaccattttcagagacaatgccaagag

SEQ ID NO: 62733 - DNA, 339 bp, Homo sapiens
gtgaaaatgggtcattagtcacttgacccagaaatccccacaaaatcgtgcaaatccagaggttcaggtcttcttgatcactttaagaacgctcgtgaaactgcccaggccatcaagggtatgcatacgtgagaagtcaccaagtgtctgaaagacgtccctttatagaaacagtgtatgccattccgacttggcaggggtggagctggcaggtgtacctaggccaaacagtggggctggacacagggttggtgacccgaaaagagcgctgaatttttgctgcacacaattaaaaatgtggagagtcacactgaatgtgagggtgtagatgtaggctct

SEQ ID NO: 62734 - DNA, 385 bp, Homo sapiens
aatgtacaaaataaaataaaaattttaaaaaccctattataattatattttacgtaaatctcatggtaaccacaaagcaaaaaactttagtaaatacacgaaagataaaaattaaggaataaagcctaccactagagaaaatcacctaatcacaaaggaagacaagaagagaggaagaaagcaacaaaggatctacaaaacaaccagtgaacaattaacaaaatggcagtagtctttacccatcaataattaatttgaatgtaaatgtcttaaattctccagtcaaaagacagagactggctgaatggataaaaagccaatacccaactataaactgcctacaagagattcgcttcacctataagggacacaggtagactaatag

SEQ ID NO: 62735 - DNA, 460 bp, Homo sapiens
ggaattcggagaagacagctgttaccagggaggtcatacaacatttttttaggatgtctgaagatgattaaaaagtgaaattacgccgtcttgaaccagctatccagaaattcattaagatagtaatcccaacagacctggaaaggttaagaaagcaccagataaatattgagaagattatttatctcctggtcatcaaagatttcctttttttatttacccaaaggggacaggagtcagtctgtgtattggaagatgtgaccatatttggtgagagtggaggggtagaaaatattttgcaaatgagggatgtttactgccttcctgactgtagactgaaggaggcaaggactttgacattttccccaacgcctatctgtatttccaatgcctgtcacatagtacgtgctcaatggatattgattgaactaactaaaattgtccttatctactgtcaaac

SEQ ID NO: 62736 - DNA, 689 bp, Homo sapiens
  misc_feature (1)...(689): n = a,t,c or g
cagaaacaaagtaggtgtttaatttggcatgagagtaaatgtgtactcctagtcactaaaatgggctttgttggggaaaatttaaatgtttgtcttttttcattgagaatcctatgctgccggtgtatctgtctgatttttaaaggtgctgctgaatgtactgcctgctcagggttttcatgacagtattgaaatgaaaatgtattcagttatagtgttgaagtaatccaggtttaatttaaagactagtattataccaggggtttgaatttttgaaagattatgagtactacacaatgaaacgattatcgacatcacagtaaaacatcctattctgttttctgacagaatggaagtgacaggtcttgaggaaggcaaatggtatgcctaccgcgtgaaggccttaaacaggcagggtgctagcaaaccaagcagacccacagaggaaatccaggctgtggacacacaaggtatctatttttgatttttgtcttatcaaataggcctctgaccttaaatctgcttgaacttgataacatcataaataatcttttccaattcagaggccccagaaatcttcctcgatgtgaagctccttgctggtctcactgtaaaagctgggaccaagattgaacttccgaattccnccgcgctgatctatggtctcgattnnnnnntnncccgacctc

SEQ ID NO: 62737 - DNA, 699 bp, Homo sapiens
  misc_feature (1)...(699): n = a,t,c or g
ggggaggcgcgtcgcgaggcgagcgtgcctccttttgtgcgagcgccggcggctcggcttctcgaaggagaagaaactgaggcctggaatttgattaactcattcaaggttacccagttggtaattcatttgcacacctgttagcaagaaacagaagttgaaggactggaacaagtgaactaggaaagagggaacgccaatccaaggatagaaggacaaggacagaatcaccagcactggctgaaggtaccttaacatggggaatcttcttaaagttttgacatgcacagaccttgagcaggggccaaattttttccttgattttgaaaagtggcagatgcccagcctacagagtctgagaaggaaatttataatcaggtgaatgtagtattaaaagatgcagaaggcatcttggaggacttgcagtcatacagaggagctggccacgaaatacgagaggcaatccagcatccagcagatgagaagttgcaagagaaggcatggggtgcagttgttccactagtaggcaaattaaagaaattttacgaattttctcagaggttagaagcagcattaagaggtcttctgggagccttaacaagtaccccatattctcccacccagcatctagagcgagagcaggctcttgctaaacagtttgcagaaattcttcatttcacactccnggtttgatgaact

SEQ ID NO: 62738 - DNA, 383 bp, Homo sapiens
acggctgtggggcagagaagcgtgaaggcctggctgacgggcaggtgaactctccacgggggctagggcccgcgaaagggttcggaaccgagtcagcgcgccttgtgggcaggattcacgccgctgagacccggaggtcctcacggggcgaagccccggtctatgcctagcggagatgcccagctgcggcgcttgtacttgcggctcggcggccgtccggctcatcacctcctcactctacttcgcgctgacaggtattgctggaggccgcattcatatggcagccttaggaaggcttgacacatttgaaactcagagtctgcgctgagctcctggtagatcctttacacaaacaccagcatactttggctccaaagacgggg

SEQ ID NO: 62739 - DNA, 373 bp, Homo sapiens
agaatggagaccaaacctgtgataacctgtctcaaaaccctcctcatcatctactccttcgtcttctggatcactggggtgatcctgctggctgccggagtctggggcaaacttactctgggctcctatatctcccttattgccgagaactccacatatgctccctatgtgctcatcgtaactggcaccactatcgttgcctatcctctagtttgattcttcttctcctattcttctgggttctcttacattctagccgtccgcctcattgctggaattgctctcgtctacaactacatccctcgatcttcatcgcgtgcgttagtccgtctcgtcgtcttgcttcgtttcctcctctctcgtcatccttccc

SEQ ID NO: 62740 - DNA, 411 bp, Homo sapiens
  misc_feature (1)...(411): n = a,t,c or g
agaacgcagaacatccaggcatggatagacatgatctgtgtcagaaggccaaactggccgagcacgctgagcgagatgatgacatggcagcctgcatgaagactgtaactgatcaaggagctgaattatccaatgaggagaggaatcttctctcagatgctcataccaatgctgtatgagcccgtaggtcatcttggatgggcgcatgacgtatcgaacaaaagaccgaaggtgctgacacacagcagcagatggctccagactgcagagagatttttgcgacggagctaagagatatctgcgatgatgtactgtctcttttggaaaagctcttgatccccaatgcttcacatgcatagagcttagtctactatttgcacatgatcggagattactaccgttactggcttn

SEQ ID NO: 62741 - DNA, 371 bp, Homo sapiens
cggaatgcccgtcaccatgccgtgcgagtcttctatggtactcgggtactgggatattcgggggctggagcacgccatccgcctgctcctggagttcacggatacctcttatgaggataaactgtactcatgcggtgaagctcctgactatgaccgtagccactggctggatgtgatttttacgctaaacctggactttcctaatctgacctagctcctggatgggaagaacaagatcaccgatagcactgccatcttgcgctgcatcgctcgcaagcacaacatgtgtggtgagactgtgtacgataagattgctggggacatcttacactgccttttaatggatttccgcacggtaatgtgaaaggttg

SEQ ID NO: 62742 - DNA, 176 bp, Homo sapiens
cggaaaattggctttgtctgcccaccatatccactctgctttcgatcataacgcctactttcctgtgcatacgtagaatccttgccctcttcttactgtgtcactttgtgaggctgatgcttgccacacttcttacagaaggttcttcgggttttaggtacgtttaccatctttgc

SEQ ID NO: 62743 - DNA, 333 bp, Homo sapiens
tggcggcggtccgctggggaagatgccgcgggcgcagttggcggacccgtggcagatgatggctgtggagagcccgtccgactgcgctgacaatggacagcaaattatggatgaacctatgggagaggacgagattagcccacaaactgaataagtcagtatcaaagaagttgctgtcacacattgtgtaaaggaaggacatgataaggcagatccttcccagattgaacttttaagagtcttacggcagggatcattgggaaaggtgtacttaggtaagaaagtctcaggctctgatgctaagcagctgtatgccatgaaggtattgacgag

SEQ ID NO: 62744 - DNA, 345 bp, Homo sapiens
ctgtgacagagtgcaagacgatgacttgcaaaatgtcgcagttggaacgcaacatatagaccatgatcaacaccttgcaccattactcagtgaagctggggcacccagacaccctgatccacggggaattcaaagagctggtgcgaacagatctgcataacattctcatgaaggagaataagaatgaccaggccatatagcacatcatggaggacctggacacaaatgcacacatgcagattatcttcaaagagctcatcatgctgatggcgatgctaacctggtcctaccacgataatatgcacgatgctgactatggccctggtcaacaacataggccaggcg

SEQ ID NO: 62745 - DNA, 389 bp, Homo sapiens
ggcacgagaattttatttattcaatttttgttacttcccacttttgctgaggcaacctaaataacaaacagagagaagccctataaaagaaaatgacatttgagaatacggcattgcagcgggaaaatacatgccgtaaaggactatggacgtatacccgggtgcacagaaggacaatggcagttatagcaaccatgactatgactatgccattatgggcaaccccaaagttaaggcacatggcaggaaggtgctgacttccttgggagatgccataaagcgccattatgatcttacgggcacctatggccaacttattgaactgctctgtgataagctgcatggggatactcgaaacttggggctactggaaaatgcgcgggggggcg

SEQ ID NO: 62746 - DNA, 438 bp, Homo sapiens
ggcacgagcgcaactaatgaatcttacaggaagaaggtgattctcgtttatgaggtgatttggtaactctgtacatcactgtattctacacaggctatgacggagataacctggttgggccagcttggaaatcgggcacaggcaggaaggggcctgtctggtttgggccgtgtccacagagagcacttcttaggtcctgcctggagagaaggaatggctgggctatattttcttccagactcattatttttcttctgtttgacttttctctgaattctccttgatttgtataatacttctcaattattaccggcagattctactgattgggtactgaatcttgatcgacagcttcatagcgtgatgcatgactacacctgggaggacgactgcgatgagaaaatccgcatctacaccctggtcctgcatctgctctcg

SEQ ID NO: 62747 - DNA, 1781 bp, Homo sapiens
tttcgtcgctggcccagcatcggagtgtggcagtgctgggctggccggcgggctgggctgcggcccgcgcgcggccggcgatgcaggggggcaactccggggtccgcaagcgcgaagaggagggcgacggggctggggctgtggctgcgccgccggccatcgactttcccgccgagggcccggaccccgaatatgacgaatctgatgttccagcagaaatccaggtgttaaaagaacccctacaacagccaaccttcccttttgcagttgcaaaccaactcttgctggtttctttgctggagcacttgagccacgtgcatgaaccaaacccacttcgttcaagacaggtgtttaagctactttgccagacgtttatcaaaatggggctgctgtcttctttcacttgtagtgacgagtttagctcattgagactacatcacaacagagctattactcacttaatgaggtctgctaaagagagagttcgtcaggatccttgtgaggatatttctcgtatccagaaaatcagatcaagggaagtagccttggaagcacaaacttcacgttacttaaatgaatttgaagaacttgccatcttaggaaaaggtggatacggaagagtatacaaggtcaggaataaattagatggtcagtattatgcaataaaaaaaatcctgattaagggtgcaactaaaacagtttgcatgaaggtcctacgggaagtgaaggtgctggcaggtcttcagcaccccaatattgttggctatcacaccgcgtggatagaacatgttcatgtgattcagccacgagcagacagagctgccattgagttgccatctctggaagtgctctccgaccaggaagaggacagagagcaatgtggtgttaaaaatgatgaaagtagcagctcatccattatctttgctgagcccaccccagaaaaagaaaaacgctttggagaatctgacactgaaaatcagaataacaagtcggtgaagtacaccaccaatttagtcataagagaatctggtgaacttgagtcgaccctggagctccaggaaaatggcttggctggtttgtctgccagttcaattgtggaacagcagctgccactcaggcgtaattcccacctagaggagagtttcacatccaccgaagaatcttccgaagaaaatgtcaactttttgggtcagacagaggcacagtaccacctgatgctgcacatccagatgcagctgtgtgagctctcgctgtgggattggatagtcgagagaaacaagcggggccgggagtatgtggacgagtctgcctgtccttatgttatggccaatgttgcaacaaaaatttttcaagaattggtagaaggtgtgttttacatacataacatgggaattgtgcaccgagatctgaagccaagaaatatttttcttcatggccctgatcagcaagtaaaaataggagactttggtctggcctgcacagacatcctacagaagaacacagactggaccaacagaaacgggaagagaacaccaacacatacgtccagagtgggtacttgtctgtacgcttcacccgaacagttggaaggatctgagtatgatgccaagtcagatatgtacagattgggtggattattgctgtagataatacaagtgatccagaactcatgtgcctggaagcatgatgttagacgttcagctctagtaacaccctctgtcgctcatgcttgccctcattgtaggatgggaggatagccgccactggacttaaagtaatag

SEQ ID NO: 62748 - DNA, 374 bp, Homo sapiens
ggcacgaggctttcttaactcaaagagaagggttcaacacagtttggcaatgaaaaaaggacacctagggcaaagttattaaatgcaaagcagccattgcctggaaagcaggcaagcccctttgcattgaagaggttgaagtagctctccccaaggctcatgaagctcgtattcaggtctcccgctggtttagacttgagctgtctttggcctaagacgagtgggtctttctgctggaatgagacgtataagcaccaggagcttacacaatcatacgtaatgacattgacagtgagaagtttgtgaatgctaaagccatgggagccactgactgcctcaatcctagagacttacataaatctaatcaggatgaa

SEQ ID NO: 62749 - DNA, 383 bp, Homo sapiens
ggcacgaggaggttatcaataagctcctagtccagacgcgatgggtcatttcgcagaggaggacaaggctactatcacaagcctgtggggcaaggtgaatgtggaagatgctggaggagaaaccctgggaaggcttctggttgtaaacccaggtaccctgaagttgaattcttctttgggataacagtgatttggcgggtgtatcttgagtccgcatcattgtctaggcaaagggcgtaaatgttttttctcgattgtagagatgcttgttattttatattttatgtagacggttatcgattcgttatatgtaggtatctgtctgttataataatctattagggttatatgatgggcgtttgcatgaatgtatgtaattttag

SEQ ID NO: 62750 - DNA, 357 bp, Homo sapiens
ggcacgagccacagactcagagagaacccaccatggtgctgtctcctgccgacaagaccaacgtcaaggccgcctggggtaaggtcggcgcgcacgctggcgagtatggtgcggaggctctggttaggatgttcttgtagtttgtgttctgttaataactttcgtggcttctgtttatcttatttgaggttatgttctctttttatgttgttatttattattgtgttaagttcttatgcttcatgtagctgtagtgttgttacatgttatcttctgtatggtttgctgtatgtttcgtgatttttaagttagtgtagtgcagtttgttgttgaggtatttactgtttttatgtgacg

SEQ ID NO: 62751 - DNA, 513 bp, Homo sapiens
caagaattcggcacgaggggagggcttttctgatctctcccaattagaggattaggcaattggcagcgcagggcggtaactctgggcggggctgggctccagggctggacagcacagtccctctgaactgcacagagacctcgcaggccccgagaactgtcgcccttccacgatgtggctccgtgcctttatcctggccactctctctgcttccgcggcttgggggcatccgtactcgccacctgtggtggacaccgtgcatggcaaagtgctggggaagtgatgctgcttagaccggaccgacagcctgggccgcttgtcagggaatcctatggctctctactcttggaggcttgagctacactactttaggggcaggacatggagcgtagattaaattcctgcttgtcctctgtgtgtccctccaatgaaccgcttttgagattcatgcttctatattgctgtcggctgcgatccttttatgtggcgaagatgtcgtcttgttggtctggg

SEQ ID NO: 62752 - DNA, 348 bp, Homo sapiens
  misc_feature (1)...(348): n = a,t,c or g
ggcacgatgaacgtctgatgttatcactatgctcctatggcgacgccatggggcatttcacagacgatgacaaggctactatcacaagcctgtggggcaaggtgactgtgaaacatgctggaggataaaccctggaaaggctcctggttgtctacccatgtacccagatgttctttgacagctatactaatttgtactatgactctgtcatcatgagcgaccccagatacaaggcccatagcacgaacgtgctgacttccttgccatacgccatctagcatctgcatgatctcaatggcacctttgtccagattagtgaactgcactgtgacacgctgcatgaggatn

SEQ ID NO: 62753 - DNA, 347 bp, Homo sapiens
ggcacgagggaacgtctgaggttatcaataagctcctagtccagacgccatgggtcatttcacagaggaggacaaggctactatcacaagcctgtggggcaaggtgaatgtggaagacgctgtaagataaacgctggtatagctgtctaataatataggatatgtatctgtgaatagatgatgataatcttgtctgaatgtatccgcataaagacgtgtgattgctcttagatagagaattggcgaccttcatggaatggccgatcagtatacgtattatagatataaatgcattcgaggataatattcaggttatacggtataggcttctatgctgctgactgagg

SEQ ID NO: 62754 - DNA, 353 bp, Homo sapiens
ggcacgagcaataagctcctagtccagacgccatgggtcatttcacagaggaggacaaggctactatcacaagcctgtggggcaaggtgaatgtggaagatgctggaggagaaaccgtgcgaaggctcttggttggctaacaaggatctcatacggaatttgactgcggacttggacagtgatgtgcctttgccatcatggactgccccagagtcacggctcatggaccgaaggagctgacttcattgctagatgcgactgatgatgtgcatgatctcaagggcacctttgcctagctgtctgaatttgactaacgtggatgtgcttagagatactgtgagcttgtaggtacg

SEQ ID NO: 62755 - DNA, 793 bp, Homo sapiens
cctagcgccgctgggcctgcaggtctctgtcgagcagcggacgccggtctctgttccgcaggatggggtttgttaaagttgttaagaataaggcctactttaagagataccaagtgaaatttagaagacgacgagagggtaaaactgattattatgctcggaaacgcttggtgatacaagataaaaataaatacaacacacccaaatacaggatgatagttcgtgtgacaaacagagatatcatttgtcagattgcttatgcccgtatagagggggatatgatagtctgcgcagcgtatgcacacgaactgccaaaatatggtgtgaaggttggcctgacaaattatgctgcagcatattgtactggcctgctgctggcccgcaggcttctcaataggtttggcatggacaagatctatgaaggccaagtggaggtgactggtgatgaatacaatgtggaaagcattgatggtcagccaggtgccttcacctgctatttggatgcaggccttgccagaactaccactggcaataaagtttttggtgccctgaagggagctgtggatggaggcttgtctatccctcacaggtaagaatactatttaagaccttggtgcctggaccgtggtacttccctgtttttaactagttggactgtggagataaccgaattaaagtagctatcaattgaatgcctgctgtatgcctaggtaccatgcaggaggaacctagtagggcaggaaggaattatagcccattttataaattaagagtctgaggcccagagttattt

SEQ ID NO: 62756 - DNA, 353 bp, Homo sapiens
ggcacgagcaatgtaactagcaaccatgaagtggatggaatcaatcttgggaattttccgagtaaattttactgaatccacaacactgcatataactgaatatggaataacttccatattgaatccttaccaacgtactgctaagataattctatctgacctggctaccatatcttttgcccaggacggtcacaaatccacttacattgaactacgcaaaatggcgaaagatgcattgactgccattgataatcccactggatatgaactgtcttcaacgtgcttataaaaccatctacctgcctttctggaagaactttgccatgagaaagaaattttgtagaagtacggac

SEQ ID NO: 62757 - DNA, 656 bp, Homo sapiens
ggacccccgttcacctagtgctggcatcctgcgcactcccatccaggtactctgggccagcgtgggaaaggcagagaatgtctgaattcttgggtctcttcctaacctgattttgagagagccgtcatgaccccacccttatcctagccttattttctgcaatctcaatctgtgtggggtaggctggatatctgagggccttggcaattccttcctggaatatggggaggagaggagagaagagtcagggcccagacttgttctagcctatggtcttgacaggtggagagctctccacagccaggcctaccagcaggggagcaactggagggtcttaaacatgcccaggactcagatccccgctctcctactcttggtattgcacggacacctatgaagaccagcagtggaggtaagcgttgggcccagggaatgctgatgaagctgtcatctattattcttgggtagggtccatgaagccattctctcagggttccttaaaggggcctctatcctcctgcttcggacccatctcactcttatctcaatattttgttcccagcctgggtgcggtggctcatgcctgtaatcccagcacgttggaaggccggggtggtcagatcgcttgagcccaggagttcaagaccagcctaggg

SEQ ID NO: 62758 - DNA, 369 bp, Homo sapiens
ggcacgagagccgagcttgggtcatggcggcgccgggcgcgctgctggtgatgggcgtgagcggatcggggaaatccaccgtgggcgccctgctggcatttgagctgggatggaaattctatgatgctgatgattatcacccggaggaaaatcgatggacgatggcaaaaggcataccgctcaatgaccaggaccggattccatggctctggaacttgcatgacattgtactaagagatgtagcctcgggacagcgtgtggctctagcctgttgagccctgaagaaaacgtgcagagacatattagcacatggagaagatggtgtagctctgagatgtgaggagtcaggacatgaagcaaagcaagctg

SEQ ID NO: 62759 - DNA, 460 bp, Homo sapiens; identical to SEQ ID NO: 62735

SEQ ID NO: 62760 - DNA, 361 bp, Homo sapiens
ggcacgagaacacatagtactggaaactgagctgcggtccctgtgagggaagagttcccatgaactcccaatctctgcctgaatcccagctgtgctcagcagagactggggggttttgaagcggccctgggaggctgtgctctggaaacaccatatattgtggagagggaagatggctcactgctggagaggacctgaactcggtggggccatccgagggcgatgggtatgagccatcatactgagagatctcccgcacccatgaggccacactgacgtgccaggccacaggctgcttacatgaccacgtggagctgacatgccggttgaatgaaaacgatgtgcacagtgggggatttct

SEQ ID NO: 62761 - DNA, 342 bp, Homo sapiens
ggcacgagcggatgttgctgaatgacttccttaatgaccagaagggagatagaactagtatctatagtggcctggaagcctttggggatgttacactctaagacccctactatcatgtacacgcgcggacccctgtacacaggcttttacatcctggagactctgcttctcgctggccgagccaccaccccctacttactgtaccagcagcaagtcctactggacacactgacaggctccttcccgaacctgcacctgtagaaccctctcatgaagcttcccaaacctcccacgcctgtgaccaggatgctcatgcccaccccgctgctgatccatgctccg

SEQ ID NO: 62762 - DNA, 339 bp, Homo sapiens
ggcacgagctgactttttactttacataattttatttacagtgatttgttatgccaccatattaattttgaagcagcagtttacagcaaaaggaaaataggtatgttggattattttaaatgatctatatttattaaataataaaattaataaaatttttaatttttctcttttatgcatagttacctttctaatgacactgtataatctggtatccatccaggatatgtttgcatttctcattatattgaaaagcttgtgatggttgagttgattcttgtgttaccaatttttttcatgttggtacttggcggctgactctgacccttggttttttcc

SEQ ID NO: 62763 - DNA, 333 bp, Homo sapiens
ggcacgagctatacgctggtattccagacgccatggctcatttcactgaggagaacatggctactattacacgcctgtggggcaaggtaaatgtagtggatgctggacgagagaccatgccaaggctcctggttggctacccatggacccagaggatctttgacagcattggcatcctgacctctgcctctgccatcatgggctgccccatggccaaggcacatggcacgaatgtgctgacttccttgggagatgccatgtattacctgcatgatctcatgggcacctttgcctagctgagtgaactgcactgtgactagatgtgtgtggatc

SEQ ID NO: 62764 - DNA, 314 bp, Homo sapiens
ggcacgagccggactaggagccatctgcacattctacacctacagcaccacatcagaattacattgttatgacattttactaagagttctcacaccaccattttgtctgacttttcctgaccctattaggggacgccctgggtaacatagagaaggagtgcaatgccaagattatgatccgggggaaagggtctgtgacagaatggaacgttggacgcaaagatcgccggatgttgtctgaggatgataagcgactatagtcccatttgactgcccacacataggtacgcgcctctctgcggtctcaaatcgcg

SEQ ID NO: 62765 - DNA, 318 bp, Homo sapiens
ggcacgagcgttatagtatttgtcagaagttggggtctccgtgggcattgtgatccgtcccaggcagtggattaggaggccagaaggagatcccttccacggtgctaggctgagatggatcctctcagggcccaacagctggctgcggagctggaggtggagacgctggtcgacttgtactacagaatgaacctggtctgcctcccgtaaccctgtcctcctcactgcttggactcctctatctctttgatgccagtactgatgccgtgtgcttatcgtcggtgtgcacctttctccgctgtgtgttattcgccccgc

SEQ ID NO: 62766 - DNA, 329 bp, Homo sapiens
ggcacgagtctggaacgtctgaggttatcaataatctccgaggccagacgccatgggtcatttcacagaggaggacagggctactatcacaagcctgtggggcaaggagaatgtggaagatgctggaggataaaccctgggaaggctcctgactgctaactgatgaacccagacgttatatcacaggtgcgcagaactgtgctctgcctcttgcatgatgggctgcccattggcatacgaacatggagtgaacgggccgtcttccttgcgagacctcgtagagcacctgtaggtgctatgagccttcttatcgcagatgagagaactgg

SEQ ID NO: 62767 - DNA, 341 bp, Homo sapiens
ggcacgagctggaacgtctgaggttatcaataagctactagttcagacgccatgggtcatttcacagatgaggacaaggctactatcacaagcctgtggggcaaggcgaatgtggaagatgctggaggataaaccctgcgaaggctcactggatgctacacagggacccagacggtactggacacctttagatacctgacatctgcatgtgctgtcttgggctgaccgaccatcgtggcacatgccaagaaagcgctgacgtgcttgggagatgccataaagcatctgaaggatctctggggcacctttgcccagatgacctaactgtactgggacaggct

SEQ ID NO: 62768 - DNA, 1816 bp, Homo sapiens
ttagcagcaagtgctgtttcctggggcaggggcaagtacccctcaaccccttctccttcacccttagcggcaagtcccgctttcctagggggcaagaaccccccaatcgcttatttccgccgcaccccaacctcttatctctgtgccccaatcacttatttctgcaccctgacctcttatctctgtgccccaatcccttatttccctgccccaaccccttttcccacttttctggaaggtaagaacccccccaccccttctccgtgtctctactcttttctctgggcttgcctccttcactatgggtaagcttccaccttccattcctccttcttctcccttagcctgtgttctcaaaaacttaaaacctcttcaactcacacctgacctaaaacctaaatgccttattttcttctgcaatgccgcttgaccccaatacaaactcgacagtagttccaaatagccagaaaatggcactttgaatttttccatcctgcaagatctaaataattcttgttgtaaaataggcaaacggtctgaggtgcctgacgtccaggcattcttttacacatcagtcccttcctagtctctgtgcccagtgcaactcgtcccaaatcttccttctttccctcccacctgtcccctcagtaccaaccccaggcgttgctgagtctttctaatcttccttttctacagacccatctgacctctcccttcctccccaggctgctccttgccaggccgagctaggtcccaattcttcctcagcctctgctcctccaccctataatccttttatcacctcccctcctcacacctggtccggcttacagtttcgttccgtgactagccctcccccacctgcccagcaatttactcttaaaaaggtggctggagctaaaggcatagtcaaggttaatgctcctttttctttatcccaaatcagatagcatttaggctctttttcatcaaatataaaaatccagcccagttcatggctcgtttggcagcaaccctgagacactttacagccctagaccctaaaaggtcaaaaggccgtcttattctcaatatacattttattacccaatctgctcccgacattaaataaaactccaaaaattaaattccggccctcaaaccccacaacaggatttaattaacctcaccttcaaggtgtacaataatagagtagaggcagccaagtagcaatgtatttctgaggtgcaattccttgcctccactgtgagacaaaccccagccacatctccagcacacaagaacttccaaacgcctgaaccacagttgccaggggttcctccagaacttcctcccccaggaacttgctacacatgccggaaatctggccactgggccaaggaatgcccgcagcccgggattcctcctaaaccgtgtcccatctgtgtgggaccccactgaaaatcggactgttcaactcacctggcagccactcccagagcccctggaactctggcacaaggctctctgactgactccttcccagatcttcttggcttagcggctgaagactgatgctgccggatcgcctcggaagccccgtagaccatcacggatgccgagctttaggtaactctcacggtggaaggtaaatccgtccccttcttaatcattatggaggctacccactccacattaccttcttttcaagggcctgtttcccttgcctccataactgttgtgggtattgacggccaggcttctaaaccccttaaaactccccaattctggtgccaacttggacaatattcttttatgcactcctttttagttatcc

SEQ ID NO: 62769 - DNA, 343 bp, Homo sapiens
ccaccatggtgctgtctcctgccgacaagaccaacgtcaaggccgcctggggtaaggtcggcgcgcacgctggcgagtatggtgcggaggccctggagaggatgttcctgtccttccacaacacctagacctacttcccgcacttcgacctgagccacggctctgcccaggttaatgtccacggcatgaaggagtactacactgctgaccatctccgtgtttaacttctttgatttgttgatctcgattaattttctgacaaatattttcaacccattattattgtttatctttctataaattttatgcttttttacatctttgtcttgagtctaactacttg

SEQ ID NO: 62770 - DNA, 352 bp, Homo sapiens
  misc_feature (1)...(352): n = a,t,c or g
ggcacgaggaagtgatcaatccgctcctatgccaaacgccatggctcattgaacacaggaggacaaggctactatcacaagcctgtggagcaaggtgaatgtggacgaagctgaatgaaacaccctgagaaggttcccgggaggagacccatggacccacaggagctttgtaaaattacaaatcctgtccagccactctacaatgatcagtaacaggtctgtcatgcccttagatgtgcggggctgcacgctcgctacactgactggctcatcgtgtgcctaccctacgccggcatgcgcggataacccgttgaaccccattcatgatggggatcggggattgcaaatattn

SEQ ID NO: 62771 - DNA, 1522 bp, Homo sapiens
ttaaattagtaaggtttggtttgccgcatcacaaagtttcaacctagaaaagtagcaaacttaaaaaaaaatcaaatctcaaattatcttatatatgctgtgaggaaaagtagaaatggcattaatatcttaggttaatttttttccctgcaaacacaaacaaaaaccctcacagaatagtccaaaggaaccaaagtttactgtttcatgagaaaatgcatatattgctttgtgtctcttttttattttattttattttatttttttgagacggagtcttgctctgtcacccaggcgggagtgcagtggcgcgatctcggctcactgcaaactccgcctcccgggttcacgccattctcctgcctcagcctcctgagtagctgggactacaggcgcccgccaccatacctggctaattttttgtattttcagtagagacggggtttcaccatgttgcccaggctggtcttgaactcctgggctgaaatgatcctcctgcctcagcctcccaaagtgctgggattacaggcgtgagcacccgcgcccagccaattattttcttttttggggggtgggggatggagtcttgctctgtcacttaggctggagtacggtggcgcgttctcggctcactgcaacctctgcctcccgggttcacgccattctcctgcctcagcctcctgagtagctgggactacagatcaaacagatgatggaggcagcaacacgacaaatcgaggagaggaaaaaacagctgagcttcattagcccccctacacctcagccaaagactccttcttcctcccaaccagaacgacttcctattggcaacactattcagccctcccaggctgccactttcatgaatgatgccattgagaaggcaaggaaagcagctgaactgcaagctcgaatccaagcccagctggcactgaagccaggactcatcggcaatgccaacatggtgggcctggctaatctccatgccatgggcattgctcccccgaaggtggagttaaaagaccaaacgaaacctacaccactgatcctggatgagcaagggcgcactgtagatgcaacaggcaaggagattgagctgacacaccgcatgcctactctgaaagccaatattcgtgctgtgaagagggaacaattcaagcaacaactaaaggaaaagccatcagaagacatggaatccaataccttttttgacccccgagtctccattgccccttcccagcgccagagacgcacttttaaattccatgacaagggcaaatttgagaagattgctcagcgattacggacaaaggctcaactggagaagctacaggcagagatttcacaagcagctcgaaaaacaggcatccatacttcgactaggcttgccctcattgctcctaagaaggagctaaaggaaggagatattcctgaaattgagtggtgggactcttacataatccccaatggctttgatcttacagaggaaaatcccaagagagaagattattttggaatcaca

SEQ ID NO: 62772 - DNA, 392 bp, Homo sapiens
ttttttttttttcttgagatggagtcttgttctgtcacccaggctggggtgcagtggcatgatcttggctcactgcatcctccactgcctgggttcaagcgattctcccacctcaccttcccatgtagctgggattacaggcatctgccaccatgcccagctatatattttctaacttaatgattaacactactttttaaagaggttgtaatttttacatcatttctgataaaactgaagatatcatagtacaccttcattttatctacgtttatgcttttatgtttaaaattttgaaatgctcaaatctttcatgtaatttgttttccatatacaattttaaattctgaaaacatgttcaggaaaagcagaaaccatttttaaaaagatat

SEQ ID NO: 62773 - DNA, 1156 bp, Homo sapiens
cagttttcaaaggttaagtaagcactgaagtgtgaatacattaagagaaagatatgtaattaaaaatccactaccaaaaataaatatgagatatatgtgtatgactaatatgccagatttacttttggagacttgtctgagtattatgaatttttgtaagaaattcctaagaatctttctaatcttagcagttttcattaatgaaatggtttttgaaggatttagcaggaaatacatataacttttgaaacttatgtttatagctgaacttggtgactatgatcttgctgagcatagtcctgaacttgtctcagagttcagattcgtgcctattcagactgaagagatggaactggctatttttgagaaatggaaggaatacagaggtcaaacaccagcacaggctgaaaccaattatctgaataaagccaaatggctagaaatgtatggggttgatatgcatgtggtcaaggctagagatgggaatgactatagtttgggactaacaccaacaggagtccttgtttttgaaggagataccaaaattggcttatttttttggccgaagataaccagattggattttaagaagaataaattaaccttggtggttgtagaagatgatgatcagggcaaagaacaggaacatacatttgtctttagactggatcatccaaaagcatgcaaacatttatggaaatgtgctgtggagcatcatgctttcttccgccttcgaggccccgtccaaaagagttctcatcgatcaggatttattcgactaggatcacgatttagatatagtgggaaaacagagtatcagaccacaaaaaccaataaagcaagaagatcaacatcctttgaaagaaggcccagcaaacgatattctagacgaactctacaaatgaaagcatgtgctacaaaacctgaagaacttagtgttcacaataatgtttcgacccaaagtaatggctcccaacaggcttgggggatgagatctgctctgcctgtgagtccttccatttcctctgctcctgtgccagtggagatagagaatcttccacagagtcctggaacagaccagcatgacaggaaatggctctctgctgccagcgactgctgtcaacgtggtggaaaccagtggaacacaagggccttg

SEQ ID NO: 62774 - DNA, 1266 bp, Homo sapiens
cggacgcgtgggcttatttctcttcccttatcaattatgtatatttcccataccatatcattttccacttgcaggtaggagacagggaccacgcccatcttatctttatattcccagcatctagtacagtgcctgaaatggaggaggtacccagtaaataatggtttggatgaatgaatgattgaagttgctctgctggattcttatattgggtcttgggtatgtgtcgtcttcccaactgcactcgaagctacgttgtaaacttgagagcagcagctccattccatttactagtataggcgaggtcccagttagggttgccgtagatgtttgtatgtggcttcagtgagcgtgtgtctttgtgtacgtgggggtgaagtgaaggcgtgtttgtgggctggtttcccagctgcccagcctgactttctacagtcagcaggatggacctggagatgtcagggctgaagaccctggagcatgtggcagtgacagtctccatcactcacccacggcgcggcagcttgggagctgaagctgttctgccccagtggcattgatgtccctcatcgggcgccccccgcagcatggactcgtatgttacacccgcccgaggccttgaggcaaccttttcaggcaaggggcctttccagggaaaagaaatggaagaagtggatcctggcactgtcctaaactactgtggcactggctatccctggcggctggaagcctttcgtcacataccttcttcaagcgctaggccctgcacctcacatacatgttctctaatccttctaagaaccccctagattagactttgtaacctccttttacaaatgaggaaactggctgggtgtggtggctcacacctgtaatcccagcactttgggaggtcaaggcaggagaatcacttgaactcaggagttcaagaccagcctgggcaacaaagtgagaccctgtctctacaaaaaatttaaagattagctgagcatggtggtacatgcctgtggtcccagctactcaggagactgaggtgggaggatcgcttgagcccgggaagtcaaggctgcagtgagctgtgatcatgccgctgcactccagcttggataacagagtgagaccctgtctccaaaaaaaaaaggaaggaaaaggaaaccaggtcttggagctagtaagtgcccaaaaaaacaaaaataaccctaaatccggggaactccaagcctgtgcgcgctccatgcttgttttttccaccacaccacgttaacacat

SEQ ID NO: 62775 - DNA, 1295 bp, Homo sapiens
ttttttttttttggcctttgccctatcaacaagggaaagatgattgttgaaatctccaaatataattatagttttttgtttctctttttagttctgtcaggtttgcttcatgtattttgaagctgtataattatatgcaaatatgctaaggattattatgtatttttaatgacataattctttcatcattatgaaatctccatctttatcgctgataatattccttgtcctaaagttcaaagagcattgaggtgtgttttggcaggcagttgagttactattgggtcgacttgatcctttggaatcttgtttgtttttaatgtttgttagggtgggtgtaaagttgtctttatttaaggacggtggttgtcaactttcagtctcatgaccccctgaaactctaaaaacttattgaggactccgaagaattcttgcttatgtggattgtattaatgcttaccatatcagaaattaaaactgagaaataagtaaaacaatatttacttattagttccttttcaaatgacaataataaacccatttcatgttcagctctctcttaactatgttctttcttattagttttcgtttccttctaaccacaaataaacatataaaatcttgacctgccttgtggaaaatgttttctctcaaggatgagaaataaaatgagaattctggacttacttcttatcaacattaaaaaagccatgggggttgtatttgttgacctttcctgtttgtatattagttttctgatatggagaattgttctgctttttcgtcctcctaccagtctgattaattccgtaggcttaacacttcctttttctttctccttggaatgcctcttgggatacgcattagttggtcttatgtcttctcttggtctaggtggtgtgtgtgtttggcttgtttggggcacttttagaggctccagctgcacatttcacctcctctctgtgtgttcctctctgcatcggctgtttgggggggaacccttttttttcggagcaatctttctccttagccacattgagttctttaacagtttttctgttttcttcttcattaagataattaataatcatactactcacatatcatgttttagaacttcctaagcctttccctttcccaccttttggacctcctaactgaatttcaaagtcttcattccttagattaaaaaaataaatccaaagataaaagaatgtaatgtcttataagtcgtatcagtgtatattttctctgttattgttgttagtgttataataaatcctaagtgacacaaa

SEQ ID NO: 62776 - DNA, 931 bp, Homo sapiens
cccacgcgtccgcccacgcgtccgcccacgcgtccgggcagaacataggttgccttagagaggttccccggtgtcccgacggcggctcaagtcagagttgctgggttttgctcagattggtgtgggaagagcctgcctgtggggagcggccactccatactgctgaggcctcaggactgctgctcagcttgcccgttacctgaagaggcggcggagccgggcccctgaccggtcaccatgtgggccttctcggaattgcccatgccgctgctgatcaatttgatcgtctcgctgctgggatttgtggccacagtcaccctcatcccggccttccggggccacttcattgctgcgcgcctctgtggtcaggacctcaacaaaaccagccgacagcagatcccagaatcccagggagtgatcagcggtgctgttttccttatcatcctcttctgcttcatccctttccccttcctgaactgctttgtgaaggagcagcgtaaggcattcccccaccatgaatttgtggccctgataggtgccctccttgccatctgctgcatgatcttcctgggctttgcggatgatgtactgaatctgcgctggcgccataagctgctgctacctacagctgcctcactacctctcctcatggtctatttcaccaactttggcaacacgaccattgtggtgcccaagcccttccgcccgatacttggcctgcatctggacttgggtaggtagtcctaccactgctgcccctatggcacctacttcagggaacccttcctggtgctccacattctcctccaagtgttccttttttgtctctgtgtcttcccagatcctttctggtagcccttcatcctatcgtccgtcctcaccacttttctaaaaattcttaaatcctcctcccctaggtggcacatgtatt

SEQ ID NO: 62777 - DNA, 641 bp, Homo sapiens
tttgaacgcctgtggaaccccctcgaaaccgcgcctcgacccacgcgtccggaatattaacgatggaggcctttcgttggttttggggtttctggagttggggccttaatatgattagaccccaaaatactaaggactctaattctaattgtttggagaagactgatagcccttggtgtgaactgtttaaagagttatacaaaataaatgcatttgacactcctgattcattgctcatgagaggcaaggagtttagtgaccctatacatcatacctttgaccatatgtggagaactaaggaacataatgaagctggttggttgctcctaagttcagtggataaagtgatgaaagaaaatgatgaactcggggattctatctcccagcttcagaagcagatactgagcctcaaatctgccaagattgccctgagtgagagtctaatctcctgtagagaaagaactgaaattgtggaaaaatagacataagctcttatcatgttagtggctgacctgcaatgaaaggtgcatgcacagcctcaccatgcacagcctcgccaagtatctactgttaaagtgagggcattgattgttttgcaggaagtcacggacccttgatggagggatcggccacagctgagg

SEQ ID NO: 62778 - DNA, 469 bp, Homo sapiens
ttttccgggttcggagccgttccggatgctttaggctgccggatgtctgatctccggataactgaggcgtttctgtacatggattatctgtgttttagagcactttgctgcaagggaccaccacctgcacgaccagaatatgacctggtttgcataggcctcacaggttctggcaaaaccagtctgttgtccaaactctgcagtgaaagccccgataacgtcgtgtcgaccacaggttttagtattaaagcagtgccattccagaatgccatcttgaatgtaaaagaacttggaggggctgataacatccggaaatactggagccgctactaccaaggatctcaaggggtaatatttgtattagacagtgcctcttcagaggatgatttagaagctgctagaaattgaagctgcactcagctccttcagcatccacagttatgcactttaccctttttaatattggcca

SEQ ID NO: 62779 - DNA, 1300 bp, Homo sapiens
aaactaggacctacttagtgccgtggaattcgggtctgcagcggaggcctcagcaacctgctcttccgctgctcgctcccggaccacctgcccagcgttggcgaggagccccgggaggtgcttctgcggctgtacggagccatcttgcaggtgagggggttgtgagcgccgcagcaccagtggctttagggcctgtcgcttacgcgatgcgggtagtattgttcccgttgcgcagttgaggacaccgaggttcacggtctgagtaacacctcattacaccgaagcctgggcctgtattcccagagctttgggaggctgaggcgagaggatcacttgagcacaggagttcgagaccagcctggacaacatagtgagacccccatctctaaataaaaatagaccaacgctaaagcctgtgctccagagcctccaggcaattggatcagaagtcgcagctctggtgggaggaaggcgagccctcatgtgtgtccctgtgccactttgccttggcccctttgctgtccatcctttttcagggcgtggactccctggtgctagaaagcgtgatgttcgccatacttgcggagcggtcgctggggccccagctgtacggagtcttcccagagggccggctggaacagtacatcccagtacgggcccagtcctaccctctcctccccaaggcacctccaccccctaaccctaccccagtgcccaatgtctgcctccacatccctcaccccaagtagggaatttcccccaaaaccctgacttcccctcattgccccagcccttcccactcctgccccagccccatcaccaccctgatagcttcctgggtgcagagtcggccattgaaaactcaagagcttcgagagccagtgttgtcagcagccattgccacgaagatggcgcaatttcatggcatggagatgcctttcaccaaggagccccactggctgtttgggaccatggagcggtgagtcaggagcctcctcagggctcctgtactcctgagctgaacctccatgccagcggatgtgtcgggggctctatccagccctccacttgagtggatctgatgtcatgggctgtcacagaacaggcttttaaatgcttgccagaggccacatgcagtgcctcatgcctgtaatcccagaactttgggagccgaggtgggtgaggtgggaggatcacttgagcccaggaggcggaggttgcagtgagctgagctcatgccattgcacttcagcctgggtgagagcaagactctgtctcaaaacaccaaacaaaaaaaaaa

SEQ ID NO: 62780 - DNA, 574 bp, Homo sapiens
gatttgaaatgttctcaacacatagaaatgagaaatactcaaggtcatgggtatcctggataccctgagttgatcactacacattctatgcacgtaatgaaatgtcacatctacttcaataatatgtacaaatattatttatcaaaaagcaggcatgtaggtgagttgattttcttccatgtcttcaaactcctggtaatacttgtccacaaaatttctctataataaccggaacatgtcatccatgataatgtgtactatatatccaaccacaacatcaaattctgtatcagaggcagaagagaaggacagcatgaagctcgattcctccaactgtcctttggctggtggccctccaccctgcccacagcccggccagctcagccccgtctctgtcccatacagagccacagccacagtgagagcctggcagcctgcccggaggaggcttcttggcccagcccggtcaacacccacatgcaccaccaccaactttttgctattgtgaataacatagctgtaaacagattgcatatgaaagtgctgtgaaatcaccaagggctgagtagaacag

SEQ ID NO: 62781 - DNA, 527 bp, Homo sapiens
cccacgcgtccggtttatttccccgaatggaaacggtttaaaagtggacgtgcattccccacccttttcccgtccctcgtttgggttgttccttgaggggcaaagtgcctgttgggctttctgtgaacctcacctaacctgtgttttttcactcccctgcagttaccggtattgtaagaacaagccgtacccaaagtctcgcttctgccgaggtgtccctggtaagtagtggaagagcccctgcactggttggctctgcggactccgcgtccgtctgtgacaccccctgcacacttacccaatccttttagatgccaagattcgcatttttgacctggggcggaaaaaggcaaaagtggatgagtttccgctttgtggccacatggtgtcagatgaatatgagcagctgtcctctgaaggtaaggcaggattctttgttcgtcaccccccagtccttcctccgtgctccctcaaccccacccacatacacttgactggaattgggagttgatgaaacatgagcctta

SEQ ID NO: 62782 - DNA, 670 bp, Homo sapiens
agctggtattacaggcgtgagccaccatgtttggccatgttttccttttaagaagcctttgggggttacctaagggagcactttaccaccccacagctggcacggagatctgcagtgcatttcacaataaaagctctgcgcatgctgagcacagagccaggacttaagggggggagggtttagggaagcaaggaagaccagcacataacaacctggatttggacttttattttgccttctgtattcagctaacaagcttcaggagtcagtgaccttcaaggatgtgtccatagatttctcttgggaagagtggattcaagcagattctgctcagaggatgaccgtgtatggggaggtgatgctggagaactacaggaacccggtcttactgggtaaggactttttgtaactcaaaacccacctcttgacaatcataaggcctgatcataaggcattgttttaggggtgtttgcttgggtgtcctctctttcaaggcagaagatttgaaattttctgtaggagaatgggaaaatgggggaactttcattaaggccacaccttccttgttttcaggaaggccctggaagggagaaatgatccagaactcttgctagggattgggttttttagggctccagtttcaggaaccccaatttaatgtctctcctct

SEQ ID NO: 62783 - DNA, 680 bp, Homo sapiens
attttgaaaactccttcttacccagctcactcatcgtgcacgtaaagccttaaacatagtaatttttactgtaatctccttagtcacactaataacctcggttgtagtgtcctcagtagcactacatagttctattcaaacagcccaatatgtagaaaattggacatgtacagccaaccagggatggatgcttcaaaataaaattaataccgaattacaaacaaaggtagcaatgttaaaggctactgttctgtggctgggaaagcaggtacaaagtttgcaattgtagcagcaattgcactgtcatttcaatcatattcatatttgtgtgaccaatttggaatagaaccaaagtgaatatccatggaaccttgtaaaagctcatttgcagggagcttttacatccaatattacttttgatatcagtaacttacagagtaaaattcttaacttgaataagcaaactcaaaaataacagccctttttagaagcttaaacagaattccagcagggcttagaaagcctcaaccctggccgggtgcggtggctcacgcctgtaatcccagcactttgggaggccgaggcgggcagatcacgaggtcagaagatcgagaccatcctggctaagacagtgaagccccatctctacgtagacgggccgcgaaccaagtagtagtagc

SEQ ID NO: 62784 - DNA, 1178 bp, Homo sapiens
tggcccgcgtttccccggcaacccgcggccgccgccatggacgcgctgttgggcacagggcctcgccgggctcgcggctgcctgggcgcggctggacccacgtcttcaggtcgcgcggcgcggaccccggcggcgccctgggcgcgcttctccgcctggctggagtgtgtgtgcgtggtcaccttcgacctggagctgggccaggcgctggagctggtgtatccgaacgactttcggctcacagacaaggagaaaagcagcatctgctacctgtcttttcccgactcgcactcaggctgccttggagacactcagttcagcttccgcatgcgccagtgtggagggcagaggagcccctggcatgccgacgacaggcactacaacagcagggcccctgtggcactgcagagggagccggcacactactttggctacgtgtacttcaggcaggtgaaggacagctctgtgaagaggggctacttccagaagtctttggtgctggtgtcccgcttgccctttgtccggctgttccaagcgctgctaagcctcatcgcccccgagtactttgacaagctggcgccctgcctggaagcagtgtgcagtgagatcgaccagtggccggcgcctgcgcctgggcagaccctgaacctacctgtcatgggcgttgttgtccaggtgcgcatcccatccagggtggacaagtccgagtccagtcctccgaagcaatttgaccaagagaacctgctgccagccccagtggttcttgctagcgtccacgagctggacctgttcaggtgcttccggcctgtgctgactcatatgcagacactgtgggagctcatgctcctcggggagcccctgctagtcctggcaccctcgcccgacgtgtcctcggagatggtgctggccttgaccagctgcctgcagcccctcaggttctgctgcgacttccgtccctacttcaccatccatgacagcgagttcaaggagttcaccacacgcacgcaggccccaccaaacgtggtcctgggagtcacaaaccctttctttatcaaaacactccagcactggccccacatcctccgagtcggggagcccaagatgtcaggagacctgcctaagcaagtcaagctgaaaaagcctttcaaggtttgaagaccctgggacaccaagccagg

SEQ ID NO: 62785 - DNA, 1421 bp, Homo sapiens
  misc_feature (1)...(1421): n = a,t,c or g
cagttcttaaatatttattgaggtttgtgtcaggctctggattagaggctgtaggtcccaagtgagcacaaatgggtgtggtccctgctttcacggaccttacagtctaggtggagagacaatgttaaacagatgctcacgggggtgctttgtggaaggaagccagattctgtgagtagatgacaacacctgctctgacgagggaggcaggcacagcgtcncctcgggaggtgacatccaagctgaaatctgcaggatgagtgggagttgatcactgaggggggcgagggggagggcagtgcaggcagcaggagcaagggccctgtggcaagagggagtgcagtgcatgtgaggcaacagaccagcctgggtttggctgcaacttttggtgccccagaggtgggggttatgtgtttatttttagacccaggggaagggagagaattttggtcttcagcttaagagcaatcagaaaccattcaaggattttgagcagattggggttctgcagtatggagaatttggaggccaccagctgggacccttctgagacctcactgttggtgcctgtagcttcttgtgtcccaaagttgttgttctgagcactcctacaccccagcctcccatgggcttatccccgcagagccccctcgtaggctccctggagtgcttgccctggttgtggtctcttccagaagatgcagcctttgttctttcttccccgtcttcaatggccatatcctctcagacattctccctgcccctgttcaggctcagtatggtttggtggcccagaacttttgagtgcgcactttgttggctgatcacaggttttggtctggctgttgacttgattacactgggctgggggtgccgcctccttccagctgggcctgccctggaatctttgcctagtagagatgagtgggcctgatcctgtgggctgtagaagtggtacaggggccctggtgggactcggggtgcagtcaaaaatgctgtgctggggactgtgttcaggtgggagctctggtctcacccactgcctgtttctctctctccatctggggatgtttcctgagcagttcaagaggccgactcactcgccagtgtgcagctgggagccacgcgcccaacagcaccagcttcagccaagagaaccaaggcggcagctacagcagggggccagggcggcgccgctaggaaggagaagaagggaaagcacaaaggcatctccagcagcatgagctttgacgaggatgaggaggatgaggaggagaatagctccagctcctcccagctaaatagtaacacccgccccagctctgctactagcaggaagtccgtcagggaggcagcctcagcccctagcccaacagctccagagcaaccagtggacgttgaggtccaggatcttgaggagc

SEQ ID NO: 62786 - DNA, 406 bp, Homo sapiens
tttcgtcgcaccccagcagccgcgccatgagccggagtctcttgctccggttcttgctgttcctgctcctgctcccgccgctccccgtcctgctcgcggacccaggggcgcccacgccaggggcctctttgggaggaagccgcaggcaccaagggaaatgagttccctttctccagcctctaaccgtctgggaacccatcctgattcccattgccagtggagaaggtctcccctggtgaagacttcgggagaacatgggagatggaaatacatttaggagccgggatgcttcatctggggtttaagagatccccattgagcaaatgaggaaaccgaggctcagtaggtgccatgattccccaagctcacaaaatacatggtgggcccaggatctgaactcaggtct

SEQ ID NO: 62787 - DNA, 1012 bp, Homo sapiens
cggccgcgtcgacgccgcgacgagtaggagggccgctgcggtgagccttgaagcctagggcgcgggcccgggtggagccgccgcaggtgcagatcttggtggtagtagcaaatattcaaacgagaactttgaaggccgaagtggagaagggttccatgtgaacagcagttgaacatgggtcagtcggtcctgagagatgggcgagcgccgttccgaagggacgggcgatggcctccgttgccctcggccgatcgaaagggagtcgggttcagatccccgaatccggagtggcggagatgggcgccgcgaggcgtccagtgcggtaacgcgaccgatcccggagaagccggcgggagccccggggagagttctcttttctttgtgaagggcagggcgccctggaatgggttcgccccgagagaggggcccgtgccttggaaagcgtcgcggttccggcggcgtccggtgagctctcgctggcccttgaaaatccgggggagagggtgtaaatctcgcgccgggccgtacccatatccgcagcaggtctccaaggtgaacagcctctggcatgttggaacaatgtaggtaagggaagtcggcaagccggatccgtaacttcgggataaggattggctctaagggctgggtcggtcgggctggggcgcagagacaactgcaaggcttctaatggccaatgctggaacaatgacagcaaggaataaataaagtgatatttaattataacccaaagcatactacagctgttcatgatcccatactgacataaataaattgttgaataaattaataaatggagaagaaacaaaccttccaggcagaagaattccaaataatgtatgtagatgctgcacactgagagagataaagcatagctccccactcctaagtgtgggctacacatagtcactttctgctcaagagtacaggatggaaaaaaggaaaaaaagagtaacattccaatcacctgcaccattcaggtgatcgaggtcct

SEQ ID NO: 62788 - DNA, 392 bp, Homo sapiens; identical to SEQ ID NO: 62772

SEQ ID NO: 62789 - DNA, 1046 bp, Homo sapiens
caaagacccagggcagggcagaggctagagcgccaggttgtgccatgtcgggccccacaggcagggggagaaggaacagtccagggactgccactcacgctccagcctcaatgtctctaagggtgcagacaccatgctggccacagcgtggagcacgggagcccccaggctcttgcgcttcttggcttttttggtgctgtttggcagatggtgagggctcacttctggctgtcctctggctcctcctcctgcagcggcagcttgggtggcagctcagcttcagccttaagatgggcacgaaggcccgggaggctgagagacttgacaggctttctctttggaccatgacggggcctcacaatggagaccacgggcctggggcctctctcctctagcgccccggcatgcggcttgggccgctcctcccccagcttgggtccttcctcctggagctccgactccgaagctgcgcctgctgggcgctggtcttcactctgggttccgcgggcctcatgggcaggcaccaggaactggtctcccgccactggacactagagatgacacacaggccatcggtcaccatggccgggcaaaggacatagggatccgtcactgaacacctaacgttagacaccgaaacgggaataaggacaccagcctgtgcccctccccgcctggagggcccagcctggcagttagcgggtcggggcgctcagttccacctctcagagcgctgcggccctgtgtttgaaggttaaacagcctgacggtcacctcggaggtctgagcgctgccgggctcctccgtgagctgtccctgccccacgaccgtcgcctcctggacccccggccgcctttccgcccctgccgaggccatggctgcgcaggctgagtgcgtcctcgacagctgcttggggcgggccccaaggggctggatggtggccccgcgctgaccccggagaccggccagcaagcgagggcagagctgggaagagaaaccggcgaccgcggagcccaccctcggccgaaactacaagccccaggacg

SEQ ID NO: 62790 - DNA, 1668 bp, Homo sapiens
ggctcgcaatcgagaccatagttagagcggcggaattcgccgctttcaaatcgccaatcaaattcttccttggcttcgagtctctcagccggccgcgctctccgatgcccagccctcctggaaccacctcgcctgtgacgtaggtggagcgcgcactgcctccgggcccgtctttctcaattgggaccggaaaacgttgtcgctcatcctatgacgcgaaagtaaccgagactatcaggatccggagacggaaatgtccgaaggccgcagtacttgaccctgtattttgggagtcgaacggagaatggaaactgaaagtggaaatcaggaaaaggtaatggaagaagaaagcactgaaaagaaaaaagaagttgaaaaaaagaaacggtcacgagttaaacaggtgcttgcagatattgctaagcaagtggacttctggtttggggatgcaaatcttcacaaggatagatttcttcgagaacagatagaaaaatctagagatggatatgttgatatatcactacttgtgtcttttaacaaaatgaaaaaattgactactgatgggaagttaattgccagagcattgagaagttcagctgttgtagagcttgatttggaaggcaccagaatccggaggaaaaaacctctgggggaaagaccaaaggatgaggatgaacgcacagtgtatgtggagttacttcccaaaaatgttaatcacagctggattgaaagagtatttgggaaatgtggcaatgttgtttatataagtataccacattataagtctactggagatccaaagggatttgcgtttgtggaatttgaaacaaaagaacaagcagcaaaagcaattgagtttcttaacaacccaccagaagaagcaccaagaaaacctggcatatttcctaaaacagtgaaaaataagcccattccagccttaagagttgtggaagagaagaaaaagaaaaagaagaagaaaggccgaatgaaaaaggaagacaatatccaagccaaagaagaaaacatggacacaagcaacaccagcatcagtaaaatgaaaagatccagacccacatctgagggctctgacattgagtccactgaaccccaaaagcagtgctcaaagaaaaagaaaaaacgggacagagttgaagcatctagcttacctgaagtcagaacagggaagaggaagagaagcagctctgaagatgcagaatccctagctccccgatcaaaagtaaagaaaattattcagaaagacatcattaaggaagcatcagaagcttccaaggaaaatagagccccatgtcttaacggagagcttttttatttatttcaagatatagaaatctctactgaagaggaaaaggatactggagatctaaaagatagctctctcttgaaaacaaaaaggaagacaatatccaagccaaagaagaaaacatggacacaagcaacaccagcatcagtaaaatgaaaagatccagacccacatctgagggctctgacattgagtccactgaaccccaaaagcagtgctcaaagaaaaagaaaaaacgggacagagttgaagcatctagcttacctgaagtcagaacagggaagaggaagagaagcctgggccccgtaactcagctcctctttgtggctttcttcatggcttttttt

SEQ ID NO: 62791 - DNA, 965 bp, Homo sapiens
ttgttgagtctcctctttgaagaaatactttttggcaatgatgacacccaaaagagcaagaagcaccaagacagaaatacagactccagcacagattcctttagtggtgttgaccatctgtggactatatgctggggacagttgagtttgattgttattccaaaggccatctgaagactctgtcatggtgtcattcccatctgttgtgaaagagtgcaatggtgagctggtgggttgtgtccttatttctccctgaagtgtcatagggtgggtttctgctggctgaggtgaagatggtgaagtggctactgattgatggttctgcgtgggcaatggcgttggaggaacaaaggtagagaccattgttgtcattggaacacttgttttcattgaaatgctcgttgttgttggaacagtctttgtcgttggaacagttgttgtcgttggaacgcttgttgtcattggaacagtgatgctcgttcaaacagtagtggcggttggaacagttgtgacaattggtgtagtcgtgaccctgggtggcacaatctccaatgatagagtgattttcatgtcattgaaccacccactgtgctcaacatggcaacaatataagccactgtcagacacagctgtattttctatagtcaaagggacatcccttcttgaaagggcccccaataccttatagtgagtgtccttccgataggtgacgtgggttccattggtccagacaatgctatttcagcatgtgaataaagaacgtgcgcctctattccagcacatggatgtgacagctccattgtagtggcagggtaccgtgataaacggacctgccattccaccaacctttacagaaccagctacagaatctgccatatgtaggatgaggcttaagatggccacttcaggatacattatgggatcagccagttagttagaaggcagttttccagcttcttctccct

SEQ ID NO: 62792 - DNA, 918 bp, Homo sapiens
ttttttttttttgtgtataaaaaagtgatatgtctttaatttaaaattatgacccggaaataactagtcagtttaagtgatccagacttcctcttcatacccaaatggaacagacacaatattggctcagatttccaaccccagaaaaaaaccaaaccaagtcctcaggaagtccctgcagcgaccttgctggggccatcagaccgcacagagtggaggtgcccaagctgctaggctgctcttaatccagccacactgagaagagctttccttctaccagcaactccctcgctgggtccgatatcccccttcacctcccttttagctggcactgcacgaatgcctccacagagaggctgacagtacagcagtcacctcccagctgtcttcggtgcatcttcagggccaccttcctgtggtcacaatagaggagttgagcattctaaacgttcgtgcccaggagggcagcgtcttctctttttagctgaggtctggagccctgagttgtaaccattggtcatatgtggctgaggcaccgacagcaaatcgccaaacttgggaaacgatctggggagatgcaagggccttggtaattgatggtgagtaagtccatggagttttcatcccatcatggcagaaggctggcctgacccctgccctcactggatgatgctgtctggctgcccattctgggccacctgcccagggtcagaggcgggggccgggttagctgtgttgctctgcaggtagcggcggaaatctttgatcataggccggaggacctggatgaggacgctcagggcagcctgtgtgccctccatggcctgggcctggcgctcctgggcacaggcctgcacttcctgggagcggcggatcatctgcagtaggtcgttctgctgttccaggtcgacagcaacg

SEQ ID NO: 62793 - DNA, 1012 bp, Homo sapiens
gggctcgagatccctagtcagggtggctggatatccctagtgagagtgatggaattcttatgtctgagggtgcagggctgagtgaggaatgtgctctctcctgctactttgccaggagccattcattgacaggccctcccagcacagaaactatagtgatgcgttggttgccatggtttccgaggatgctctgcagctaatctgagtgccccccagagctgctgctctcccctccctgggctactgggatggggtgtgctgcgaccccaggagggtgcatttcgtgctgacctccagcggggcgcgcttctctcactgtctctcactgatgcttgggcctggccacagtagagtcaccttcaatacttgggtgggggaagaggggaggggcttctttctctggaaccacaaagtggctctgagttggaacaccccactggctccagaaaatgaagttcctttaagtgaaatactcccaggttcataataactcccccttcctcacccaagcctgctcagccctcctcctcctccactcctcctctaaaggggctctctgtacctggtggaccatgccatcctctcaggcctctaccccagcatcattcatgggaggccctagttcatgactgcacccctgatcctgctgcaccagcgtcccaacggcaacaggcccttgctatcccttgtcattctggtcagccaggcagggcctcggtgggctggtgggtggggtaggggaagtctattacatcctcgggatgactgaaaggttgcctcctcccaatgccactgtgcctggagacatcacctctccaatcctactcagcccctctcaagtttgtctttctgttttgtcctctttgatttccatcttgatagaaagtttatgatactcaagagaacaaattgccccttgacagggtgtcagaatcgattgtactaagtcacgcacctttggcagttcaaccgtgttcctaatagttaaaaccataacccattcgggaggtgg

SEQ ID NO: 62794 - DNA, 472 bp, Homo sapiens
attgaatctgtaccctagtccgtgtggtggaattccaaagttgccaggacttcccagggaagctgcagcagctctcggtgccagcttcctggcggaggctcctctcccagtgacagtgcgtggctccggcctggcaggaatggcagtgacatgcgatccaaaggccttcctgtccatctgctttgtcaccttggtcttcctgcagctcccactggccagcatctgtcaaaactgagggacagactcctgtgcaagtcgagggaaagctgactttgatgtcactgggcctcatgcccctattctggctatggctgggggacacgtggagttacagtgccagctgttccccaatatcagtgccgaggacatggagctgaggtggtacaggtgccagccctccctagctgtgcacatgcatgagagagggatggacatggatggagagcaaaagtggcagtacagaggaaggacc

SEQ ID NO: 62795 - DNA, 377 bp, Homo sapiens
gagggtggaaacaggatgagaggtcaggtgacttgtctgagggctgacggtttgtaattggaagagtcagggcctaaccactggtctttttgacacaaaaactcatgctcttagtggcaagcacagtgttctcaagattgggggaagccagggagggacagtgggttgtctgctactagtgggtcaaaattacatatttagtcatgaatggttcagcttttaccatttaaataacaaataaatgttctttctccataggcattaaagactattccaactggcccaccatcccgcaagtgtacctcaatggcgagtttgtagggggctgtgacattcttctgcagatgcaccagaatggggactttggtggagaactg

SEQ ID NO: 62796 - DNA, 981 bp, Homo sapiens
cgcctccacctgctagaccaggccagtggccaggacacccccctctagagccccagccctgggtctcctcaccccaccccttctcagccttcccaccctgctcaccagagctgagtcaggagccctggctttgactccaggaagccttagccctttaacctcaatggctggggttggggtagaatcaggaggtcttgttagcagtactccccattctgcctgtggtgcccaggctggcccctgtatagcagagaacacaccagctggcccttgctggcttacacggtatcttcatctgtcatctcaatgcccacaacctcacaacgatcttacctttcatagtttttcaggagccctaaggctagagggttattcatcaccgcagggagctctagtctgatgaagtccaagacctccacagtttgggcctgtttatggcattcatcagctgccagcctttggccaagtccctgcatctctaggctttgccttgctcatctgtaaagtggccagaacacaacctcccctgccttcttttcccggggttgctgtgaggatgccgggagatcagggaggtggaagcatgcagtaggcttggtgggaccctagttcccccgggctgatgtgtgggtggctccctgtcactgcagtgagtgacctgtcgtggcggctacaggtgtttttccaggagctgctgaagacagcccgcagcagcaaggccttcccagaggatgtggtcagggtcatcttctccaacatctcctccatctatcagttccattctcagttcttcctcccagagctgcagcggcgcctggacgactggtgaggtccaccaggagcccctgaggcctcagaccacagccctggccaggtggaggtggggagaccccagggcgctaggttcagcctcctaagcccaggcccttattgtgtggccatgcctccctggggctcggtctgtctgcacagtgaagggcc

SEQ ID NO: 62797 - DNA, 733 bp, Homo sapiens
tcgccgccgccggccgtgacgaacgggagccagccgggcgcgccacacaacttcacgcacacgcgtccgtcgggggcgtcgggctcggcgctgacgcgctccttctacgtgatcctgggcttctgcggcctgaccgcgctctacttcctgatccgggcgtttaggttgaagaagcctcagcggaggcgatacggcctcctcgccaacactgaggaccccacggagatggcctcgctggacagcgacgaggagacggtctttgagtcccggaatctgagatgatgctgagccagggaggcggcccttccagcagccatgagggaaggacaggagatggggcccaccccagtgcccagcaaccccctgctccaccgctcattcccctgctggccccggggctggtctcacccagtgccaacccgagagctccttttggaacctgcacagcccgccgacctgttgccacctgcacccaccgctggaccatgcagcctcgcctcctggatgctgtcccagcctggccgagggtcccaggtgaagactggagggaccccaacagccaccgcccaggacgctgaggctcccttgcctgactgtgacttgtgcctctctcctgcccccgtggggacatggcagcccagagccaaggctgggtgggcaggtgacccaaggaacctttctgggaacaccttctcgccgggctgggaacaataaatgcagccatgtctctgca

SEQ ID NO: 62798 - DNA, 708 bp, Homo sapiens
gcggtggaattcctcaaacttctggactcaagcgatctgccagcctccgcctcccaaagtgctgggattactagtgtgagccactgcgcggcacctcaagggcactttagatgcaagcctgtacttcagagatggagaagaactcccagttctgattggcacatttaaaaccaaagctgggaattcaagacctaatgcttggaaaggctgacgcatgtgataatttgtagtcagtgacttttcggggtggatatacaatttactgaagtgtttgcctcctgaaagatgaggggaggtcactcaccggaagacgggcaggtccttagtaaacttgatgacttgcagtaccatgaaagtgttgatgtctgcgaagtgtgtgaccagaggcagcacaggggccagggtgggcaagggctggtgatggatgaacagatgagctggaggctgcaatgatcagaacattagctagaggctctggccctagggccctcctttaggcctcgccagccttatcttggaagagttccttgctgagaagcctgctcaggctggggttctggagatctgttctcagtatcagtgcatggcatacacccctctccttcagaccagcatttttgggtgcccttttagttgtattccaacccaaatcctgtcggtgctcaccctaaactgcacaaactgttcaaacatggtgcccatgtggcg

SEQ ID NO: 62799 - DNA, 1668 bp, Homo sapiens
tttcgtcctatggtcagctaggcccttttgcagattttggtctctctgctctcactgctttgggaaattatgctatgtggacagcatgatcagtaaacctgcctccctccttgtggccctgggaggaagccatggactctaccaagtctgaacccctgaagggatcaccagaggctgaagatggaaacattgaatataaaaagctggtgaatccatcccagtaccgctttgagcacctggtgacacaaatgaagtggcggctccaggagggacgtggtgaggccgtctaccagattggggtagaggacaatgggctgctggtggggctggctgaggaggaaatgcgagcttcgctcaagaccctgcaccggatggcagagaaggttggggcagacataaccgttcttcgagagcgagaagtggattatgatagcgacatgccccggaagatcaccgaggtgctagtacgaaaggtccctgacaaccaacagttcctagacctccgtgtggccgtcctggggaatgtggactctgggaagtcaactctgcttggagtcctgacccagggagagctggacaatgggcggggccgggctcggctcaaccttttccgccacctgcatgagattcagtctggccgaacctccagcatcagcttcgagatcctgggctttaacagcaagggagaggtgcatgggatcaatgggacccaatggggccagactctgaggatgggatggtagtagtgaaggacataggatgggggtagagtgtggagactttttgaaatagtatagatgaatgccctgaggggactgtgaacaagctctgcccctcttaggaaatcaatggggaatcaactaaattaaataaaaaatggggtcaagattaagaggcagggtcacccagggaatggtttaggtcctggcaactctgaaggggttggaagggctggcaggaggcactgagggccctgggccctgggccaggtggtgaattacagcgactcacggacagcagaagagatctgtgagagcagctccaagatgatcaccttcatcgacctggcaggccaccataagtacctacacaccaccatctttggcctcacatcatactgccccgactgcgccctgctcctcgtcagtgccaacactgggattgctggcaccacaagggaacatctggggctggccctggccctgaaagtgcccttcttcatcgtggtcagcaagatcgacctatgtgccaagaccacagtggagaggacagtacgccagctggagcgggtcctcaagcagcctggctgccacaaggtccccatgctggtcacctctgaggatgatgccgtcactgctgcccagcagtttgctcagtcacccaatgtcacccccatcttcacattgtccagtgtgtctggagagagtctggacctcctcaaagtctttctgaatattctgccgccactcaccaacagcaaagagcaggaggaactcatgcagcagctgacggagttccaggtggatgaaatctacacagtaccagaggtggggactgttgttggaggaacactttccaggtaaattgacttgcttgctaccctccccactcagccctcacctatatactcaaagacatcctggcccaaaggaggagaccctggaattc

SEQ ID NO: 62800 - DNA, 1238 bp, Homo sapiens
atttagatgcaagaaatatattttaaataaccatggaaaccagtttttttatccgagtctaatcacgttgaaatattttatgaatatccccagagagttcgtaaattagtgagtgatttttttaaatgcaaaggtaaatacctagaaatcatatatacacttaaagtaaaatctcacagagttctcaaggccattttgcatttactagtgccacagtagtggcgttacagtgagctgcagtaacctgaaacagtactgcatggatgctctaataaattgcatgtctggaggaagcggctaactatggcgaccgccacggagcagtgggttctggtggagatggtacaggcgctttacgaggctcctgcttaccatcttattttggaagggattctgatcctctggataatcagacttcttttctctaagacttacaaattacaagaacgatctgatcttacagtcaaggaaaaagaagaactgattgaagagtggcaaccagaacctcttgttcctcctgtcccaaaagaccatcctgctctcaactacaacatcgtttcaggccctccaagccacaaaactgtggtgaatggaaaagaatgtataaacttcgcctcatttaattttcttggattgttggataaccctagggttaaggcagcagctttagcatctctaaagaagtatggcgtggggacttgtggacccagaggattttatggcacatttgaatgaagatgaaggatcattgatttccttgtgtatggataatccgggaacaggccaactaaatatttgatgaatgtatgatttcaaatacagtgaattccctgggagtcatcaaagaagaccggcattttatggttgtttttattaagtgtatattctttgctcctgaaaatgttattaaataattgtttaggccgggcatggtggctcatgcctgtaatcccagcactttcaaaggctgaggcaggcagatcacctgaggtcaggagttcaaaaccagcctggccaacatgctgaagcctcgtctctactaaaaatacaaaaattggctgggcgtggtggtggatacctgtaatcccagctacgtgggaggctgaggtgggagaattgcttcaacctgggaggcagaggttgcagtgagccgagatcatgccactgcactccagcctgggcaacagagcaagactgtctcaaaaataaataaataaataaaattgtttaaatgaaaa

SEQ ID NO: 62801 - DNA, 1616 bp, Homo sapiens
tttttttttttttgtcacagaacactgtttgcagtagaggaaactggcattgcagtctggtggtataatggcttgtccacataaaccagtacatgttcatcctttagcgcaaaaagccctaatggcgcggtaccctattaaaattcaggacatctccaatattctctctctctgtttttctttgtcatcttttttttttttaaataaacattttcaaggtttgtccaaaagaaggccatataggttcttggctagcggaagacaattcagaacagctgttgcacacttggactgtcaccttctccaggctggcagttgatatcttattttttttccaactcatttttattaaaaaaataaaaaaatgctccaactatcagctttacaaaatctctaagggaaacacaagagcaaggtgctgaggtaaaaacacctgaggtagcttattctgtgtgtttttctcgttaaaaaaatctgtgaatttaacgccctgggccaacaaccttggtaaatttctactttcctccacattttttttttttaaagaaaggaatcattttgctgaatattgatggcttatacaccaaaatgcaaaaagacaaaatacattctttcattgtggaattttttctttgtttggttgattggttggtttggtgggttcctgttttcctcttccaaaacgctaggacaagtaccattgactcttgttcttttgagtaaccaagtgtaagttgaggctggtttgtgtgtttcgcttttgttccttttgtgtgatgtgatactcagagcactgctttgcctggggggggggggtgcgtagatacgggattgagatggagggatgaggaaattcaaaagaatggagatggagaagaaggggaggggagggaggggagagataaacagagagagacagagaattatatagcagtatgcaaaaaaccagtttaaaacctgtgaagcaaagagaaatgggtgtatgagctagacaggcatgaggagtgacagagtttcctcttcaaggagacggtatcccttctgttgacatacacaggtgatccagaactgccgtgagtgtccttccgacgagatttccctctgggtgaattttgtgcgggtggcctcaaagctcctctctacaccgtgagacctcccaaagactttattctttaaagtctagaaaagcctgctttctctttaaaaagaaaaaaaaattaataattgattaaaaattggagttagttgagttatttgatatattatttctaaaatatattaccgctgcaggcaccctgtgtaacccacaggccacatatcttaacatcttccctttctaatatgtacacacatgtacagagacgatttgccacagaaaaagggtgtgcattttgcttggctttgaacacgttcacctatgttagttcaactaaaagggatagcgtcgtgggagttcaggagagatccgagtggatggtgaagtggattgctgaagcctgcaagacaccctggggggcgcggaggcggggctcggtggttctggcaaacctggctgaccttccccgcccctcctcggcccctggggtttctcagggcctcggcagagtccctggccg

SEQ ID NO: 62802 - DNA, 717 bp, Homo sapiens
acactagtccatgcggtggaattcatcactgtttcctacatatgtcctagaaatcctaattctgtcatatattaataggtgctaagaaataaggaattcttggtcacatgaatttggaaaatgatggattaaacaaaactgaacacatttcctgactgaaggttatcatagatcctcaattatgctaatgtgccttgtaaattcctaagaagatatagcccattaccccacagttacagttaggtcaccatctccacttgcttcccccaccaccccccttgtctagggtaagagtggctttcctcctggtaaaggttagtctctgtatctctctccagattcttaccctgtctcttcagggatctgacttcagaagaaatctatttcctgcctcttgtcctgtagcctatcagtatgcttggttttctccagtttaaaaaaaatgacgaccttttcttataccatacacaaaaattgactccaaatggatcacagacctaactataagagctaaaactataaaattcttagaataaaacatgggagtaaatcttcatgatctcaggttagatgaagccttcttaagtgttacaccaaaagcacaagtagcaaaagaacaaacaaaacaacaggaaaaaagcacaagcaacccaaatcacaaaccaacaaagaagacaagctgggcttgcatcccagcactttgtgaggccccgcagg

SEQ ID NO: 62803 - DNA, 1219 bp, Homo sapiens
gtctgagagaatcattaacttaatttgactatctggtctgtggatgcgtttactctcatgtaagtcaacaacatcctgggattgggacacactttctgggcactgctggccagtcccaaaatggaacataaggaaggggttcttctacttcttttatttctgaaatcaggtcaaggagagcccctggatgactatgtgaatacccaggggccttcactgttcagtgtcactaagaagcagctgggggcaggaagcagagaagaatgtgcagcaaaatgtgaagaggacaaagaattcacctgcagggcattccaatatcacagtaaagagcaacaatgtgtgataatggctgaaaacaggaagtcctccataatcattaggatgagagatgcagttttatttgaaaagtaaatgtatctttcagagtgcaagactgggaatggaaagaactacagagggacgatgtccaaaacaaaaaatggcatcacctgtcaaaaatggagttccacttctccccgcagacctaggtcagacttttcctttcatctttgtgttcatctactgtaaagtgtccgtctgtgtctgtgagggattgggttccaggacccctgtgggctaccaaaatccatgcttctcaagtcccttatgtaaaatggtgcagtatttgcatataacctacataccttctcttgtgcaatccctaatataatgtaaatgctatgtaatcgttgttatactgtattgtttttatttgtattatgttttattgtcatattgttattttctctcatctttttcaagtcttttccatccacagttggttgaatttgtggatgtggaacccatggatacagagggccaactgtatttaggataatttcatcacttttaattcaaaccagaatatgtgaataagcagacagaaagaatctttttgatgtcgatgttcaactatttttggcaccatagtagaacatggttgctttctattttttcttgggtatggaggtttcttgaagacctagaacatagaagaatgcctagttaaaaaaaaaaatcaatgaaactacgagttttaggccaaatctgagaaaagaccaaagatgactatgtttgggactgaagtaaacatatcaagttagaactctcatcacatgtttgactcaaattgtggagcaaaatagtaaataaaatataaaaatgaaaatgaaaaaaaaaa

SEQ ID NO: 62804 - DNA, 643 bp, Homo sapiens
aaaaaaacctgataacgtttgaccttgattaaccctagcttggcacgaggggtgccgtcggcgctccctgcgcggccccgctgagcctcggtgcggcggcgagcgcggtcgagatcgccatgcctacccgagtatgctgctgctgttccgctttgcgtcctcgctacaaacgcctggtggacaacatattccctgaagatccaaaagatggccttgtgaaaactgatatggagaaattgacattttatgcagtatctgctccagagaaactggatcgaattggttcttacctggcagaaaggttgagcagggatgttgtcagacatcgttctgggtatgttttgattgctatggaggcactggaccaacttctcatggcttgccattctcaaagcattaagccatttgtagaaagctttcttcatatggtggcaaagctgctggaatcgggggaaccaaagcttcaagttcttggaacaaattcttttgtcaaatttgcaaatattgaagaagacacaccatcctatcacagacgttatgacttttttgtgtctcgattcagtgccatgtgccattcctgtcatagtgatccagaaatacgaacagagatacgaattgctggaattagaggtattcaaggggt

SEQ ID NO: 62805 - DNA, 460 bp, Homo sapiens; identical to SEQ ID NO: 62735

SEQ ID NO: 62806 - DNA, 1681 bp, Homo sapiens
agatgccagggtgagccgcagaaggggctggcacccccatgaagccagccacactctcatgggggtgggaatatggagacatgcatggggaggggatgccctctggagacacaaggcaggggcctccagggctcccagatcctggactggcccacagggagttctgcagctgaaaagagagggaaagaaggcccatgagcctgtagcctcaggagctgacttccctacccaggggctttctctttgtccttggggccccagaaactttccaggaaacctccacttggctcagatctaccccctctcacccccaacactggcagtggcatctcaggaggcccctgccactgttctcaaaacgaaattttcttctgtgattcctttgtgttccgcatgcgtcattcatgagacaggcaagagccccggtttgcagagaaagaagtgaagtggtgtacccactgtcatacagaacgctgacgctctccaggtttcttcaggccagacctcatattctttttggtgaccctgccaggtcctggttcaggtagggctggggtcttacctgagggtggctgtcagtacggggcagcacagagatgtcataggcagccgtgaaggggttccgcccctcctggatcttcccataacgctcgcgcttccgccacttggctctgcggttctggaaccagacctgggggcaggttgtgggggtttgagggggtgatagggcagccctgaggaaaggagcctgctagggagagctgatggttgtgtcctcttgtgggatggggagcaggctccaggatggaggatctcaactgttaatccacactgttctccaggccagggaagcctgggaggaagcctgggagaggcccaagcccacagtgggtaattggccccatgggcctccagctgtcactccccaggttgaatcactgtggtcctccagcctggctgtgtctagtaagggtgttgtgggggcatctgtgggcctcaggggccctaggtacttcctgggtatactgtgtacatgtgttgggtttctagtctccctgcctcatctccttttccaggctacccacctcatagcatccgaggaatcttagacatttctgttcaggtcatggtcctgtttaaaccctcagtgactccctggagaccttggtccagagcatagcttcttaacaaggcccctgcctctctgcacagcctcatatcctgccaggcaaacacatttattcttctggttgcctcccaagctcccgcccagctcttctgaaacactgctatcttgctccttccatcttttgcttaggttttctcttcctgggctactcatcccctcaacacatacatccacactgggcatcctccacaggacttccaaaataccctggacctctctttgtactcaccccattccattaccatgatctgttttggaatctgtttctcccatttatttgtgagcccttggcagataggggtggcacatctgtgtgttgtgcacatctgtgtacatatctgtgatgaattcgttgtttggtatatgtgctgtgactgttacatttaactgtattggtatatatgttttgtatttctatcatttaatcaacatttatgtgtcagcctctaagctaaatttaacaatgtcaaaataaaaccaaccaaacaaaac

SEQ ID NO: 62807 - DNA, 1699 bp, Homo sapiens
cctttgacatcttaggcctgcggcgcaggtccggaattgacggatccacccacgcgtgcggggacccagcgcagaagcagcgccaggtggagccatcgaagcccccacccacaggctgacagaggcaccgttcaccagagggctcaacaccgggatctatgtttaagttttaactctcgcctccaaagaccacgataattccttccccaaagcccagcagccccccagccccgcgcagccccagcctgcctcccggcgcccagatgcccgccatgccctccagcggccccggggacaccagcagctctgctgcggagcgggaggaggaccgaaaggacggagaggagcaggaggagccgcgtggcaaggaggagcgccaagagcccagcaccacggcacggaaggtggggcggcctgggaggaagcgcaagcaccccccggtggaaagcggtgacacgccaaaggaccctgcggtgatctccaagtccccatccatggcccaggactcaggcgcctcagagctattacccaatggggacttggagaagcggagtgagccccagccagaggaggggagccctgctggggggcagaagggcggggccccagcagagggagagggtgcagctgagaccctgcctgaagcctcaagagcagtggaaaatggctgctgcacccccaaggagggccgaggagcccctgcagaagcgggtgagtcctcagcaccaggggcagcctcttctgggcccaccagcataccctgagagtcagggacttggctctccagcaggtcccaggaaggatggtctgggtcgtggctaaaggtctgcttgccaaggctatggcctggaggctactggctggatgcagcctgcgcatatgttttatttggcccatagagtgttttaaacatttaaaaaattagttgccagtatttaaaaatcaaaaaatttcacataaaaatctggagttttggcttctcatgaaaaaaaaaaaagctagatctggcaacagggggctttcataacgccaacgattgctaaactgggataatggcggcccctccatcgccttctggggctggttggggcccttaattttttgcagctttacctggcctgcttactttcccacgtgccatgcagttcctgggggttgctgaatttgtagcccctggcctgggcactcaagggcagcagataccctgtttgcctccctgagtgcagaggtcctgagcccaccctagttgggctgactcaactggaaatttggttgtgacagtggcgtggggagagggctgggtgattgtattctgtgtactgcccagcccaggcctcttcatctggggactttttggcctaaccctggaagcctggaaagttgcccacttttctctttcaggttaagccagcaatttcagggccaaccgagctgtaaacatgttagtaatgaggacaactagcatttgtacagggcttcacagtttacaaagcgctttctcatacattatcacatttgatcctcccagggccctgccaggttgttttgcatatgtgcattttaatttcaaaaagtcttccttccaagcgtgtatgatgaaatgagtaaattgattaattggcgtaacttattttgcatggatccaacctaatgttcatgcaggatagagaacatttccagaatacaaatttccaaactt

SEQ ID NO: 62808 - DNA, 1572 bp, Homo sapiens
  misc_feature (1)...(1572): n = a,t,c or g
ttttttttttttgagatcatctactcaaagtttattggactgaacaaaggctgaatacagagatccaagccatgaggagtacatgaggtgtggtgcctataagccagggtcggaaactttccagacaaacctagatagctctactaggagggagtcaacgacctattgtatcaattagatcccagcctggacaagggcatgactattgctgtttggggacacgtggctctgtgttgaaggcaatgactgtgtggctgttgccatgtggcctgttctcccctaagccctgaaccaaaggttccaggcccagatgagaaggccactgggaatgcatgccataggggttgatgctggacattccccagccttccattaaatgaaaacattttctataaacttactgctttaaaaaaatgttttaaccaacaaacctaagaactgcaaatgagtttggtatagtataaatattgtcaaatataaaattccaagaaacccatttgagactgatctgatgatctgaagttctaactaatctatcaaactttctaagaaaaggcataggtcaagaaatctttttaaagcaaacattattgcttctgctatagcagagtggagatttggctgagctggtaagaacctcagtgaaaaggtgtcttagcaatgaaagggctgaatccgagattcctctagatgaaaaataaggggaatggtcaagtaaattcctggtactggttctttgctgccctgtaatcaatatggcatctcacccccgacaaccaagccagccacagagagaagtggggttcccagggaaaggggtcggctgaccaccctgacggagctggtgagcacaggtgagctctacctcatttgtctctcattcctcaaagtcttctgtggtttggcttcagtgagggcaaaagaggggagactggagtgaaagtgaactctgcttttaaaatgttctttttatctaaggtgtgcagggtgtgtggatagcaagtttgagtggtaagaaaaatcccagtccagggtctgagctctacctcttaaaactcttcagcttaacaaagtgacccacaggaacagacatgaacatctctacacagggcagggccaaaggtgttcccaggatcctgctagccaagggacaagtcctgattgagggtctagagctcagcagatttatggaggcagcatgcaccctgggagcctgcccagactcctctctggggtttccgttttatctctcaagcttttaagatgccaaaaggaaaagcctttaggaggacgctaaggataacttcgttattcttcagttctctgctcctcctccagctcctctttggtcatcatcttcttgtactggtttcccctcagcttcccggggctgtatttgaaggagaagccttctccgtcctcctcctcaggcccttccgatgatggccccttctcaccatccaagtcctgctcctcttcctgcctcgcctccaccgcctgctcctccgcctccgctggcgccgccgcggaattccnccacgactgntctactaagtcttctatnncgtgctg

SEQ ID NO: 62809 - DNA, 794 bp, Homo sapiens
  misc_feature (1)...(794): n = a,t,c or g
tttcgtcggctacaccatgggccggctgctgcgggccgcccggctgccgccgctgctttcgccgctgctgcttctgctggttgggggagcgttcctgggtgcctgtgtggctgggtctgatgagcctggcccagagggcctcacctccacctccctgctagacctcctgctgcccactggcttggagccactggactcagaggagcctagtgagaccatgggcctgggagctgggctgggagcccctggctcaggcttccccagcgaagagaatgaagagtctcggattctgcagccaccacagtacttctgggaagaggaggaagagctgaatgactcaagtctggacctgggacccactgcagattatgtttttcctgacttaactgagaaggcaggttccattgaagacaccagccaggctcaagagctgccaaacctcccctctcccttgcccaagatgaatctggttgagcctccctggcatatgcctcccagagaggaggaagaagaggaagaggaagaggaggagagggagaaggaagaggtagagaaacaagangtngaggaagaggagganctgctccctgtgaatggntcccaagaagaagccaagcctcaggtccgtgacttttctctcaccagcagcagccagaccccaggggccaccaaaagcaggcatgaagactccggggaccaggcctcatcaggtgtggaggtggagagcagcatggggcccagcttgctgcttgccttncagtcaccccaactnacagtgactccgggggancagg

SEQ ID NO: 62810 - DNA, 660 bp, Homo sapiens
tgcggcgcgcgcagcgcctgttcctccctctcagggctgcgcgcccaggtctgcaccgcgctccgcctccagccgcgcgcagacttgccacgcgtcgtgagagcgaccgcctccgtctctcgctgggctcgctagggctgcgcgttgggccagcgggggcgccgcagctgaagccgccccggagccggtgaaccgaattacctcgagggaggggcgtggggaaggcggcgggaggaggagcgcacgggccggctgccgtgcccaccacggctgaggaacatggttttcgagtcggtggtcgtggacgtgttgaaccggttcttgggggactatgtggtggacttggacacgtcccagctctctctgggcatctggaaaggagctgtggccctcaagaatcttcaaattaaagaaaatgccctgagtcaactggatgtaccatttaaagttaaagttggtcacataggtaatcttaaacttataattccatggaaaaacctttatactcaacctgttgaagccgtattggaagaaatttatttacttatagtgccttcttctagaataaaatatgatcctttaaaagaagagaaacaactcatggaagcaaagcaacaggaactgaaaagaatagaataagcaaaacaaaaagtagttgag

SEQ ID NO: 62811 - DNA, 581 bp, Homo sapiens
tttcgtgaagtgcagtgggctcagcgccgactgcgcgcctctgcccgcgaaaactctgagctggctgacagctggggacgggtggcggccctcgactggagtcggttgagttcctgagggaccccggttctggaaggttcgccgcggagacaagtgagcagtctgtgccatagggattctcgaagagaacagcgttgtgtcccagtgcacatgctcgcatcgcttaccaggagtgcccgagaccctaagatgttcggagtggttttttcgcacagacccgaatagcctgcccctcagccacgctctgtgcccttctgagaacaggctgatatgcccaagatagtcctgaatggtgtgaccgtagacttccctttccagccctacaaatgccaacaggagtacatgaccaaggtcctggaatgtctgcagcagaaggtgaatggcatcctgtaaagccctacgggtacagcgaagacgctgagcctgctgtgtaccatgctggcctggcgagaacacctactagacggcatttctgcccgcaagattgccgagagggcgcaaggagagcttttcccggatcg

SEQ ID NO: 62812 - DNA, 449 bp, Homo sapiens
ccggcggcggcggctccgggacgggatcccggcctgaggggactgcgcggggaacctctctcccagggaagatcgcagaaccgggcgcggtgcggacctctcagcccaactaccggcctcaaggcatggagggatttttgaaatcagatgagaggcagagattggccaaagaaagacgagaagaaagagaaaaatgtctggctgctcgggagcaacagatcctggagaaacagaaaagagccaggctgcagtacgaaaagcaaatggaggagcgatggcgaaaactggaagagcagcggcagcgggaggaccaaaagagagctgctgtggaagagaaaaggaaacagaagctccgggaggaggaggaacggctggaggcgatgatgcgccggtccctggagcgcacacagcagctggagctgaaatagaagtattcgtggcgagcaccg

SEQ ID NO: 62813 - DNA, 710 bp, Homo sapiens
cgacccacgccgccgggtgaggtgagcgcaggctgccagagagggcttagcctttccaccccgtgggagggctggggggcgccctctggggcctgaacggctcctgctgtcggcgccctggagggcccgcccacttcccgacaggccgcgcgcgtcacctcagccttcgctcaggcctttcctaccctcaacgccgttccggggggccgggcctggcaagtcctcttggaacgcctccctcttgccttccccttttggggacagatcccgaagttcgagcatccctcggataggccgggtgtcaggcctggtctctcaggcccgtccaggcccatcttgacgattccaagaccacccccttgagcaagaatgccatcccctctgggtcccccatgcctgcccgtcatggacccagagaccacccttgaggagcctgagactgcccgcctccgcttccgagggttctgctaccaggaggtggcaggtccccgagaagccctggcccggctgcgtgagctgtgttgccagtggctgcagcctgaggcacactccaaggagcagatgctggagatgctggtgctggagcagttcctgggcacactgcctcccgagatccaggcctgggtgcgcggtcagcggccaggcagtcctgaggaggccgctgccctagtcgaaggactgcagcatgaccctgggcaactgttgggctg

SEQ ID NO: 62814 - DNA, 1071 bp, Homo sapiens
  misc_feature (1)...(1071): n = a,t,c or g
ttattcaaagcccacggccaaaaatcaccctagccctgcctctgcctcagttatttccacacctacccccctgctttgtagctaccccaaggtggcggtagctcaaagtcccctgagggctggggaggaagctacccggcctggctcgcattccaggccccactgtaggccaaaggcatattttaagaggacaatggatttgtttttattaatttttttgctaagaaagtttctaggtggcaggtgctgtccggggagggggcgtgcgcagcagacacagcagccaaactgtcctttctgcttccgtctgtctgtgccagccctgccgcctgccagctcttgctccctcagagccagaaggttcttggctccaggcttcctggcctggatgctggcagcccctggggagaggacccaggccccctctagtaatggccaccaccctccccccagggcagctggagcctcatctttggcagggtcccctctcccttttccaggagactctgtgcctgtagccctggtcccagtgaacctggcccccaccccagtggctggaacaggaaggccaggaggcagatgggccagggccaggagacagatggcccaatcccctgcccaccacagcagcttttttgagaggcgggcaggggcagggtttgctccccctggtgctgggatgtggtagagacattgcagccagggctggaggcagggaggcgggagtagagatgtcgctgctgagcccccatcaccatgggaggcaggggaggtctgcactctgggcactccgcatgctggggctccccaagtgttaggccaggctggagggccgcgatgtggcggggaagccccagaccctacaggaaagcccttgcaagtccccaccggggacccagccccaccgcaaacctctacggctacggtgccggccgcaaggcatgctgggaggcctgcttggcccggtgccgccgcagcctcacaaagacctgggcttctcggtcacccttccggccctccagcagctgcgaattccaccacactgactagggtctcgagnnnnngccccac

SEQ ID NO: 62815 - DNA, 414 bp, Homo sapiens
gctgagcgggttcgagccggcgttggggagcggcggtaccgggcggatgcggggctggctcgacccatcttgaggtctcggcgttcgcgtcctgcggtgccctggggtctaccgaggaccttgcacccgcgcggcttacttgggctggctttggacgacgctttcaccttactgctgcctaagatccgccgacatgaatcccatcgtattggtccacgggggcggagccggtcccatctccaaggatcggaaagagcgagtgcaccatggcatggtcagagccaccaccgtgggctacggcatcctccgggagggcgggagcgccgtggatgccgtatagggagctgtcgtcgccctggaagacgatcccgagttcaacgcaagttgtgggtctgtcttgaacacaaatggagg

SEQ ID NO: 62816 - DNA, 577 bp, Homo sapiens
tttcgtcgccaggcaagctgcggctgctacctcccacgcctctccaggtgcactcggcgccgcccccctgcacctggctgcggtgccgagtcactcaggcctgtgtcagggagagagggagggagctgtcctggaaagcagacacgtaagccccccgcggatcctcagacagctctggagaggggtcccgggggaaggtcactgcgtccagccggccagcaggcagctagagcccccgagccccgagccccactccagccttgccacattcaccggaaccgggactctaagccctgcaagtggctttctagggttgcattgacaccgtgcgctgcagcccacccctatctcgggctccctgctgccccaagatcagcgccaagggggctgcaccatggccatgagccttttgcaggactggtgccggagcctggacgtggacgcgcacagggccctgctggtcaccggcatcccggagggcctggagcaggcagacgtcgaagccgtcctgcagccgaccctcctaacataagcacgttcaggttgcgacacatgaaggctgtatgagcgagatggc

SEQ ID NO: 62817 - DNA, 940 bp, Homo sapiens
tttcgtgcccagcgagctgccccggggtctctccggttttctaatcagggcaacgccgcgggagagaacctttaccttggctgcactaagttctcggtgccactccctggcagggcgggaccttgtttaggccctgtgatcgcgcggttcgtagtagcgcaaggcgcagagtggaccttgacccgcctagggcgggaagagtttggcccgccgggtcccaaagggcagaatggacgggctcctaaatcccagggaatcctctaaattcattgcagaaaacagtcgggatgtgtttattgacagcggaggcgtacggagggtggcagagctgctgctggccaaggcggcggggccagagctgcgcgtggaggggtggaaagcccttcatgagctgaaccccagggcggccgacgaggccgcggtcaactgggtgttcgtgacagacacgctcaacttctccttttggtcggagcaggacgagcacaagtgtgtggtgaggtacagagggaaaacatacagtgggtactggtccctgtgcgccgccgtcaacagagccctcgacgaagggataccaataactagtgcctcgtactacgcgacagtgaccctggatcaggttcggaatatacttcgttctgacacagacgtttccatgcctttagtagaagagaggcatcggattctcaatgaaaccgggaaaattctgctggagaagtttggaggctcttttctcaactgcgtccgagaaagtgagaatagtgcgcagaagttaatgcacctggtggttgaaagttttccttcttacagagatgtgactctgtttgaggggaaaagagtttctttttacaaacgagcccaaatccttgtatcatatacgtgcattgtattggaaggcaaatgagatgcgtgcttgcaggacatcctcagtatcaccatgtta

SEQ ID NO: 62818 - DNA, 466 bp, Homo sapiens
tttgaatactgtagaacaccgtttacgccaagcttggcacgaggggggcccagagcagattcattctcatctgaggccagagtagtgcccgttgtatgctgctgcttgaactcagagcctcgtgaattgtcccacagcttcggaaatgtgtggacacctacaagtaccttttcatcttctctgtggccaacatgaggaacagcaagctgaaggacatccggaacgcctggaagcacagccggatgttctttggcaaaaacaaggtgatgatggtggccttgggtcggagcccatctgatgaatacaaagacaacctgcatcaggtaagtctctggccctcacggggtggagctaaggcaaagccgccctctctcccactactcccatgtgacagcctcccccagccattggcaggccagaggctcagggagagcagggcctggcttaaagctctgggttctccctt

SEQ ID NO: 62819 - DNA, 578 bp, Homo sapiens
cccggggcaggagggcagccgcggccggcaggacaggcagacggacaggctgacaggagagagaacaggcactgcgggacctgcaggagaaaggcgatcctgtggctgggaatgtgaccccacggccagaagaggacccggtatcctcaggtccgagcccctggacagcagccccaggcccagctggccatggccctgtgcctgaagcaggtgttcgccaaggacaagacgttccggccgcggaagcgctttgagccgggcacacagcgctttgagctgtacaagaaggcacaggcctctctcaagtcgggcctggacctgcgcagtgtggtgaggctaccacccggggagaacatcgacgactggatcgccgtgcacgtggtggacttcttcaaccgcatcaacctcatctacggcactatggcggagcgctgcagttagaccagctgcccggtcatggccggcgggccccgctacgagtaccgctggcaggacgagcgccagtaccggcggcccgccaagctctctgcgccgcgctatatggcattgctcatggactggatcgaaagcctcatcaa

SEQ ID NO: 62820 - DNA, 539 bp, Homo sapiens
aagaatccagatggtggccttttgggggcattaggatccttcttcttgcctcccttagctggtccataatccttcatttcccgatcatagcacacttcatccgcctttgccatttcaccaaatttaaatttctctttactggacattgtcttccacctcccagagcatttcttggaaaattctgcaaaattgacagggacttctgggtttttcttcttatgttcttctctgcattggaacaggaattaaaagaaattaaagaggccgggcgcagtggctcacgcctgtaatcccagtaatttgggaggccaaggcgggcggatcacctgaggtccagagttcaagaccagcctgaccaacatggagaaaccctgtctctactaaaaatacaaaaaattagccgggtgtggtggtgcatgcctgtagtcccagctactccggaggctgaggcaggagaatggcttgagcctgggaggcggaggttgctgtgagccgagatcgcacctttgcactctagcctgggcaacaagagcgagact

SEQ ID NO: 62821 - DNA, 682 bp, Homo sapiens
ctgggggtcctggctgaactggtctggtgttaagggggccccctgacccccttgaagggggggctgggctgggtgagggggggtggccgacccccagccaggttcccaggcaggatgagctggggttggggtggctaggccgagggccttgggagctgggcagtctgggctgggctgggctgggcagggcgccacatggaagctggaggagcaacgggagcgctgggcgtggggagcaaattgcccagtgccttctgtttcccaggcagctctgtggccatggatatgttccagaaggtagagaagatcggagagggcacctatggggtggtgtacaaggccaagaacagggagacagggcagctggtggccctgaagaagatcagactggatttgtgagtgctgggacggcccctgagttacccaccctgggccatcacaacctgggcgctccctgatccgttccctctttcctggagtccacgtttaactcctctgggtgctgcccagcagcccttacctgtcctctccccagttcactgccttctgaccagcctttgccggggccctgactgtggagtttggtggatgacgtgccaaggagcacaggtctccattgccggggccctggtcattctgtggggttaaggagaagccgatccccctggctggaagtgccctt

SEQ ID NO: 62822 - DNA, 743 bp, Homo sapiens
tttcgtctttgtaactgatgaagagcaaggctttgtctctaattctgcccagttaaagtgcaggcgttaggctaaagctgggacaaacctggagcggcttcattggctttcctacttcttttgcatcccaaagcataagcttaaatcgtctcagaaggacaaggtccgccagtttatggcgtgcactcaggctggcgagagaactgctatctactgcttaacgcagaatgagtggagactagacgaggccacggacagcttcttccaaaacccagactcgctccacagggagtccatgcggaacgctgtggacaagaagaagctggagcggctgtacggcaggtacaaagatccacaagatgaaaacaaaattggagtcgatgggattcaacagttttgtgatgatctgagcctggatcctgccagtatcagtgtattggtcatagcgtggaagttcagggcagcaactcagtgtgaatttagcagaaaggaatttctagatggcatgacagaacttgggtgtgacagcatggagaagctaaaggctcttctgccaagactggagcaggagctgaaggacacagccaagtttaaagatttttatcagtttaccttcaccttcgctaagaacccagggcagaaagggttagacttataaatggctggtgcgtattggaaattagtgttatctggaaggtttaaatttttatatctctggaacacattcttaatggaacatcaca

SEQ ID NO: 62823 - DNA, 1038 bp, Homo sapiens
tttcgtccctggagctggcgaggtgtccggttgcggagccggcggcgtctctggaaatgcatcctgcatccccgcatggataacagctgcagctatgtcagaattgcacaaagaggggagagtgtcattgtgtgccttttgacacatacattaagaccaaaaaggaaaaaaagcgtctatctgtgctgccaccgaccagactcatggaggccagattttctccaattaaccagatcttgccctggtgcagacaagacttagccatcagcatcagcaaagccatcaacacccaggaggcccccgtgaaggagaagcacgcccggcgcatcattctgggcacacaccacgagaagggggctttcaccttctggtcctatgccattgggctgccgctgcccagcagctccattctcagctggaagttctgccacgtcctccacaaggtccttcgagacgggcaccccaatgtgctgcatgactgccagcggtaccgcagcaacatccgggagattggagacctgtggggacatttgcatgaccgctacggacagctggtgaatgtctacaccaagctgctgctgaccaagatctccttccacctcaagcatccccagtttcccgcgggcctggaggtgacagatgaggtactggagaaggcagctgggaccgatgtcaacaacatgtgagtcactctgcatggctacatggccagttcccctcggcttccccattccttcctaccgcgtctcacgcccaggcgtccgcatggggcagtggggttgaatgagtccgtggctttgttggttgatgctcacgctcccagggacagagggtgaagttaaaagggtggggtgtacttgaaggactgtcgtcctggcagaggcacgctgtctcaccagagccatggtgtcggcggtgcccccgtccccactggagggggcgtctcaagacgagtgggtgggtccacccaccctttttcatttcttcccccacttctcttgcgtagcttccagctcactgtggagatgtttgattacc

SEQ ID NO: 62824 - DNA, 676 bp, Homo sapiens
tttcgtccgggcggtcgcattgttttcctccgcggatccgcggctggacttggacccagggctctcccgacagcgccctggaacccaaattcaagcaccatccaattcggacgctcatcgcatctcgcctgagcacaaccacggattgcgaactcagcgcagcgcgtggccgctggccgcccgcggcgatctcgatcccgctgacccgaatcctggagtcagaggtttcctatccccctcaagcccccacaggagtcaccaacccagggccggcttatgggtgagggggcaccccctggggcctgagctgccccgcacaggatgccccgtgccccccacttcatgcccttgctgctactgctgctgctgctctcacttccccatactcaggccgcctttccccaggaccccctccctctgttgatctctgaccttcaaggtacttccccattatcctggcttccgagcctggaggatgatgctgtggctgcataacttgggctggactttcagagattcctgaccttgaaccggaccttgctagtggctgcccgggatcacgttttctccttcgatcttcaagccgaagaagaaggggaggggctggtgcccaacaagtatctaacatggagaagccaagatgtggagaactgtgctgtacggtgaaagctgacgg

SEQ ID NO: 62825 - DNA, 1323 bp, Homo sapiens
aataatggtgggggaacccagcattttcccctgcacttctggctttggaggcatcctctgagagaagaacttgttgttccatctattactcgtgttaatacagctgcctcatatggcctggaccaacttgaatctgaagagggagaagaagatgaggatgaagaggatgaagaagatgaagatgaagaagaggaagatgaggaagaagatgaggaagataaagatgcagactcgctggatgagggcttggatggtgacactgagctgccaggttttaccctccctggtatcacatcccaggaaccaggcttagaggagggaaacatggacctgttggagggagctacctaccaggtgccagatgccctcgagtgggaacagcagaatcaaggcctggtgagaagctggatggaaaaattaaaagacaaggctggttacatgtctgggatgctggtgcctgtaggggttgggatagctggagccttgttcatcttgggagccctctacagcattaaggttatgaatcgccgaaggagaaatggcttcaaaaggcataaaagaaagcagagagaattcaacagcatgcaagatcgagtaatgctcttagccgacagctctgaagatgaattttgaattggactgggttttaattgggatattcaacgatgctactattctaatttttattttggagcagaaaaaaaaaaagaacaacctgccacattgctgctatcaggccgttagtcctagtgtctgctgggggctgggtagtagatttttcttgtactgagcagaaatggcatgttgtatactaaacgtatcatgcagtatttggttttattctgtagtgaattttccacaaccgtgggctacaactcataaatatgcaacatatatgtttttcagtaggagttgctacattaggcagagtaaatattttgtagttttccacagtgtcttttccttggtttgaattacctgcattgagaataatgattgttgccaccaaggcatgcttgactctgagatataaatcttaacaaagaataacttctcaagatatactctacctacttgaaaccacagggttgtgggccatggtacatactgcatttgcatcaaactagcagtaactcagaatgaaatcattttcattaagaagctctctcagcatattaggattatatgtagatttgtatgtattttgcattatgtacttcagtctcctagttttattattctcaccttccgttttattcttggcgaggaaaaaaatgcactagaaataatacattaaactgactcttagtcttaaaaaaaaaa

SEQ ID NO: 62826 - DNA, 515 bp, Homo sapiens
cccacgcgtccggcttcatctgcccaccaagttttaaattgtaagaactgagcaggagttagacaagctcgagtaagagcatcccagtcagtaggaatcatccaactggaaacagcaacattctttaacagtcccattacaaaaggagaacctggtccatactgattaacagcttgtttaaattctttaaataatttaaaaggaaaaggctcaaatgtaactataatatttccctgttgatctggggggtgtattctaacagggaattgccaagcctctaaatcgccctctcatctagcttgctgaattcctgcctgaatagaactaagagcagttgctcaaggcattgctcagtcactggggcaactacttttcacccaatgtcctctggaaaagaaagatctggagggtctttttcttcaaaataataaggagggggtgcagaagggtagggatgaacctctccctcctttgccgcttgagctttagctggcaaattggcaaataaacctgct

SEQ ID NO: 62827 - DNA, 724 bp, Homo sapiens
cggcacgaggctggcttaggggctctaaggcgcccagactcacaggtgctgtgaagagctcctttattggggtgatggaatcggttccaaagagctggtttactgctgtgaagggatcgcagctttgaatttcaagctctggttctcagtcctcgggcacctgtgcgtgaatcgctgccgcaaggctgggccaagttaaggccccacgcactttggcatccgggccagggatggtctccagaccccacagggtgaagcggctgaagttggcagtggctccaatgaagcggtcgaagtcccgctccagcggctcctcctcttggtcgtcagtcccggaatcccgcaaggggtctggcttccccatcgacaccttcttctcttctgtcaccatcacgtatcccacgaggccaggcggcaccgccacctcctctccccgtagacagcggccccgaaacgacacttcgagtccctcggggccctggcggatggcgggcgtgaagaagcgccccaccggggcgggcccgtccaccgcaacctcgcagggcagcagatgcagtgtggcgggtacggcgtcgcgcaatgtggcggagcgcaagtggacgcggtgcctctcgatggccgcttcgtcgccgctctccatcctccctcctacgcgacgccagggctcgcgagctgacactgaagacgaaatcgtcggcccggttactccagcccgatacgtgca

SEQ ID NO: 62828 - DNA, 1058 bp, Homo sapiens
agcggccgcgcaacaaaggagtcacccggcgatgagccccggcacccccggaccgaccatgggcagatcccagggcagcccaatggatccaatggtgatgaagagacctcagttgtatggcatgggcagtaaccctcattctcagcctcagcagagcagtccgtacccaggaggttcctatggccctccaggcccacagcggtatccaattggcatccagggtcggactcccggggccatggccggaatgcagtaccctcagcagcagatgccacctcagtatggacagcaaggtgtgagtggttactgccagcagggccaacagccatattacagccagcagccgcagcccccgcacctcccaccccaggcgcagtatctgccgtcccagtcccagcagaggtaccagccgcagcaggacatgtctcaggaaggctatggaactagatctcaaccttcctctggcccccggaaaacctaaccatgaagacttgaactttaatacagcaagaaagaccatcaagtttaccagtaagacattattgtgctgatttggaaatgtaatgagttaaagacttttagaaagagctgttgtttttgtttgttctactttatattatgacatgattgagaagtttctagacttcaggtttattttgtggtcaatttttcaaggtttaccttttaggagctctgtagtcctggataagtctatttcatgtgtatatatctctgttgcagagtgtagacatcagttggaaggttttatgcggctggtcgattttgtgtgcaggtggttattgctgttgtacagttgagctttctttaggctgttgctttttggcagcgatacagaacagaggtgtccttagaggagtcaaaacttaaaagaaatttgcactttgcaaaggatacaaatgatgagataaaatacctgatagtaatttgaatttcttctaggactttctatttatgtaatgagaaatcacccaaaagaaggtagtttgaaatttgagaccagacgcggtggctcacgcctgtaatcccagctctttggg

SEQ ID NO: 62829 - DNA, 418 bp, Homo sapiens
gtattacccgtgtggtggaattcgacatccctgaaatgtgggtgaataatcaggcaggcatccccacagtgattaaacaccaacggaagactgtctggagtgaccagcgctggagttttgagtttatggataaaacacgtctcttctgtctctaccagaaagggaaaggaaccaaaattaaggaagggagagattgaagggtggagcaacagcaagagaggttggagaagagagtgaaaagaccgcttacctgatttgaaattggtgagatgttccttgggctggttggtctgaggacccaagatggtaggtggatctcctcatggagtgagggtgaggacaggggactggtctcccgaaggagtccccctcccccgggtctttggcaccaaatgtcacgtgtgtctgtatgaagaga

SEQ ID NO: 62830 - DNA, 989 bp, Homo sapiens
attcccgcctgcgctacgtcaacctggggctctgctcgctggtgtacgatgttttcttcgacgcccaggccagcctctaccaggcgcgttgccgctacctgcagccccgctggaccgacttccccggccgggtcctggacgtgggcttcgtgggtcgctggtgggtgctgggggcctggatgcgcgactgcgacatcaacgacgacgaattcctgcacctgccggcgcatttgcgggtggtcgggccccagcagctgcattccgagaccaacgagcggctcttcgatgagaagtacaagcctgtcgtgctcaccgacgatcaggtggaccaggcgctgtgggaggagcaggtcttgcagaaggagaagaaggacaggctcgccctgagccaggcccactcgctggtgcaggcggaggccccgagatgaaaccctgaggcccccgagtcctggcaaactgcttgcctggggtggtgcagttctgagtgtgcctcacctgcagaacagctgagacagatgatgtgcaaagtgttttctcactggatttgcacaagtttggggagcctttctgccccccgtctttgttctttattagctgaagctaattcagagccacctgggtccgggagttggggacagcagaacgacttgacacatgttcatcactggcagagctggtcatgagccttttatataagcctttttcatcgggcctcagaggccctccttaaggaggtaccacattggtcagctgacttgcaaactcttctaaggccacttagattttctttttcaagtttgggttgtggcctggcatggtgatgtctgtaatcccagcagtttgcaaactgaggcaagagaatcgcttgaggccaggagtttgaggccagctagagtgacatagcaagactccgatgctacaaaaaagaataatcatagtaattaactaaataaaatttgagctgaaatgtttttcttctaaaaaaaaaa

SEQ ID NO: 62831 - DNA, 1717 bp, Homo sapiens
gggtcatttggggtcttgggggcagggctcccacgaggccatcctcctcttcttggccctccttggcctgacccattctgtggggaaaccgggtgcccatggagcctcagaaatgccacccggctggttggcatggcctggggcaggaggcagaggcaggagaccaagatggcaggtggaggccaggcttaccacaacggaagagacctcccgctggggccgggcaggcctggctcagctgccacaggcatatggtggagaggggggtaccctgcccaccttggggtggtggcaccagagctcttgtctattcagacgctggtatgggggctcggacccctcactggggacagggccagtgttggagaattctgattccttttttgttgtcttttacttttgtttttaacctgggggttcggggagaggccctgcttgggaacatctcacgagctttcctacatcttccgtggttcccagcacagcccaagattatttggcagccaagtggatggaactaactttcctggactgtgtttcgcattcggcgttatctggaaagtggactgaacggaatcaagctctgagcagaggcctgaagcggaagcaccacatcgtccctgcccatctcactctctcccttgatgatgcccctagagctgaggctggagaagacaccagggctgactttgaccgagggccatggacgcgacaggcctgtggccctgcgcatgctgaaataactggaacccagcctctcctcctacaccggcctacccatctgggcccaagagctgcactcacactcctacaacgaaggacaaactgtccaggtcggagggatcacgagacacagaacctggaggggtgtgcacgctggcaggtggcctctgcggcaattgcctcaccctgaggacatcagcagtcagcctgctcagagcgggggtgctggagcgcgtgcagacacagctcttccggagcagccttcaccttctctctgggatcagtgtccggctggccgacgtggcatttgctgaccgaatgctcatagaggttgacccccacagggtcacgcaggactcggacactgccctggaaacatggatggacaagggcttttggccacaggtgtgggtgtcctgttggaggagggcttgtttggagaagggaggctggctgggggagaaacccggatcccgctgcatctccgcgcctgtgggtgcatgtcgcgtgctcatctgttgcacacagctcactcgtatgtcctgcactggtacatgcatctgtaatacagtttctacgtctatttaaggctaggagccgaatgtgccccattgtcagtgggtccacgtttctccccggctcctctgggctaaggcagtgtggcccgaggcttaaaaagttactcggtactgtttttaagaacacttttatagagttagtggaaggcaagttaagagccaatcactgatccccaagtgtttcttgagcatctggtctggggggaccactttgatcggacccacccttggaaagctcaggggtgggcccaggtgggatgctcaccctgtcactgagggttttggttggcatcgttgtttttgaatgtagcacaagcgatgagcaaactctataagagtgttttaaaaattaacttcccaggaagtgagttaaaaacaataaaagccctttcttgagttaaaaagaaaaaaaaaaa

SEQ ID NO: 62832 - DNA, 925 bp, Homo sapiens
ttcttccgcggatgcgcagctagcgatttcgacaggcgagattgaaaattccgggcgagtatatgaggttgagtaagtcccgcttcagggaggaacgaccagaatgacatttctttaagcctaaatcaaacttttattttcgtttataaaaagcagaaggccagcaggaaagggtcgcggaggactggcacatccacaaccgtaggactcttggatccaagtttttaggctgagactgggcggtccggggttctccttcggcgctcacaccccgcaaactcgtgggcagtgcagtgctggaggccgggggcagtggcggacccgcagggtaaccttgtctcgcgcacctcccgagcccccagcagcccactctcgtccgaatgctttgtttatttggtgacaccagggaacgtggagaagaagatcgaagttcagtttttcttttttctttattttaaatatttttcttaactaaatggtatgtttatgtgaacccatcatctcttggaattaagtgtcctcagcgaactccagattcctaggggaaacctacgtgcccagagcaggaaacgcacaagtcaattcaggttccggtgccatccgcagtaaattcccttccttttgctccaaattcctcctctgcgtccaggagagggacccccgggactcccgcacacccaggaccgggagcggcagagcagagggcgggtgcgagggcgcgagggaagggaggcggcctgcggacctggggcgcgcagtttcccggctccgtgggaacctccaaccccggggcgcgcggcctaggctccgccctgccaggcctggggccgagcggtccacctagtgggtcctgacctggggaagccgagtccgcgcgcgggtcgggccgcgacgagggaagctcgcctgggcaagtgccgcgcgg

SEQ ID NO: 62833 - DNA, 1039 bp, Homo sapiens
ctgaatttgatttacactttgaaaaaatatattaatgggttgcctgcagcactgctgaaaagaatgcatttatttcatgcatttggaaattgaatcagcgatatctccggaagaaaattgattttgtcaatgttagctcacagcttttggaagaatctgttccaagtggagaaaatcagagtgtgacaggaggtgatgaagaagtagtagatgaataccaagagttaaatgcaagagaagaacaggatatcgaaataatgatggaaggctgtgaatatgcaatctcgaatgcggaagcctttgcagaaaaattgtccagagagctgcaggtgctagatggggctaacatccagtcaatcatggcatctgaaaaacaagtcaacatcctgatgaaattgctagatgaggctctaaaggaggtagatcagattgaattgaaactgagcagttatgaggaaatgctccaaagtgtaaaagaacaaatggatcagatctctgaaagcaaccacctaattcatcttagtaacactaataatgtaaaactcctatctgagatagagttccttgtgaaccacatggacttggccaaaggtcatataaaggcccttcaggaaggagatcttgcttcttccagaggcattgaggcctgcaccaatgctgctgatgcccttctgcagtgcatgaatgtagctcttcgaccaggccatgacttgcttctggcagtcaaacagcaacagcagcgattcagtgatttgcgagagctttttgcccggagactggccagtcacctcaacaatgtttttgttcaacagagacctcatgattctatctacttttgcctttagcaacatgatgagactgattatgtacataacttagagaaaatgaaaataaactgaaatgcactgaactaaaagtacaaccaggaaaaaactgaagttgtggaactttttaccatatgcttaagtttagaaatttttctctcaacatacatatacagaaacaagctataataaaataaaacctgtattgcagacca

SEQ ID NO: 62834 - DNA, 445 bp, Homo sapiens
cggtgccagaattcggcacgaggactttcctggggagctgtttgatgagcccatctttatcacggtatgtctcagcagtcaaagtgttctccgtgggctgtatgtatgcacataggtgtcagtgcacacgcgtgtgtgtttgtgcacgtgtgtgcatgtgcacgtcagtgtgaatgcgtgaatgcgtgtgtgtgcctgtcggtgtgtatgtgagtatgtgcgtgagagggagacgtgttaaagcctgacatatggatgatgtggagtaactcacagtcaggctctacgggtcacagaaatgcctgcaacagctcagctggcaggcagcagccgcgggagagcccactgctcagcatccccctggggcctcaggtcagggtccttaaatcacttgtggcaatgaacatttaaggttccatcttattttgttaatccacgtgcctgc

SEQ ID NO: 62835 - DNA, 674 bp, Homo sapiens
tttcgttggtgggttctggggtctacggcctaggggccggggaagtttgcgccgccgcgaccagtgctgcgatcccgagccgggctccagccccgaggaccaggggtcgggcgggcctgcctacggaaccccgcgggccagcagcagtcgtctcgcgtcctcctgcttggaaaagtgtttaagcttctaaaatgtcatctatcaagcacctggtttatgcagttattcgtttcttacgggaacaaagtcagatggacacttacacctcggatgaacaagaaagtttggaagttgcaattcagtgcttggagacagtttttaagatcagcccagaagatacacacctagcagtttcacagcctttgacagaaatgtttaccagttccttctgtaagaatgacgttctgcccctttcaaactcagtgcctgaagatgtgggaaaagctgaccaattaaaagatgaaggcaataaccacatgaaagaagaaaattatgctgctgcagtggattgttacacacaggcaatagaattggatcccaataatgcagtttactattgcaacagggctgctgctcagagcaaattacgtcactacacagatgcgataaaggattgtgaaaaagcaatagcaattgactcacagtacagcaaggcctatgggagaatggggctg

SEQ ID NO: 62836 - DNA, 1424 bp, Homo sapiens
tgctgttcaacaaaaaacatatcaggggacaaagcatgtaacttgatgatcttcgacactcgaaaaacagctagacaacccaactgctacctatttttctgtcccaacgaggaagcctgtccattgaaaccagcaaaaggacttatgagttacaggataattacagattttccatctttgaccagaaatttgccaagccaagagttaccccaggaagattctctcttacatggccaattttcacaagcagtcactcccctagcccatcatcacacagattattcaaagcccaccgatatctcatggagagacacactttctcagaagtttggatcctcagatcacttggagaaactatttaagatggatgaagcaagtgcccagctccttgcttataaggaaaaaggccattctcagagttcacaattttcctctgatcaagaaatagctcatctgctgcctgaaaatgtgagtgcgctcccagctacggtggcagttgcttctccacataccacctcggctactccaaagcccgccacccttctacccaccaatgcttcagtgacaccttctgggacttcccagccacagctggccaccacagctccacctgtaaccactgtcacttctcagcctcccacgaccctcatttctacagtttttacacgggctgcggctacactccaagcaatggctacaacagcagttctgactaccacctttcaggcacctacggactcaaaaggcagcttagaaaccataccgtttacagaaatctccaacctaactttgaacacagggaatgtgtataaccctactgcactttctatgtcaaatgtggagtcttccactatgaataaaactgcttcctgggaaggtagggaggccagtccaggcagttcctcccagggcagtgttccagaaaatcagtacggccttccatttgaaaaatggcttcttatcgggtccctgctctttggtgtcctgttcctggtgataggcctcgtcctcctgggtagaatcctctcggaatcactccgcaggaaacgttactcaagactggattatttgatcaatgggatctatgtggacatctaaggatggaactcggtgtctcttaattcatttagtaaccagaagcccaaatgcaatgagtttctgctgacttgctagtcttagcaggaggttgtattttgaagacaggaaaatgcccccttctgctttccttttttttttttgaaacagagtcttgctctgttgcccaggctggagggcagtaccacaatttgggttttaaccgaaccctccgtttcttgggttaaagcaattctcctgcctcaccctcctaagaatctggaattacgggcatgggccaccaccccggggggatttttggatttttagtaaagacggggtttcaccat

SEQ ID NO: 62837 - DNA, 1098 bp, Homo sapiens
gaagcggctggcgggcagcagaggaggatggcgaggggctgatactgaacccgggaagggtgggctgtgctgaagccagagccggagccggagctggggccagaacccgagcagtgagttcctccactgacgagttccggctggcggcgctcgccgccttgggcaggacccacctcgccttcctcccggcgtggcagatgctccagctgccatgtccacgcagagacttcggaatgaagactaccacgactacagctccacggacgtgagccctgaggagagcccgtcggaaggcctcaacaacctctcctccccgggctcctaccagcgctttggtcaaagcaatagcacaacatggttccagaccttgatccacctgttaaaaggcaacattggcacaggactcctgggactccctctggcggtgaaaaatgcaggcatcgtgatgggtcccatcagcctgctgatcataggcatcgtggccgtgcactgcatgggtatcctggtgaaatgtgctcaccacttctgccgcaggctgaataaatcctttgtggattatggtgatactgtgatgtatggactagaatccagcccctgctcctggctccggaaccacgcacactggggaagacgtgttgtggacttcttcctgattgtcacccagctgggattctgctgtgtctattttgtgtttctggctgacaactttaaacaggtgatagaagcggccaatgggaccaccaataactgccacaacaatgagacggtgattctgacgcctaccatggactcgcgactctacatgctctccttcctgcccttcctggtgctgctggttttcatcaggaacctccgagccctgtccatcttctccctgttggccaacatcaccatgctggtcagcttggtcatgatctaccagttcattgttcagatcctgtgaatggatttacagcccatgtagcagaccaaggtcttccacagagagcaggttcctctctgtcttcagcatgtggagtctcaaatggaacagttctgggcagagtgctttgcacagagggtgctcccaataaatgttttatcactgcaaaaaaaaaa

SEQ ID NO: 62838 - DNA, 496 bp, Homo sapiens
ggaacgtctccggatgccaggagtctcaaagggccgactctgatgaggaaaccccagggggagtccggggatagcagcacggcatcccagcttcaggcctgccatgacggtgtgggttggggggttgggcatgttccaggatctgtctatcgacttctctcaggaggaatgggagggcctggacactgctcagaaggacttatagagagatgtaatgatggagaactatagcagcctggtctcactaggtctctctaccccaaagcctgatgtgatttccttactggagcaagggaaagagtcctgcatggtttcaagggacgtaccaggaggatggtgcccagatttgtatcaggcactggagaacctcccacctggtccatgcccggctcccggtgagcaccgagacccaaccttgtgcacagccagtcttgtcatcaacaaacagggtagtaaattataaaaaataaaataaaggaaatgtagctgggcgtgg

SEQ ID NO: 62839 - DNA, 621 bp, Homo sapiens
cggggaggtaccaggtatttgagagcaatcgccaccgctttcctggaacttgaggctggagtgcagcggtgtgatctcggtttactgcaacctccacctcctgagttccagcgattctcctgcctcagcctcctgagtagctgggattacagtaaatacaatcaaggggcatcttaaatttttgctggaagtggagtcatgagactaaagatatctcttttaaaagaaccaaagcatcaagaattagtaagctgtgtgggctggactactgctgaagagctgtattcatgtagtgatgatcaccacatagtgaagtggaacttgttaaccagtgaaacaactcaaatagtaaagcttcctgatgatatttaccctattgattttcactggtttccaaaaagtttgggtgtaaagaaacaaacccatgcagaaagctttgtcctcacaagttctgatggtaaatttcatctgatttccaagttaggaagagtggaaaaaagtgtagaagctcactgtggagcagtacttgcaggaagatggaattatgaaggaacagcattagttacagttggagaagatggacaaatataaatttggtcaaagactgggatgcttatatct

SEQ ID NO: 62840 - DNA, 697 bp, Homo sapiens
agatgatgtaagaaccgagggagcctctccaaccttcatctctcatccccatggctgggagggtgacagacccgagcatcagagaaaccctggcccactcagctctgccatcttccaccctgccacctcgctgtcaccctggctgacccttggactctccttgcttttcaaatgccctggccacatcaagagccaaggatcctccccacagtcctgacagagaatccaaaagtatcagagctggaacctaaccatccctcaacactcccattacagagaagaaggaaacttacagaggccacagggtgagctagaggcagagtggaggcccatgtgtgtgccatttatacctcctaagtcccgatcctaaaaagcattagattttaagcaaagggagattttccctcagtgaagacacaggcccaggatctgaggggcgattgctgcctaggataatcttaagaagataaaggaagggcccaaactggattgcattcctctaaaatctgcagccccaaatctgaagagggccagtgactaacagcacaaacaacagcaaacacctcacagggctcaacttacacaattgtgaccgaacaattaaagttgagaaaatgtttcattcaatgggtgccaaaactgttgcccccagatcagctgcaaacaagagcagagctttccgtggaaattgtaaacc

SEQ ID NO: 62841 - DNA, 1169 bp, Homo sapiens
ataccagattataccagggagagctatggtgttacatgtttaggacccaacatttatgtaactgggggctacaggacggataacatagaagctcttgacacagtgtggatctataacagtgaaagtgatgaatggacagaaggtttgccaatgctcaatgccaggtattaccactgtgcagtcaccttgggtggctgtgtctatgctttaggtggttacagaaaaggggctccagcagaagaggctgagttctatgatcctttaaaagagaagtggattcctattgcaaacatgattaaaggtgtgggaaatgctactgcctgtgtcttacatgatgttatctacgtcattggtggccactgtggctacagaggaagctgcacctatgacaaagttcagagctacaattccgatatcatcgaatggagcctcatcaccttcagtccacatccagaatatggattgtgctcagttccgtttgaaaataagctctatctagtcggtggacaaactacaatcacagaatgctatgaccctgaacaaaatgaatggagagagatagctcccatgatggaaaggaggatggagtgcggtgccgtcatcatgaatggatgtatttatgtcactggaggatactcctactcaaagggaacgtatcttcagagcattgagaaatatgatccagatcttaataagtgggaaataacggagtctcgctctgtcgcccaggctggagtgcagtggcgcgatctcggctcactgcaagctccgcctcccgggttcacgccattctcctgcctcagcctcccgagtagctgggactacaggcgcccgctaccacgcccggctaattttttgtatttttagtagagacggggtttcaccgtgttagccaggatggtctcgatctcctgacctcgtgatccgcccgcctcggcctcccaaagtgctgggattacaggatattttctgattttttaacagaccattcttagtaaatttgattctcatggggtaaaatgagtttaacttctgtaagctcatgaataatttatgtctatttgagatctcttctggctgccattgggtggttgaccttgatttgcaagctagaaaaattaaacctccaacgaaatcgtcgaccagggaattccggcgcggtacatgag

SEQ ID NO: 62842 - DNA, 366 bp, Homo sapiens
ctttgctttcacttggactgaccctgacacccatcaggctcagcaaattacctgggctctactgccgcaaggcttcgcggacagcccccattacttcagtcaagctcaaatttcttcctcatctattacctatctcggcataattcttcatgaaaacacccgtgctctccctgctgaccatgtctgactaatctcccaaaccccaatctcttctacaaaacaacaactcctttccttcctaggcatggttaggtacttctgcctttggatacctagttttaccatcctgactaaaccattatattaattcacaaaagcaaacctagctgaccccacagatcctaaatcctttccccactcctcttt

SEQ ID NO: 62843 - DNA, 1258 bp, Homo sapiens
cccgggtcgacgatttcgtgcggcgggctatccggtcctcggctgcggcgggcaccatggtcggtggcgaggcggctgccgcagtggaggagctggtttcgggggtgcggcaggcggccgacttcgcggagcagttccgctcctactcagagagcgagaagcaatggaaggcccgcatggaattcatcctgcgccacctgcccgactaccgcgacccgcccgacggcagtggccgcctggaccagctgctctccctctccatggtctgggccaaccatctcttcctaggctgcagttacaataaagaccttttagacaaggtgatggaaatggccgatgggattgaagtggaagacctgccacaatttactaccagaagtgaattaatgaaaaagcatcaaagctaagccagaagatttatcacattttcatcatcagctacaggattagaaaggaggctgggatgaatgtgacatagaccacagcagctctcttaagactcctggtattaccaacataaagaggcaggtggaatgagaaggactctgtctagattggcttttttaacattctcattttcccaggagttatcactgtaaaagtatgcatggatatttatgtatttataaatcatgcactctaagatgagttcatcaacattgtaaaagccctcttttctgttttcaggtttttttttttcttatcgacaaggtctcactctgtcgcccaggcagaagcacaaaggtgcagtattggctcattgcagcctcgaactcctgggctcatattttcagggttttttgttttttgttttgtttttttgagacagagtcttgctctgttgcccaggcagtagtgcagtggcgcgatatattttcagtttttaaacgtcagaatttttgtttaaaatgcctttttgggctgggcacagtggcttatgcccataataatcccagcactttgggaggccgaggtgagcagatcacctgaggttaggagtttgagaccagcctggccaacacgatgaaaccccgtctctactaaaaatacaaacaaaattagctgggcatggtggcggacatctgtaatcccagctactcaggaggctgaagcagaagaactgcttgaacctgggaggtggaggttgcagtgagccaagatcgcaccattgcactccatcctgggcgacaaaaatgaaacaccgtctcaaaaaaaataaaaataataaaataaaatgcctttttgttgttgctcgtgc

SEQ ID NO: 62844 - DNA, 506 bp, Homo sapiens
tttcgtgcggggggctgttcgggtggaggcgggggagccgccgggacaccaaaataggagctgcttgtggggtggagcggcactagctggcggcttccgagcgcctcttccaaagatggtcagaggggccggaggcgtccccgctcccgctcgctactagcccgcgggccagcgccgcgtcccgagccccggcgggagccatggctctaaaaggacaagaagattatatttatcttttcaaggattcaacacatccagtggattttctggatgcattcagaacattttacttggatggattatttactgatattactcttcagtgtccttcaggcataattttccattgtcaccgagccgttttagctgcttgcagcaattattttaaggcaatgttcacagctgacatgaaagaaaaatttaaagatagaatataactctctggcgtccaccatgatattttggaaggccttgtaaattatgcatacacttcccaaattgaaaag

SEQ ID NO: 62845 - DNA, 743 bp, Homo sapiens
tttcgtatggaagggaactcttcagaccaggagcagtccccagaggatgaggatgaaggcccagctgaggaggttccaacccagatgccagagcagaaccccacacatgcactgccagagtcccctcgcctgaccctgcagcccaagccagtcgtgggccacttctcagcacgggaactggatggggaccgttctaagcagttggccctaaaggtgctgtgcgttgcccagcggcagtactccctgctccaagcagccaacctcctgacgcccgacatgatcacagagtttgagaccctacagcagctggtgcaagaggaaaaaattgagcctggggcagaggccttgaggacttcaggcctggccaggggggcacctctggctcaggagctgtgttcagagtcaatccctgtgccgtctcctctctgcccagagcctccaggatacactggccctgtgacccggactatggcgaggcgactgagtggccccctgcacaccctgggaatcccgcctggacccaactgcaccccagcccaggggtcccgatggcccatggagaagaagaggaggagaccaagcgccttggaggcagacagtcccatggccccaaagcggggcaccaagcgccagcgccagtccttcctgccctgcctaaggagagggtctctgcctgacacccaaccttcacaggggcccagcacccccaaaggagaaagggcctcctccccctgccattcccc

SEQ ID NO: 62846 - DNA, 1010 bp, Homo sapiens
  misc_feature (1)...(1010): n = a,t,c or g
ttaccagcctgtcgctgcggctgcgtggcgggttgtccaagtaaccacggtatttgtcgctgtctaagagcatctgaaagacaggtgtgcgtcatgcacttgaagcacctgaggaccctgctgagccctcaggatggagctgcttaggtgacctgcatggcttggtcccagaacaatgccaaatttgctgtctgcacagtggaccgagtggtcttgctgtatgatgaacatggagaacggagagataaattctccaccaaaccagctgacatgaagtatggcaggaagagctatatggtgaagggcatggctttttctcctgattccactaaaattgccataggacagactgacaacatcatctatgtctacaagattggagaagattggggtgacaagaaagtcatctgcaacaagttcatccagacggtaaagttcagaccagtccctggaaccttaggatgaacaaacatatatcagtatatctacttataaatacagccaggagttgcatttctaacatctgaatgtgacttttcctactgcaaggatggtgcttcatggctgttcatggtcatctgctgtcttccttagagccctgctgtgtccttccctataggagattgagagtgctgtcacttgtctgcaatggccggcagaatacatcattgtctttggactggctgaagggaaggttcgtttagcaaacaccaaaactaataaatcatctaccatctatgggacagagtcttacgtggtgtccctgacaacaaagtgagtaaagaggagtagtatcactagagtctggaagtgttaggaaaatgctgtggggaagtctggactgcaagaccatagtatgaaaggcaggagaactggtagcaggaagcacagacaaggttgtgtttgacagagaaaggggctttcttggtgagataaaatagtctcttcctgtatttctctcctttctccttttttagttgnctctggggaaagggattctctctggtcat

SEQ ID NO: 62847 - DNA, 485 bp, Homo sapiens
  misc_feature (1)...(485): n = a,t,c or g
ttttcagactgatagtggtgccatgaagtttactaggaagtgattgtgaataagtaaaagatctaacattcgcgtcatagaggaggtgttgggacaccacagaatcttgtttgaatttatgaattgagtccagttccccagtactttcagtgtctccaatcctcctgcacacctgtgtggtttgtcttaggactcagtggtctttgaggatgtggctgtggacttcaccctggaggagtgggctttgctggattctgctcagagggacctctacagagatgtgatgctggagaccttccggaacctggcctcagtaggtgaggatggcatcattccttcccttggtttttaatgaactcatttctttctcatcagttcctgcacaagaaagtttctgctggagaaaaaccatatgaatgcaccaagtgcaggacagtcttcacgcatctttcgaattccnccgcnctgggtagatcgacgtcaat

SEQ ID NO: 62848 - DNA, 1078 bp, Homo sapiens
tttcgtccgggaggagccgccggggcagaagccgcacttgttagtgttgggggaggtgggggcgggggacgccgacaccgtcaccgtcacccagggacgccgaggagaaggcgggaggggggtgggggcgagatcaggctccgaccccccgccgaggggatgaggggagcatgggtgccaaggagtcacggatcggattcctcagctacgaggaggcgctgaggagagttacagatgtagagctaaaacgactgaaggatgctttcaagaggacctgtggactctcatattacatgggccagcactgcttcatccgggaagtgcttggggatggagtgcctccaaaggttgctgaggtgatttactgttcttttggtggaacatccaaagggctgcacttcaataatttaatagttggacttgtcctccttacaagaggcaaagatgaagagaaagcaaaatacatttttagtcttttttcaagtgaatctgggaactatgttatacgggaagaaatggaaagaatgctccacgtggtggatggtaaagtcccagatacactcaggaagtgtttctcagagggtgaaaaggtaaactatgaaaagtttagaaattggctttttctaaacaaagatgcttttactttctctcgatggcttctatctggaggtgtgtatgttaccctcactgatgatagtgatactcctactttctaccaaactctggctggagtcacacatttggaggaatcagacatcattgatcttgagaaacgctattggttattgaaggctcaatcccggactggacgatttgatttagagacatttggcccattggtttcaccacctattcgtccatctctaagtgaaggtttgtttaatgcttttgatgaaaatcgtgacaatcacatagattttaaggagatatcctgtgggttatcagcctgttgcaggggacccctggctgaaagacaaaaattttgcttcaaggtatttgatgttgaccgtggatgagttctctccagggttgaactgagagacaatatgggtgcacttttagaagtctggaaggacaa

SEQ ID NO: 62849 - DNA, 837 bp, Homo sapiens
tttcgtatgccgcctgcccagagccgtccgcaggcgtgacagggctgtcggacaggtagagggagactccggcgggtccgccgagcctgtctgtttttgttggagaaggcgagagggccgcgcaaaagccaacaccatagcatttgcgccagggagaaacctcgagccaggactccccgggaggcagtgacttttgctccgggaggcgccagtatccccggtggcgctacattttcaggccacatggttggatgactgcctgcaacaatatgtccacaagtttgaacgagagaagatcaacggcgagcagctgctgcagatttcccatcaggacctggaggagctgggggtcacacggattggacaccaggagcttgtgttggaggctgtggaccttctctgtgcactgaattatggcctcgaaactgataacatgaagaacttggttctgaaactgagagcatcttcccacaatttacagaattacataagtagccgacggaaaagtcccgcttacgatggcaacacctcccgcaaggcccccaatgagttcctgacctcggtggtggagctcatcggcgccgccaaggccctgctggcgtggctggaccggtaagttggagatgtgccttttactgccctgcaagagtagatagagtccaagctgcatggaagctgtactttgtcttaagaaaaggaaccattgttcttttcatatcatttttaccggctcttaaggagtcctcgatcagtggtagattgtaggattcctcttgccagtaacttaaaaggttaatagcaggaacaaattaacctcagcttatagaagagtgaaag

SEQ ID NO: 62850 - DNA, 888 bp, Homo sapiens
cttgaggaccgtgccggacctcccgggacgacgatttcgtgcgatgcggacagggcagcggcggtgacccgagctgccgcccgacatgaactcgctggagcaggcggaagatctcaaggcttttgagaggagacttactgaatatattcattgtttgcaacctgctactggacgctggagaatgcttcttatagtggtatctgtctgtacagctactggtgcctggaactggttaatagaccctgagacacaaaaggtgtccttcttcacatcattatggaatcacccatttttcaccattagctgtatcactctaataggcttgttctttgctggaatacacaagagagtagttgcaccatcaattatagctgctcgatgtcgaacggtattagcagaatacaatatgtcttgtgatgatacaggaaaactaattttgaaacctaggcctcatgttcaatgacaatcttcactcattgttatgggacttaaaatagcctttcttcgaataagtgatacagcaaaaagccataaaggattccttttgcggttggatatgtaaaggtcatagcagcaactgacaagaagtgtgcaatatttacctggattatcttgatgatggtgactcattatcagtgctttggtacttttgattacctgtgtttcagtattagtgtcactttagtacttcagatcctgcaaatatttttgcagatgaagtatgtatgtatgttactaagttaaacttagaaacagaacctcattcagtttttataatgtatttttgcaaactactgtaaatagcaaatcaatgccaatgttaaacaaagaggaaaacgttgtgtggactttgttctcttgcaccggtatttcaggaacatctgcttg

SEQ ID NO: 62851 - DNA, 669 bp, Homo sapiens
gggtcgacgatttcgtgtaagatggcggcgctgagggctttgtgcggcttccggggcgtctcggcccaggtgctgcggcctggggctggagtccgattgccgattcagcccagcaggtgagatcgagggcagctctcgacgcactttctccaaggctagggtttctcaggttggggacgctttactcccccagaaaataataacccaagcctgtgaccccattgtccatccctgatttcttgggctacgggatgcagtggcgcccactctggcgagggaggggagagggtctagagttcgttcgtgccgaggtgaaatcagcggagtgggagactctgctttttagcttcagtaatttgaatgcacctctcctgtcatacctgagtagagctcagccaaagagccagaatgctcgctgtctctctgtcgttgaccttgaacaaacacttttctcacgttcatattcacctggttgataatatcaatatgatgaaaatatgaagaagctaggatcccaaccttgcatgcccaggggtgatgggtggagttattccaggaattacaacacttccatggaagtgcttgtaattccagcactttgggaggctgaggtgggcaacaagagtgaaacccagtctcaaaaaaaacaaaaaacaaaacaaaaaaaaa

SEQ ID NO: 62852 - DNA, 1289 bp, Homo sapiens
  misc_feature (1)...(1289): n = a,t,c or g
cgccaccggtatgcaccattaccatccccgcggctcagtcgagcattcgtccacgggccggagggcggggcgcccgggtccggagggagccacgcccnaccacaacaaacgcgtctgcgcatgcccgggcgctgggttcaggggctttccgccgctctgggttcacagctggacgtcgggagtgctagtttggagtacgccatttgagagtaggcgtgagaagttgctctgtgtgctgagcgttctaaaggaaggcgtccgttggccttcgtacccgtcttgagtgaggtgacgagtgttttctagtactggggtcggccgcgcagccctctcaggggtgggtggcaggaagagtgccgggtcccgcgtggtgcaaaaggtgggttcaggtttgcggccacacagcgctactcaggactttttagtcttgtttattttctccgtgcctgttcccgccccccgcagctccacctctgggagaggggcgggttcagctccaggaggcggggacttcccggcttggcgtggctggggtgtcccgtggaccccagtctcggcgcggtgacccacttatgggacttggcctttctttgttgtttgtttaaggcagggtttctcagcctgggcactactgaggttttgggccggctaattctgtctgggttggggagggtgctgtcccgtgcttcgcaggttgtgtagctgcatcccccgcctctacccagtggatgcaagtagcagccccagtgaaccaaaaatgcccccagactttgccaaatatcccctcccggggaagatcgcctcgcttgagaaccactgttggaggagagcctgggttttcgggaggtaaccgtttacaaaggggagaacggtaagaagccggaagcaacgatgacttagctacgtgaaagacttgcggccgggctcgcccctcttctagaagccgtcagtttgggtctcgcgtctggaatcaccgtcaaggagtcagatccagccccggagagggagcagggtcgaggtctccttgcagaaggcgccaccgcaggaagcacaggcgcaacgtgcagtctccctagcggaggcgctcgcgatcctgcagccgccggtccgggaggtgctcggtagccctccttggtgcctgtccggtagctggtcactctcgggggaaggtcgtgtgcagaagggcacatgcgatcacacagagacggcgttgctgcggctttgacccgatggtgcacccgaaagaacacagagggtgaagggagagatccaggaagtggtcgcggagc

SEQ ID NO: 62853 - DNA, 930 bp, Homo sapiens
  misc_feature (1)...(930): n = a,t,c or g
tgacacgtccagctcggtacgagggagatgaacctggtacgcacggatttctggttaatcctatcgcttatatttggtgcggggggcgcacttctgagacgggagaggatctaggagctgaatcctccacgcgggtcgcccaggttgatctgaatttctggggaatggcttggctgcccgcccgggaccaggccgaccctccttgacggtggcgtagagggctggagcctgggtactgcgaggctcctcgcatggctgggcccgccgcgaggggttgcagagcggctcagggatcgattcaagcatcgtctctcctccctcgcccccagacagagctgggcgcggggttccccttccagatggagcgagggtctcggggtggccccggaaaaggggagcccgcggccacggctacgtattgccatctcgcgagcagagatgtcacctcctgcctttggaggaaagggagcccggtggggatgagcgcatttagcccaatgctgggaacaaagcgcactccgcgcttctgcgatttcgctccattttgaaatgtgttggcgctttggtggggccgctgcggtgggcaaggccgggggcgctgttaatggaggaacctcagggggacggtccttcgtaggaaactctatcctggctctgcgcgcgctttaaggaaatggcttcgctccaggacctcgagggatgcagcttttgcgcggatgacggtggggtgctgaaccagccggtgcgcctctggaaatgtctgggcacggatcctggggccatcgacgactcctccccattcccagcaggcgggagctcttacattccgagcgagtgacccctctcaccctctggcgctcacacacctgtaactccaaacctccgtctcanaatggtccacgctggaagggatgatgggggctccgacag

SEQ ID NO: 62854 - DNA, 1082 bp, Homo sapiens
gtgataggaacagcgcaagaatccatgggaataggaagtgaggaaaagccatgtacagtgagggatgaagcggagatgtcaccagtggtagatttgataggaggagagaagaagttggagctggagagcagaggaagtgcagaaaagctgggaacagagagggaaggaggtgaggaaccactgggcatagagagaaaagttgagggacatttgagggcagagaaggaaggagatgaggaaaagcgaggggcagaggaggaggaggtagaagaaccattgggagtagagaagaaaggaggtgaggaagagccagaggcaaccaaagaaccactggaggcagagagaaagggaggggaggagacactggaggcagagaaaaggggaggtgaggaatcattggagacagagaagacccaagggacggagggagatctgaatctagaacaagggtctagggaaggaagtgaatcccaggcagaggagatgaatgaggcagggcctccccttgaggctaacacggagacaaggccagagaaggaaggaccccagccccaggagaagccagtaggagccctggaggaggaaggagtgaagccccaaaccgctgctgagggccaaggccccttgggggatgccacacctcttctggcagagaccccagccccagagcagcccgccgaatgccagccactgcttcagggggaggggcccagcgccaaccccagtgcccaccctgtgcccacctacgcgcctgcccggcagcctgagccatctgcccccaccgagggtgaagaggcaagtggccctaagcaaaagacgtgccagtgttgtgcggtcatgtgaacccatgcccctccaccccatgtccagctcctctcacagctacctcggcctcttggcacccagaagagggtcccaggcacagacagggaccacaggactggccatggcacctgggagccagctagcctgcacgtccacctaaacctgggcttccagaccccttgcccactggcctgtaaccctggcctccttctgcgatgaagcctttatacttgaaaataaaatgtgaaagcactcaa

SEQ ID NO: 62855 - DNA, 882 bp, Homo sapiens
tggaattcgctcgggagcctcccgctcgtcccgccccgaggggcgtgaggaggggaggggctgcggacttcggactcgggcctggagaccgcctcctacccagagccggagcccgcaacccgctcaggcggcgacggagccatgtcgccgctgctggggctccggtccgagctgcaggacacctgcacctcgctgggactgatgctgtcggtggtgctgctcatggggctggcccgcgtagtcgcccggcagcagctgcacaggccggtggcccacgccttcgtcctggagtttctagccaccttccagctctgctgctgcacccacgagctgcaactgctgagcgaacagcaccccgcgcaccccacctggacgctgacgctcgtctacttcttctcgcttgtgcatggcctgactctggtgggcacgtccagcaacccgtgcggcgtgatgatgcagatgatgctggggggcatgtcccccgagacgggtgcggtgaggctattggctcagctggttagtgccctgtgcagcaggtactgcacaagcgccttgtggagcttgggtctgacccagtatcacgtcagcgagaggagcttcgcttgcaagaatcccatccgagtcgacttgctcaaagcggtcatcacagaggccgtctgctcctttctcttccacagcgctctgctgcacttccaggaagtccgaaccaagcttcgtatccacctgctggctgcactcatcacctttttggtctatgcaggtttgtcattctcaccaaatacttggcacttccagagcctctatgacatgaggctgtaagttctttactaaaatacatttgaaaccgtctatcccgctatgatgtaaatgctggcatccccc

SEQ ID NO: 62856 - DNA, 421 bp, Homo sapiens
agtccagcgtggtggaattcggaaaatgtatgttaggaaaaaaatatgcatacatttaagaaatctctacattaaaataaacttttactaacttgttataacatgtctgaacagaatctagtttgttgtactaagaatgataagacatcagttagaaaagagcccctatcagagcaacatgaattatgctaaaattgaaggaagaccaaacatcatatttatggtaaagcttgggtagaagaatgatgaaatcattaatcctttataaaaagtttatggggacaatgccccaaagaaatcatcaatttacaaatggataacttatttaaagaagggacaagatgatactgaagataaaccccgaagctgcagaccattcatatcaatttccaaggaaaaaattaatcttgtttgtgcctag

SEQ ID NO: 62857 - DNA, 889 bp, Homo sapiens
ccggaattcccgggtcgaggcgcgaggcagccaggagggcccgtgcggcgcggggagccagcgagcgcgccttcggcattggccgccgcgatgtcagctcagtgctgtgcgggccagctggcctgctgctgtgggtctgcaggctgctctctctgctgtgattgctgccccaggattcggcagtccctcagcacccgcttcatgtacgccctctacttcattctggtcgtcgtcctctgctgcatcatgatgtcaacaaccgtggctcacaagatgaaagagcacattcctttttttgaagatatgtgtaaaggcattaaagctggtgacacctgtgagaagctggtgggatattctgccgtgtatagagtctgttttggaatggcttgtttcttctttatcttctgtctactgaccttgaaaatcaacaacagcaaaagttgtagagctcatattcacaatggcttttggttctttaaacttctgctgttgggggccatgtgctcaggagctttcttcattccagatcaggacacctttctgaacgcctggcgctatgtgggagccgtcggaggcttcctcttcattggcatccagctcctcctgctcgtggagtttgcacataagtggaacaagaactggtgtgtgcctttatggaaagcttcccattgactcacagaaactgcccagttttgaccaaggctgtactcaactgcattgctagggatttgcagttttgtttccctttatacctgcttttttgtacctcttcataaactcctctccttcattcacttctcactttttgaccccctgcccctactcccttgcttgggctatgagtcaaccagtggtgtgaattagccacactcaatcccctgctcgtacg

SEQ ID NO: 62858 - DNA, 400 bp, Homo sapiens
cttgcctgtgcccccaaacacaaacgtatatgtgcacacacgcatgcactcacatacacatacatatgatgcatgtactcacatacatatatggatgtacacgtgcacactcatgcaggcacacacaggcacaacatatacccatgcatgcactcacgcatactcattcgtgcacacacatacacacaaactggaatttctcttctgagtatccaccatggcatctccatcctgcccttctccggggactttggtatgttggcctctttagcagagaaatgcttctgtcccccagctttaagggattacaagagaaagtctcccttttgacgctctactcctggataatacatgtaaagtctcaccgccccctttctatgtgcacatactctttgtaact

SEQ ID NO: 62859 - DNA, 719 bp, Homo sapiens
gacagacacattttaacagattcagttacttcacagtttggtaaactataatcgcaatttgctccttataacctcttagtaaattattcatctccagtgggggaagactgatgtaatgatctcactttcctaccttaggtgtttcatcagtacagacgcctcaccttcccacgcacgcagactcgcagacgccctctgctggaactgacacgcagacattcagcggctccgccgccaatgcaaaactcaaccctaccccaggcagcaatgctatctcaggtttgcgggtcctttagacttgtgcaaatatgaaaagtacatgacgactacctgtatttaagaatggtgtgaggaaatctaaccacttattcaatgtgcagctattgctagttgatgaatttggaatttcagtcactcttaggaatatgaaaccacagaacaaatgtccttttaacagagatgaaataatagtgagaattgtgagactacagcaaaaatctgctcaggaggaaagagttattcagaatagtctattttttatatatttcaggcaattaccattctacagggaaaactttttgttagaagtaagaaataatatgcataaatctttacttaaagactttgtaccaacaaacaaaagggtgaagagtgattcctattatcagtgaagggcagtgagaaattgtaaccacaatgaaactgttatttaaagaatg

SEQ ID NO: 62860 - DNA, 369 bp, Homo sapiens
gtggaatcgaggcaatgggtaaaatgaccaggcttctctttccttcctcagatatgagatcctgactccaaactccattcccaagggtttcatggacgggaagcaggcgtgcgtgctcatggtgagttgagctgctgtccctgcctctctggatgggcagccccttgtctggggagtgcccacgtggccagggcccaccttgctatatcagtggtcggtggatgcccaggctgtgtcccttctgatgctccgcgtctgactctgccgggcgccctttgcagtagcccctaggcctcagatagccagggatggtgtttggcaccagggttgtgtggaggagacaagaactgtagccatggccgggctctg

SEQ ID NO: 62861 - DNA, 1073 bp, Homo sapiens
cgaggacgcgtgggctcgcggagcccggctggagaacctcaccctcgccgagcctagaaccgagagggggccaccccaggcggtcaccagcagatttgcccgcgcgttctctttctttccacccagttgcccttgcggccggctgtaaacctgccactaggacccggtcggtgagatctagcctcttgacctgagagccgagagtggatcgctgggctgggctaacggcgacggagagcgcgccctcgctgactccgggcgcgcccagcagtagcaccgcccgcgcccgcccctggacacttgtaagtttcgatttccgatttccgcggaaccgagtcccgcgccgcggcagagccagcacagccagcgcgccatggcggacccggaggtgtgctgcttcatcaccaaaatcctgtgcgcccacgggggccgcatggccctggacgcgctgctccaggagatcgcgctgtctgagccgcagctctgtgaggtgctgcaggtggccgggcccgaccgctttgtggtgttggagaccggcggcgaggccgggatcacccgatcggtggtggccaccactcgagcccgggtctgccgtcgcaagtactgccagagaccctgcgataacctgcatctctgcaaactcaacttgctgggccggtgcaactattcgcagtccgagcggaatttatgcaaatattctcatgaggttctctcagaagagaacttcaaagtcctgaaaaatcacgaactctctggactgaacaaagaggaattagcagtgctcctcctccaaagtgatcctttttttatgcccgagatatgcaaaagttataagggagagggtcggcagcagatttgtaaccagcagccaccgtgttcaagactccacatctgtgaccacttcacccgagggaactgtcgttttcccaactgcctccggtcccataacctgatggacagaaaggtgctggccatcatgagggagcacgggctgaaccccgacgtggtccagaacatccaggacatctgcaacagcaagcacatgcagaagaatcccccagggcccagagctc

SEQ ID NO: 62862 - DNA, 434 bp, Homo sapiens
gaatctgcgcgagctcccacctagaactggattgtgcgctccatttctttcacctcatagctgggcgccaccgctgccacctgctcagagtgaaataatgaatgtggtcaacctgaagcaagccattttgcaagcctggaaggagcgctggagtgactaccaatgggcaatcaacatgaagaaattctttcctaaaggagccacctgggatattctcaacctggcagatgcgttactatagcacgccatgattggaccatcccccaatcctgtcatcttgtcctacctgaagtatgccatgagctcccagattgatgacttttctcgggacctgtgtgtccaggcattgctggacatcatggacatgttttgtgaccgtctgatctggcacggctaagcagaggaatgcattggactgtggcgagtccttcata

SEQ ID NO: 62863 - DNA, 1321 bp, Homo sapiens
ttttcttttttgtctctttaaaatcatttttaaaaagttacaaaacaatatcattcatcatatattcttattttcctttttttaaaaaattaaagtaataaaaaagtcactttataaaataatataaaagggcttgatgggtggggccggtgggtgctgtctgagctggtggactgaggaatccagtgcttctcttctggctaccccctcgttgtcaggaaggacccccaggccacagatggggatgacagcaggtcccttgtctctggctgggctgtgggagaggggcagggaaagccggggcaggagggcagtgggcagacccagacaggggggacggctggggccctgtccccgaaggagacgggagggcctgctggtggggggtgaggtggcactggggcagcgggtgtctgggcccctcagtgccggctcctcctccagacagtctgcctagcttccgttgctcaacaatcccccagcagctcaactgggctccaagtcccctgcggctgggccaccgtcctgccatgtccgaaaccccatgtgccatgaggaaactgggcccacgttcaatctcttgccccgtgaaactggtcctcggacggtggggcatgaaggggttgccagtggggccaggggcagctgtccaccaggtggacggggcagcccttgaggggggtcttgctggccttgtggctgtcatggaggctcctgtcccagcagtgcagtgctcggggcagcgacgtccccttcacctggacatccgtccagtggctccggatgatgatctcatgggagaggcaggcgggggcaaagctggccggcacgtccttgagtgtgtggcgcagctcgcggccgaggttctggatgtacagccgcaggccctcctgcaccggctgccccgtcaggtgcacgttgtccaccgtcagctgtgcctcgtcaaacagccactgcaccacgaacacagggcagcgcagggtcgggtagaccttgtagccaaagaagcagttccactcctcgccctcctggaactggcgtcggcagcgctccgggaccaccccgttccagtacctgatgccacggcggatggcctccgtgggcgcgcacgtgatcgtgtcgacgcagtctgtgtggcgatactgcttgttgtccaggaaccagccggagtcagccaggcctcgcacctggatggctgggtagcccagcttctccagctgctcagccacacggtccacattcaggagcacaccggtgccccccgcgatgctcccggccagcagcagcaccttggccccgcagccaggttgaatgcccgcac

SEQ ID NO: 62864 - DNA, 1237 bp, Homo sapiens
caagtggggagcggagaggagaggtggcaggtgtgccacgaagggctgtggcccaatcctctctggcccaacacggccacctcacctgccggcattcttcacaaagcccaggtcagccagctccacatcacacagttcgcagcggaagcagcccgggtgccagttgttgttcatggccttgatgacgcggccaatgatgaactcacctggaagaagacaggtccctgctggctggggagcacgtgcctgtcccctcttcggaccctcccaagccctgtccacctagcactccgcctgctctctgcctggcccatgggctccctcgtgggatggtgatgcctgtagggggcctgacggctgccgctcagagaggcaaggtggggagttaggaaagagctgggccagttctgtgtaccccctcggccccctgccccccgccactgctgcccacttcccaggcagcccaggatgtgtactgtcaccggccttaccgcaggatccacagcacggagcaaacagcatttggaagtcgtgttcgcagtacttccggccttcaaactgcaaaggggtcgcagagagaggacaagcaaaccacctatcatccccatgagcagcccaggcccttgttgggtcaggacctgacagcaggggatgaggcactgaggcaggggcatgccgggctgaggctggagcagtgggtcccaggcctggccagagaggacactggcccttttgggatggtggggtgcaaagggaggtgcccccgtggaagctggagaggtccgtgaggccacctgtcaaagggccactggtgtctactgaggatctggaccctgttggtccggagaacaggctgggggcgaggcggttttaagccaggagggatgagatccagtctgaagtgtagtgtcacttggtcctatttcgtataccttctctgtgggagtatccagctctctcagaggccatgaagacccgggtataggagacagaaggaagggaacgcaggaagggcctgggcacggggaagtgggaagagctcagggctgcggccagcaggagccagtgtgcacaccctccaggcggcagctgccagcgagggcccctgtgctggccacaagcggggccaaagcctgcctctgctttcctctaacaattgtattttctgttttttaattggtttttccctgttctctaaaatgagtgtcttattagactaaactggatatagccctac

SEQ ID NO: 62865 - DNA, 539 bp, Homo sapiens; identical to SEQ ID NO: 62820

SEQ ID NO: 62866 - DNA, 383 bp, Homo sapiens
gagagctattccatattaataaatagaaagattcagtattttcaagatgtcaattattcccaacttgttctatagattcaatgcaattcctatcaaaatctcagcaaattattttgtgggtattgacaaactgattctaaagtttataagagatgccaaagactcgggctagccaacacatattaagggagaagaacaaagttgttcttctcaagcttacatggaacatttaccaagacagaccatatttgaggccttaaaatacactttaacaaatttaaaagaataaaaatcatacagtgtctactcttagaccacaatggaattaaactaaaatcagtaacagaaagataagtggagaatcccaagacagctgacactag

SEQ ID NO: 62867 - DNA, 763 bp, Homo sapiens
gcggtacaaagcgcacgctgtctcccggacgtaataagatgggttcgtcacgcgccggatcaaacaggctgagtgaggtatgaccaatcaactgccagccacccggcgttgccagcggataaacaccagtctgcggcccgccgatcccgacagaacctgccggaacgagtaagcgcggttcagcgcgccgtggcgtgtgtagttgttccggcaaactcccgagatacgggaagcccggttgaaaacctaaaaaccagaccacgtattccacggaggagtgcaattcaacaacctgtttttcgctcaacccgcaatgcgccgcgaccaccgccaaatccggtccgcctgcaccaccgtaaaccaccggaatttcaataaagcgagactccggctccagcgcctcgctctcctcccaccagcgttgcaaacgctctatggcatccagcgccagttatcactcgctttgaattgaacctggcaccgggcgtaaaagcggcgcgcatttctaacttgtcacgggaccttgcccgttcactttcgacggtggcggtgcgtgtcgttgaagttattcctggcaaaccctatgtaggtctggagttaccgaataaaaaacgacaaaccgtttatctgcgcgaagttttggataacgccaaattccgcgataatccgtcgccattaaccggggtgctgggtaaagatatcgccggtgagccggtggttgccgatctggcgaaaatgccgcacttgttggttgcggggacta

SEQ ID NO: 62868 - DNA, 438 bp, Homo sapiens
accgccaccttaaactgcatgctgcacaaagtcgataaacgctttacgctgatcgccttctttatcaaaacacccactcaggctaactaccattaataacgccgcaagaggcgcaaaccagcgagagcaggactttcctgtcgccattttcttactcctttcacccaaaaaaagcgcacaacgacacacgcgtgtctgacgtgacaaggatagtccaggacaggcttgcaggataccctttctacgtaatcttcctggtaaaatcatggagaaaatgaaacaagggtaatttgttgtttcattgttaaaaaatgatagtgccgttgccttttttgtagccagagatttacgccttcgcagaaggttagattttcgaaatctttacaaaacaggagggggaagagatatatcggcatttatcagatacgtaggggggtc

SEQ ID NO: 62869 - DNA, 1404 bp, Homo sapiens
gctgagaaaggagggccgctgcaggcggggttcgaaccgtggggtctgggctgctcccgcggagggcctgggcggacgcgggatgctgggggtccgctgcctgctgcggtccgtgcgcttctgttcctccgcccccttccccaagcacaaaccttcagccaaactgagcgtgcgggacgctctcggggctcagaacgcgagtggggagcgcattaagatccagggatggattcgttctgtccgatcccagaaggaagtcttgttcctgcatgtaaatgatgggtcatctttggaaagccttcaggttgttgcagattcaggccttgacagtagagaattaacttttgggagttctgtggaagtacaagggcagctgataaaaagtccatccaaaaggcaaaatgtggaactgaaggcagaaaaaattaaagttattggaaattgtgatgccaaggatttccccatcaaatataaagagaggcatcctctggagtacctgcgacaatatcctcactttaggtgtaggactaacgttctgggttctatattgaggattcgcagtgaagcgacagctgctattcattctttctttaaggacagtggctttgtacatattcatactccaataatcacatccaatgactctgagggagctggagaactttttcaacttgaaccttcaggcaaacttaaggtacctgaggagaatttcttcaatgttcctgctttcttaactgtctcaggacaacttcatctagaagtgatgtcaggagcttttactcaagtgtttacctttggtccgaccttccgagctgaaaattctcagagccggaggcacctggcagagttttatatgatagaagcagagatttcttttgttgacagccttcaagatcttatgcaggttatagaggaactgttcaaggctacaacaatgatggttctctcaaaatgtcctgaagatgttgaactctgtcacaaattcatagcacctggccaaaaggacagattataacatatgctaaaaaacaactttttaatcatttcttatactgaagcagtggagatcttaaagcaagcatcccagaacttcacctttaccccagagtggggtgctgacctacggactgaacatgaaaagtacctggtgaagcactgtggcaacatacctgtcttcgttattaattatccattaacactcaagcctttctacatgagggataatgaagatggccctcaggaactagagggaagtgtagcttaacacagcctggggttgatgattctccttagtattgtagtcattggtcagccttaaatgttcatacttgtgcaaagtcattaatggataaatacagcatggtggctagtggcatagatttagagtcagagagacttgagttc

SEQ ID NO: 62870 - DNA, 1846 bp, Homo sapiens
ttttttttttttagggaagagtttgctgtgaaacatcattttattaactaattttattttattttttacaaaaataaacaatttaaccaacaagaagtacaaaagattctggatattcaaactcgaggaagggggaaagcctggttttggctgctttgaggctttcattgaaagcaaatgaggcagaaaggccccggccccacccccgccccaggtcctggctcaaaccacacctgctccctgaccccagtcttggctcatgctgaggtgtgcacctctgcccctgacccctgggctggcctgggagtgtcccctgtcgggaggtcagagatagcctccccaggtacagaatcacccacatcctggagcatctcccgccaagtctcctgtccagacctaagctgagagaacactccacgatggattgtccccacgcagcccccaccgcctgctgtggcatgtgcagcagcagcagcaggggctttagctacattctcacactattgaacacagtgatggggctgcccacggaaccgtcccagggaggggcacagcccccagtggggagactagcctgagcttgcttacagcccacagggttggagaggcagtcatacccccatgattcctggactaggagccagcagtcccatagctaggctggtaaactcacattttaacatttggcattattgcacgtttgtcctggtcacatctgtctgtctgggatgttagctttgtctgcaggggttcccaggtgacatgcagtgctgccagtgcaagtcactccctccacaggcaagcccagctgctgaggatagtcagctggtcagccgagccctcagataggtcagccagaggccttcacatatgtggtcttgttgggatcagggaccacttggctccatccagtcttgaaaaagaccagctgccgacctgtccaggtggtctggttggtgaccacaaaggcccgacactgggcatggctctcacagacatccacagcctcagccaggttgaacactgaaaggaggcagctcccgtggtggtaggatggccagcagcggtagtcttcctgggggatggtgctgtctgggatacactggtactcggtactgctgcttgccgtggagttctgcagatactgcccgctccggtacaggtgcagcaccttctccagctgggccagggtctcgtccaccccccaggcgagctctcctgtggcgttgacgatgctgtccagcagaggacgcagtgaaggcggggcactgtgaggcaggaggtatgtgaagaaaaacctgtaggcattatagaggttccgcttctcgttcatgccctcgcaccagccctgggctgagcagggcagggtgaagttcctggccggaaactcgagtatgcagtcggtgctgcctgcacacggcgtctcctccacacgtgcgtcatccaggtccgtcactttgagctccccatccaccagcacaaactgccgagggcggaagtccagcagagtgacggagcccagtggggagtgggccaggtggtggaggaggcggcccaggctcaggcagattcggaatcgatcctcccaggaagtttgcagcagctggatcatttctacaggggcgcccagctccgtgatggtggtcagggtgtctgggatgtcctcgctgtcctggtagcagtagccatagagctgcagcacgttggggtgccgcagccgctccagcagcaccatctccttaagcagcttgtgggccgccagccgatagcagcccctccgtaccccgaactcgcgacgcagctgcccatatcgtgccgctaaagtccatcgccttgcgcgccctcg

SEQ ID NO: 62871 - DNA, 3773 bp, Homo sapiens
ttcgaagacccctagtctagagtggcgtaattcgtgtgatcgtcacctttgtggttattatcagaatgatttagttgttagcatctgaaatggcaaatgtggtgcagactttcagggttactgagattatgttttccacattcgagaacataactagggtaaatctccctgagattagggactctgatttaccatgttgtgactgtcacatgaaagtattaaaatattaccttgccattagcaggcctatcagagaggagctgctcctaaatgtcgaattcttccagccggtggcaaggtgttaacctcagaagatgaatataatctgttgtctgacaggcatttcccagaccctcttgcctccagtgagaaggagaacactcagccctttgtggtcctgcccaaggaattcccagtgtacctgtggcagcccttcttcagacacggctacttctgcttccacgaggctgctgaccagaagaggtttagtgccctcctgagtgactgcgtcaggcatctcaatcatgattacatgaagcagatgacatttgaagcccaggcctttttagaagctgtgcaattcttccgacaggagaagggtcactatggttcctgggaaatgatcactggggatgaaatccagatcctgagtaacctggtgatggaggagctcctgcccactcttcagacagacctgctgcctaagatgaaggggaagaagaatgacagaaagagggcggggcttggtctcctcgaggaggcctacaccctggttcagcatcaagtttcagaaggattaagtgccttgaaggaggaatgcagagctctgacaaagggcctggaaggaacgatccgttctgacatggatcagattgtgaactcaaagaactatttaattggaaagatcaaagcgatggtggcccagccggcggagaaaagctgcttggagagtgtgcagccattcctggcatccatcctggaggagctcatgggaccagtgagctcgggattcagtgaagtacgtgtactctttgagaaagaggtgaatgaagtcagccagaacttccagaccaccaaagacagtgtccagctaaaggagcatctagaccggcttatgaatcttccgctgcattccgtgaagatggaaccttgttatactaaagtcaacctgcttcacgagcgcctgcaggatctcaagagccgcttcagattcccccacattgatctggtggttcagaggacacagaactacatgcaggagctaatggagaatgcagtgttcacttttgagcagttgctttccccacatctccaaggagaggcctccaaaactgcagttgccattgagaaggttaaactccgagtcttaaagcaatatgattatgacagcagcaccatccgaaagaagatatttcaagaggcactagttcaaatcacacttcccactgtgcagaaggcactggcgtccacatgcaaaccagagcttcagaaatacgagcagttcatctttgcagatcataccaatatgattcacgttgaaaatgtctatgaggagattttacatcagatcctgcttgatgaaactctgaaagtgataaaggaagctgctatcttgaagaaacacaacttatttgaagataacatggccttgcccagtgaaagtgtgtccagcttaacagatctaaagccccccacagggtcaaaccaggccagccctgccaggagagcttctgccattctgccaggagttccgggtagtgagaccctcagtaacgaagtattccaggagtcagaggaagagaagcagcctgaggtccctagctcgttggccaaaggagaaagcctttctctccctgggccaagcccacccccagatgggactgagcaggtgattatttcaagagtggatgaccccgtggtgaatcctgtggcaacagaggacacagcaggactcccgggcacatgctcatcagagctggagtttggagggacccttgaggatgaagaacccgcccaggaagagccagaacccatcactgcctcgggttctttgaaggcgctcagaaagttgctgacagcgtccgtggaagtaccagtggactctgctccagtgatggaagaagatacgaatggggagagccacgttccccaagaaaatgaagaagaagaggaaaaagagcccagtcaggcagctgccatccaccccgacaactgtgaagaaagtgaagtcagcgagagggaggcccaacctccctgtcccgaggcccatggggaggagttggggggatttccagaggtaggcagcccagcctctccgccagccagtggagggctcaccgaggagcccctggggcccatggagggggagctcccaggagaggcctgcacactcactgcccatgaaggaagagggggcaagtgtaccgaggaaggggatgcctcacagcaagagggctgcaccttaggttctgaccccatctgcctcagtgagagccaggtttctgaggaacaagaagagatgggagggcaaagcagcgcggcccaggccacggccagtgtgaatgcagaggagatcaaggtagcccgtattcatgagtgtcagtgggtggtggaggatgctccaaacccggatgtcctgctgtcacacaaagatgacgtgaaggagggagaaggtggtcaggagagtttcccagagctgccctcagaggagtgaaagggacaatttggctgaagtctttctctgaaaaaagccaaagggttataggggtacacttaggggttgcatgcaagctgttaccaaaaaatttttaagtattttcttaatttgaataataaaaccagaggaaatgcatacagggcatgagcaactgaggcaaacctttgtggacatgaattgttctacgatgaatttttgctttagtattttaataagaattacaaagacaatggcatacttggggtgagagggagctgaggatgtctgaggagggaatagtattgcagggaagactgagaaaacagtaggatgacagttttgagtatactctgcacttttcaattgtgcaatcttcttgtgcactttaaggctttttaattttgtttgagaatgcaaatgtatactgtaagtctacctttactatctactatgcctacttcaccatctcttaaggactcggcatttgtccacagtcagactgcaagagagggtaggtcatgaacagtcacccatgctggctgtagcccccacagaggcaatcatgcccaatagattcaagagaagctaagcggaaatggagggcggaaggtgtgatctgtgggactgtctgggcctgttactcatcctgctatcaatttcttattaattaatcttgatgattcttattaattaatcacatttgcaggaaattcagatgaggcaagaaaattttattggcctgggtaagactgaaagcattccaaattaggcttagactgtgcaaagggcttagctaagttatcgagcttaaaacccgtcaattaaacaaacattatttgaacagttactgcatgccacgcactgtgttgggcttagtaataaaaaaaaaaaaagataagtgcttgttctagcataaattaaaaggtccaagggaatttaatctggaagagaacatatgccaatttttaaacctatgacagccttttttttttctctttccattcaaatagtcctggttcattcccagaagggcacaaaatgaatgaataaataaataaatgaataaagacaaaaaaaa

SEQ ID NO: 62872 - DNA, 1898 bp, Homo sapiens
cgggacagctcagagcagggcagaactggggacactctgggccggccttctgcctgcatggacgctctgaagccaccctgtctctggaggaaccacgagcgagggaagaaggacagggactcgtgtggcaggaagaactcagagccgggaagcccccattcactagaagcactgagagatgcggccccctcgcagggtctgaatttcctgctgctgttcacaaagatgctttttatctttaactttttgttttccccacttccgaccccggcgttgatctgcatcctgacatttggagctgccatcttcttgtggctgatcaccagacctcaacccgtcttacctcttcttgacctgaacaatcagtctgtgggaattgagggaggagcacggaagggggtttcccagaagaacaatgacctaacaagttgctgcttctcagatgccaagactatgtatgaggttttccaaagaggactcgctgtgtctgacaatgggccctgcttgggatatagaaaaccaaaccagccctacagatggctatcttacaaacaggtgtctgatagagcagagtacctgggttcctgtctcttgcataaagggtataaatcatcaccagaccagtttgtcggcatctttgctcagaataggccagagtggatcatctccgaattggcttgttacacgtactctatggtagctgtacctctgtatgacaccttgggaccagaagccatcgtacatattgtcaacaaggctgatatcgccatggtgatctgtgacacaccccaaaaggcattggtgctgatagggaatgtagagaaaggcttcaccccgagcctgaaggtgatcatccttatggacccctttgatgatgacctgaagcaaagaggggagaagagtggaattgagatcttatccctatatgatgctgagaacctaggcaaagagcacttcagaaaacctgtgcctcctagcccagaagacctgagcgtcatctgcttcaccagtgggaccacaggtgaccccaaaggagccatgataacccatcaaaatattgtttcaaatgctgctgcctttctcaaatgtgtggagcatgcttatgagcccactcctgatgatgtggccatatcctacctccctctggctcatatgtttgagaggattgtacaggctgttgtgtacagctgtggagccagagttggattcttccaaggggatattcggttgctggctgacgacatgaagactttgaagcccacattgtttcccgcggtgcctcgactccttaacaggatctacgataaggtacaaaatgaggccaagacacccttgaagaagttcttgttgaagctggctgtttccagtaaattcaaagagcttcaaaagggtatcatcaggcatgatagtttctgggacaagctcatctttgcaaagatccaggacagcctgggcggaagggttcgtgtaattgtcactggagctgcccccatgtccacttcagtcatgacattcttccgggcagcaatgggatgtcaggtgtatgaagcttatggtcaaacagaatgcacaggtggctgtacatttacattacctggggactggacatcaggtcacgttggggtgcccctggcttgcaattacgtgaagctggaagatgtggctgacatgaactactttacagtgaataatgaaggagaggtctgcatcaagggtacaaacgtgttcaaaggatacctgaaggaccctgagaagacacaggaagccctggacagtgatggctggcttcacacaggagacattggtcgctggctcccgaatggaactctgaagatcatcgacagataaaaagaacattttcaagctggcccaaggagaatacattgcaccagaatgta

SEQ ID NO: 62873 - DNA, 1396 bp, Homo sapiens
ctaggaggaaatactgaccccataaacctaaatctcacacacggttttggacgtttaaacgaatggatttaacagccttttggaattcagcctgtttgtcatgactgtccaaagtatgataatcacatgagagtgctcgttgctacggatgtcatttgactcatcagagaaaatctgtctaaaagaaaatatccatgtgaccaaatccatttcattattgaatggcttgatggatttcctttactctgattcataccaaagctgtccttctcaaccaaagcaagaaaggatcctgcatgagtcaatcccagaatgcaatttttacatcaccaacaggtgaagaaaacctcatgaatagcaatcacagagactcggagagcatcactgatgtctgctccaatgaggatctccctgaagttgagctggtgagtctgctagaagaacaactaccacagtataggctaaaagtagacactctctttctatatgaaaatcaagactggactcagtctccacaccagcggcagcatgcatctgatgctctctctccagtccttgctgaagagactttccgttacatgattctaggcacagacagggtggagcagatgaccaaaacttacaatgacatcgacatggttacacatctcctggcagagagggatcgtgatctggaactcgctgctcgaattggacaagctctcttaaagcggaaccatatcttatctgagcagaacgaatccctggaggagcaattgggacaagcctttgatcaagttaatcagctgcagcatgagctatgcaagaaagatgagttacttcgaatcgtctccattgcttctgaagaaagtgaaactgattccagctgttctacacctcttcggttcaatgagtcctttagcttatctcaagggttgctgcagttggaaatgctgcaagaaaagctcaaggaactggaagaagagaatatggctcttcgatccaaggcttgtcacataaagacagaaactgttacctatgaagaaaaggaacaacagcttgtcagcgactgtgttaaagaacttcgtgaaacaaatgctcagatgtccagaatgactgaagaattgtcagggaagagtgatgagctgattcgataccaagaagagctttcctctcttttgtcacagattgtaggaccttcagcatagacttaaagaagtaggcttattcgttcattcaacagatatttgttaagcactcacataggatcttgcaccatgctaagggctagatacaatagacagaatacacattgaccttgcccttttaagatgccctagtctgattgctgctttaatcatctttatgtcatataagagatcatgagtaaatactttacagtcactatttctctgtg

SEQ ID NO: 62874 - DNA, 382 bp, Homo sapiens
ggaactggaagatagatctgaagagttaactagaatgcagccagatagacaaagagatggggaacatgtaagggaggttaggaaacatgaagaatggagagaaatgtctaacatgcaaaaaaattctccggaaatgagacaagcaatatttgaagcaaatgatataaagagacatttcatgaagaggtgacaagaatacttaatatacatgtaaaaagatgttggaactcattagtaatcaggaaaatgcaaattataaccaacgtgagatactcttccacacccaccaaactggaaatagttgagtgtctgatacttctaagcaaaaatggggaccagtggggactctcatcaacagcagacagaagtgtcagtacaactt

SEQ ID NO: 62875 - DNA, 935 bp, Homo sapiens
gcggccgcgcacctgctcccgtcgccctacagcaagatcacgcccccgcggaggccccaccgctgcagcagcggccacggcagcgacaacagcagcgtgctgagcggggagctcccgccggccatggggaagacggccctgttctaccacagcggcggcagcagcggctacgagagcgtgatgcgggacagcgaggccaccggcagcgcgtcctcggcgcaggactccacgagcgagaacagcagctccgtgggcggcaggtgccggagcctcaagaccccgaagaaacgctccaatccaggttctcagagacggaggcttatcccagcactatccctggacacctcttcccctgtgagaaaaccccccaacagcacaggcgtccgctgggtggatggccccttgcggagcagcccgaggggccttggggaaccctttgagattaaagtctatgaaatcgatgatgtggagcgcctgcagcggcgacgagggggtgccagcaaggaggccatgtgcttcaatgcaaagctgaagattctggaacaccgccagcagaggatcgccgaggtccgcgcgaagtacgagtggctgatgaaggagctggaggcgaccaaacagtatctgatgctggatcccaacaagtggctcagtgaatttgacttggagcaggtttgggagctggattccctggagtacctggaggcactggagtgtgtgacggagcgcctggagagccgtgtcaacttctgcaaggcccatctcatgatgatcacctgcttcgacatcacctccaggcgccggtagatgagccagacccttgtcctagtggtcccccgctccccaggacttcagagatgttgcacgcccctaggccctctgtgctggggcatcaaagacaatgaatgaggatgaaggctggtggcaagtctggagcg

SEQ ID NO: 62876 - DNA, 1150 bp, Homo sapiens
  misc_feature (1)...(1150): n = a,t,c or g
cgttgctgtcggtccgcagagccagttcctagcgcagagccgcgcccgccatgagggagatcgtgcacatccaggcgggccagtgcgggaaccagatcggcaccaagttttgggaagtgatcagcgatgagcacggcatcgacccggccggaggctacgtgggagactcggcgctgcagctggagagaatcaacgtctactacaatgagtcatcgtctcagaaatatgtgcccagggccgccctggtggacttagagccaggcaccatggacagcgtgcggtctgggccttttgggcagcttttccggcctgacaacttcatctttggccagacgggtgcagggaacaactgggcgaaagggcactacacggagggcgcggagctggtggacgcagtgctggacgtggtgcggaaggagtgcgagcactgcgactgcctgcagggcttccagctcacgcactcgctgggcggcggcacgggctcaggcatgggcacgctgctcatcagcaagatccgtgaggagttcccggaccgcatcatgaacaccttcagcgtcatgccctcgcccaaggtgtcggacacggtggtggagccctacaatgccacactgtcggtgcaccagctggtggagaatacagacgagacctactgcatcgacaacgaggcgctctatgacatctgcttccgcactctgaagctgacaacgcccacctacggggacctcaaccacctggtgtccgccaccatgagtggggtcaccacctcgctgcgcttcccgggccagctcaatgctgacctgcgcaagctggcggtgaacatggtgcccttcccgcgcctgcacttcttcatgcctggcttcgcgccgctcaccagccgcggcancagcagtaccgggcnctgaccgtgcccgagctcacccagcagatgttcgacgccaggaacatgatggccgcctgcnatccgcgccatggccgctacctgaccgtggccaccgtgttccgcgggcccatgtccatgaaggaggtggacgagcagatgctggccatccagagtaagaacagcagctacttcgtgggagtggatttccaacaacgtgaaggtnggccgtgttgcgaanattcccgncccggggncttgaaaggatgggtt

SEQ ID NO: 62877 - DNA, 363 bp, Homo sapiens
caaggtcttcagtaacgttcaagtcttgcagtgcatcgacgaattcacactgtagagaaaccttgcaaatgcaatgaatgtggcaaggtcttcagtaaacgttcaagtcttgcagtgcatcagagaattcatactggacagaaaacttacaaatgcaataaatgtggcaaggtgtacagtaagcattcacgtcttgcagtgcattggagaattcataccggcgagaaagcttataaatgcaatgaatgtggcaaagttttcagcatacattcacgacttgcagctcatcagagaattcatactggagagaaaccttacaaatgcaatgaatgtggcaaggtcttcagtcaacattcacgtctt

SEQ ID NO: 62878 - DNA, 1693 bp, Homo sapiens
agaggagagaggacgggcttggatgaagaagggaaagaaagagaaagagactgaagcagagaagagccgcagaggaagaaagtgaatgagcactcaagaaggacaaagaggagtagtcgggggtggggtggaggcagggcggggaagggagtgaccgcccctcctggctgcactcttgcctccggagccctctgatcctgtttgcagtgatgctccgagggcaggcacctgctgctctgtaatgattcagcccctttcagccgtcgtcgcgttaacacaacaggatgctgttgctattgtcactactgcctctcctgccgccgctgctgctgccgccgccgccaccgccgctggtcctccttctgcttttacttctcctgcatgacagttgttttcttcatctgagcagacaccagcttcagatgctcgaggtgagaaacatgcctttcagtttgggctactggtttacttaattaatcagccggcagctccgtcgatctattttcgtccctgtcctcttgacgagcccgggatggtttggagtagcatttaaaagaactagaaaagtggcccagaaacagcagcttaaagaattattacgatatactttgattttgtagttgctaggagcttttcttccccccttgcatctttctgaactcttcttgattttaataatggccttggacttggacgatttatcgatttccccctgtaaggatgctgtatcatttggttggggggggcctctgcgtggtaatggaccgtgaggagcggccaggggctttctttctgggaggtgaagccgatgggagatttattccccagacatgtctggaggtcgccgccgagaggtcctccagcccctccactcagctgagtgcagacccatctcttgatgggcttccggcagcagaagacatgccagagccccagactgaagatggggagaacccctgggatttgtggggctgggcctgccctgctgtgcgtgcctagaagctgagcgcctgagaggttgcctcaactcagagaaaatctgcattgtccccatcctggcttgcctggtcagcctctgcctctgcatcgccggcctcaagtgggtatttgtggacaagatctttgaatatgactctcctactcaccttgaccctggggggttaggccaggaccctattatttctctggacgcaactgctgcctcagctgtgtgggtgtcgtctgaggcatacacttcacctgtctctagggctcaatctgaaagtgaggttcaagttacagtgcaaggtgacaaggctgttgtctcctttgaaccatcagcggcaccgacaccgaagaatcgtatttttgccttttctttcttgccgtccactgcgccatccttcccttcacccacccggaaccctgaggtgagaacgcccaagtcagcaactcagccacaaacaacagaaactaatctccaaactgctcctaaactttgtaagtagagagagagagagagacgatgatgatgatgaataaaaggggtgggtttgaggtccccaaaggacatttccctttcttcttgcattttagttgcctggttttgtttaagcaaagcctatgtttgagatgcttgggatggcattgaagggccgagtaaaatgatcttgcaaactccggatctgaaccagtgttgtaacagcagctctct

SEQ ID NO: 62879 - DNA, 928 bp, Homo sapiens
ctttagcgttttctttatttttgatttcccttttgattttattttcatgaaatgggtgaaggtatacagaagttggcttcagagctggtcatctcggataaacctgttgccctctgagtttttcccatagtaaacgtagcgacacttccccaggacacctggccaacatgaagaaactccatctttactaaaaatacaaaattagctgggcatggtggcacatgcctgtatttccagctacttgggaggctgagacaggagaatcgcttgagccggggaggcggaggttgcagtgagccgagaacgcaccactgcactccagcctgggcgacaagaatgaaacttcatcttggtgactggtgagttccctggaagcagaaggcaagggcgtgtagtggcgctccggggagctggcaacgtcctcactagaagccttgggcttcaccaccttcatgaagactcctctgaccaacgcctcctctcgttcttgtctggttactttctgggcatccagaaatttcaagttgggcagcttgtacagaacaaagcatctgtatctcttgtagtcttcctcatccttttccaagctgaccagctcgttgggacaggccacgttgcccagcagactgaggtactccagagctggtgtcacttctgccaagtgatccagcaggttctccaaatcagtgattcggttcttgttgagggttaaggtatgcagtctgggtaaccctggcaacacaaggtcgtcccccagctgattgttgtccaagatgagttcctccaggctcctgaatgcgctcagtccttccagtgacctcagaaggttaaagctcagatcaagcctctttgcgaaatgtccacagtccctgccaaggtgctctggaatttctctgcagtcctggcctatgtaggacacttgagttcc

SEQ ID NO: 62880 - DNA, 936 bp, Homo sapiens
atctcgcctagcgtgacacgagcgctcttacttagatgtctacataataaagctgctgtatttttgtatgaaaataatgtgatgaatattcgacaggttaactgttctccacatccttactggttgcctaattttatggatgtcttcacgtggtctttaccgtttgttggagaaaaagtgacagaaatgttggtaaatgttctgagtatttgctctgatgatgaactaatgactgaaggtgaagaccagtttgatgtaggttcagctgcagcccggaaagaaatcataagaaacaaaattcgagcaattggcaagatggcagtgcaaatatccaagaagaggaagtttgtcgctgatggcatcttcaaagctgaactgaatgagtttcttactcgggagctggctgaagatggctactctggagttgagaacacagaatgttcttggtgagaagggccggcggattcgggaactgactgctgtagttcagaagaggtttggctttccagagggcagtgtagagctttatgctgaaaaggtggccactagaggtctgtgtgccattgcccaggcagagtctctgcgttacaaactcctaggagggcttgctgtgcggagggcctgctatggtgtgctgcggttcatcatggagagtggggccaaagcgtgcgaggttgtggtgtctgggaaactccgaggacagagggctaaatccatgaagtttgtggatggcctgatgatccacagcggagaccctgttaactactacgttgacactgctgtgcgccacgtgttgctcagacagggtgtgctgggcatcaaggtgaatatcatgctgccctgggaccaactggtaagattggcctaagaagccctgcctgacacgtgagcattgtgggagccaaagatgagatactgccgacgaccccatctcag

SEQ ID NO: 62881 - DNA, 566 bp, Homo sapiens
agcggtcgtgttgccatgggccggaggagagccccggccggtgggtcgctgggacgggcccttatgcgccatcagactcagcggagccgaagccatcgtcacactgactcctggttgcacacaagtgaactcaatgatggctatgattggggtcgtcttaatcttcagtcagtgactgaacagagctcccttgatgacttccttgctactgcagaacttgcaggaacagagtttgtagctgaaaaacttaatattaagtttgtgcctgctgaggctagaactggactactgtctttcgaggagagccagagaattaagaagctccatgaagaaaacaaacagttcttgtgtataccgaggagaccaaactggaaccaaaatactaccccagaagaactcaaacaagcagagaaagataactttctagaatggagacgtcagctttgtccggctagaagaggaacagaagctgatattgactccatttgaacgaaatttggacttttggcgccagctctggagagtcattgagagaagtgatattgtggtccagatagtagatgctc

SEQ ID NO: 62882 - DNA, 343 bp, Homo sapiens
  misc_feature (1)...(343): n = a,t,c or g
ctctaacccatccatatggctgccgctgcgctacgcgccgatatctatctccccgctgtttccccatatccagggctacctgctcctctccgcttcgcatggcgtctacaagcctgcacaccaagggcgcccttcccctggaaacggtcactatgtacacggtcattcccaaaagcaagtacgtcttggtgaaacctgacacccagtacccctacagtgagaatctggatgagttcaagcgacttgctgaaaactcagcttccaacgatgatctcttgatggcagaggtggcgatctcagattatggagacaagctgaccctggagctgagggagaaatacan

SEQ ID NO: 62883 - DNA, 328 bp, Homo sapiens
gaaaaagcttacatgctcatggtttcaaggtactaattaacagaaagactttcaaaactgaaataggggtctcagcagctcgggcagcgggaggagtgccagtagccaggcagcccagcttcgcgaaggctctcagctccgtggcccacaggtgcccagcaagtgcccctcctgccgccaagatgcccaagaggaaggtcagttcagccgaaggggtggcgaagcaagagcccaagaggagatctgcgcacttgtcagctaaacctgctcctgcaaaagtggaaatgaagccaaagaggcatcaggaaaggctaaatcttcagattaa

SEQ ID NO: 62884 - DNA, 413 bp, Homo sapiens
ggcacgagccatgaaacttctattgcgaacgccatgcttcatttgacaaacggggacaaggctaatatcagaagcctgtggcgcaaggccaatgtgtacgaggctggactacagaccctgattgggctactggaggactacctacgtaccaagaggatacttgacagctttggcaacctggcctctgactctgccatcatgggcaacccaaaagtcaaggcacatggcaagaaggtgctgacttgcttgggagatgccataaagcacctgaatgatgccaagggcacctttgtccagctgagtagaactgcactgtgatcagctgaatgtggatcctgagaacttcatgctcctgctaaatgtgctgctgaccgtgttggccatgcatttcggcagacagttcagccctgagg

SEQ ID NO: 62885 - DNA, 375 bp, Homo sapiens
ggcacgaggttgagccaccgcacccagccgaaaaatcttatttaagcctgaccttgggagagttactcttatgcttatgatatagaaagctacaaaatacattgtttccatcataacaacaggaaaaagccagatagataagccacaaaaacataacttttcttgagtccagcagagagctgaagacacaaggcaaccaagtaatcaagtaatcagatttaaaaagaggaacgctcccctccagggacattcggtgataataactcatacgactgtggcatggaccaactgagagacctgaccagagaacaactgatgtcattgatgagttccctgacagatcccagtcagtgtcagagaagtatcacatataag

SEQ ID NO: 62886 - DNA, 414 bp, Homo sapiens
ggcacgaggcaaaacacggtgattgtgaatggagttgctatggcctctagggcgacccagcccacgcacgtcaacgtccacatccaccaggagtcagctttgacacaactgctgaaagctggaggttctctgaagaagtctctttataacctggagactctgtgctttgttctgtcaggaattgctgagtattagtgagattatctgatggctaatttattgggttgttatcttattgtcatgtgtccttcgtatggcaacttaatgttatacatgtgtagatttcactaatttattggttatcacatttgtggaatcatttatccgttcatcttaggtaattattggtactagggttactgttctatgtaagtgagtctgatattatgttgtatgatgaaaagtatttgttgg

SEQ ID NO: 62887 - DNA, 398 bp, Homo sapiens
  misc_feature (1)...(398): n = a,t,c or g
ggcacgaggacgatgacttgcaaaatgtcgcagctggaacgcaacatagagaccatcatcaacaccttccaccaatactctgtgaagctggggcacccagacaccctgaaccagggggaattcatagagctgatgcgaatagatctgcgagagtatgtcaagatagatactaggaatgagaaggacatacataagactgtggaagaaatgtacctggctgctcatcagaacccgaacgctaacctgaccacacttgctctcggagaagttcaagcctgtgatgagcgtaaactccaacgagcctggcttaggcgtcaacatgcacattccatataaatctcttgcaggcataccgcactgctatacagcgagaaacaataactggcgaaggtggctgn

SEQ ID NO: 62888 - DNA, 1106 bp, Homo sapiens
tgtattggattatagcatttattataccaaactattttttttttgaacagaaacatagcttgtaagcacttaaactattaatggtcagttcatcatacaccagtatgaaagttatttgagggcagggatggcctctttctgaaccttgtatcttcaggccaaaaaaatgtctgttgaatgaaaccaatgttgatgtacagcaatgtggctggaatttagaaagcttaataaaaattgggtgaggggggcatctaattcagaacatgtttttgggtgtaaggctagtatcatctacttttgaaaacataatttttatgattagcaggtaaaggtagcatgaaactgcaatacactggctccagacctttcctctctgccttgccacaggcatgcttgggtggtctgattacaaaagtacggatctcaacactatattttttattctaaaatctcaaccaaaatgatgggatcatgggtgcaaagtgggtttttcctttaaattgtgagaaaccatttccacatttcagatctaatggtgttctcatgacattgcaaagtagtattttatgccctcaaaactgaaccttaaggtagagacaattgctccccgggccaaacacagatccctccaacccctcactgtaccttaggaaagctgggataaactacagattcaacaaaatctcaataagaaaatcccaaaaaccttccccaatgccctgtggtttggcctgaacatagggaaaatggactgctgggtggctacagaacaggaatgaagagttaagaataataaatgcctaagttacagggacagaaccaatctttcattaatgacacaaagtagaatgcacaaagtagtatgcagtatggctgggggacagtcaaggaccatctagacttttaattgttagaagcaccacaggtccaaatgctccccagagtggaccaaaactggattttgtccatggcaacactgttctccactattctgtctataatgagaatatatcaatagcaggaaatctactttcacacatggcaaaccgcgaagaaaaacaaggataacctcaggccacttttacttgctgtaagtgggaaaaaaa

SEQ ID NO: 62889 - DNA, 334 bp, Homo sapiens
ggcacgagtgaaaatccatttaaagaggagctcactaattatcaatactgactgctgagcctggaatcattcatatatacctcagagttcattcattccagatgcaatactagataaggagactcctatgaaccaaatatctaactctgaatagatagtgactgtcataatcaaaccctgcggctgcctcctccttactggagggtgtagaggaaagcagtctccccgaaccctaccctctccctcaccccccgttcaccccctcccccacaaccgctcccccaaccccacccacccacgccctctcccccctcccctcccccctcctctcccg

SEQ ID NO: 62890 - DNA, 621 bp, Homo sapiens
ggcacgagcggcacgagggaacgtctgaggttatcaataagctcctagtccagacgccatgggtcatttcacagaggaggacaaggctactatcacaagcctgtggggcaaggtgaatgtggaagatgctggaggagaaaccctgggaaggctcctggttgtctacccatggacccagaggttctttgacagctttggcaacctgtcctctgcctctgccatcatgggcaaccccaaagtcaaggcacatggcaagaaggtgctgacttccttgggagatgccataaagcacctggatgatctcaagggcacctttgcccagctgagtgaactgcactgtgacaagctgcatgtggatcctgagaacttcaagctcctgggaaatgtgctggtgaccgttttggcaatccatttcggcaaagaattcacccctgagggtgcaggcttcctggccagaagattggtgactggaattggcagtgggccagtgcccttgttccttccagatacccactgaagcctcttggcccatgaattcagaagctttcaaaggataaggctttattcttgcaagcaatacaaataataaatccattctgctgagagatcacaaaaaaaaaa

SEQ ID NO: 62891 - DNA, 441 bp, Homo sapiens
ggcacgaggggaaagatggcggcgactctgggaccccttgggtcgtggcagcagtggcggcgatgtttgtcggctcgggatgggtccaggatgttactccttcttcttttgttggggtctgggcaggggccacagcaagtcggggcgggtcaaacgttcgagtacttgaaacgggagcactcgctgtcgaagccctaccagggtgtgggcacaggcagttcctcactgtggaatctgatgggcaatgccatggtgatgacccagtatatccgccttaccccagatatgcaaagtaaacagggtgccttgtggaaccgggtgccatgtttcctgagagactgggagttgcaggtgcacttcaaaatccatggacaaggaaagaagaatctgccatggggatggcttggcaatctggtacacaaaggatcggatgcagccagg

SEQ ID NO: 62892 - DNA, 334 bp, Homo sapiens
ggcacgagattaacgatctgtgcctatgttgtttcgggaccagttggggaccccgcagaatgaaccacatgagcaggaagcgcatccgcgaggccaagcggagtgcgcggccggagctcaaggactcgctggattggacccggcacaactactacgagagcttctcgctgagcctggcggccgtggcggataaccgtggaaagggcagatgctctacatgtgtctttggaaaaattcgggggatcggttttactgtccagacagaacatattgacagcgggaaacgctgatggcgggtctggtgggtacgacgacgtgccggagcaagggtaac

SEQ ID NO: 62893 - DNA, 2170 bp, Homo sapiens
ggcacgagggatggcggcgcgggacagtgacagcgaagaagatctggtcagctatgggaccgggctggagcctctggaagaaggtgaaagaccaaagaaaccaatccctcttcaggatcagactgtcagagatgaaaaaggaaggtataaacgattccacggggcctttagcggaggtttctctgctggatacttcaatactgttggctcaaaagaaggatggacaccctctacctttgtgtcttcacgacagaacagagcagacaaatctgttcttggtcctgaagattttatggatgaagaggatcttagtgaatttgggatagcacctaaagcgattgtcaccacagacgattttgcctccaaaaccaaagacagaatacgagaaaaggctaggcagttggccgctgctactgcccctattcctggagccaccctccttgatgacctcataacgccagcaaaattatctgttggtttcgaattgctaagaaaaatgggttggaaagaaggacaaggagttggtcctcgagtaaagagacggccacgccgacagaaacctgatcctggagtcaaaatctatggctgtgcattaccccctggaagctcggaaggatctgagggtgaagatgatgactacttgcctgataatgtgacctttgcacccaaagatgtcacacctgtggatttcacacctaaagataatgtgcatggtctagcttacaagggcctggatccccaccaggcactgtttggaacttcgggagaacattttaatcttttcagtggtggttctgagagagctggcgatcttggagaaattggactgaataaaggaagaaaattgggaatttcaggccaggcttttggtgtaggtgccctggaagaggaagatgatgatatctatgccacagaaactctatccaagtatgacactgttctgaaggacgaggagcctggagacggactctatggctggacagcacccaggcagtataaaaaccagaaagaatcagagaaagaccttcggtacgttggcaaaattttggatggattttccttggcttctaaacctttatcttctaagaaaatctatccacctccagagctgccaagagactatcgaccagtgcattatttcagacccatggtggccgccacctccgagaactcacacttactgcaggtattatcagagtcagctggaaaggcaacgcctgacccagggacacacagtaagcaccaactgaatgcctccaaacgggctgagttgcttggagagacgcctattcaaggttcagctacttcagtgttagaatttctgtcccaaaaagacaaagagagaatcaaagaaatgaagcaggcaactgacctgaaagcagctcagctcaaggccaggagtctggcccagaacgctcagagcagcagagcccagccctcccctgcagcggctgctgggcactgctcttggaacatggcattaggtggtgggacggccaccttaaaagccagcaacttcaagcctttcgccaaagatccggaaaagcaaaagcgatacgacgagttcttagtacacatgaaacagggtcagaaagatgctctggaacgctgtctggaccccagcatgacagagtgggagcgaggccgtgagcgggatgagtttgcccgggcggccctgctgtacgcatcttcccattcgaccttgtcctccaggttcactcatgccaaggaggaggatgactcagatcaggttgaagtccctcgagaccaagagaatgatgtcggggataagcagtcggctgtgaagatgaagatgtttgggaagctcacccgagacacgtttgagtggcaccctgacaagcttctatttcaactttagttggcttaccaagagtgaagcgtgacaagtactcagtcttcaactttctgacgctcccagagacagcttccttgcccaccactcaagcatcaagtgaaaaagtatcacagcaccgaggtcccgacaaatcaagaaaaccatccagatgggatacctctaaacacgaaaagaaagaagattccattagtgaatttttaaggttggctagatcaaaagccgagccacctaaacaacagtccagccccttagtaaacaaagaggaagagcatgcaccagaattatccgcaaatg

SEQ ID NO: 62894 - DNA, 377 bp, Homo sapiens
ggcacgagaacagggacccagacatggagctgcgggaagaagcctggtctccggggccgctggattctgaggaccagcagatggccagtcacgagaacccaggtgagcagccagaggccttcccagccgaccccgctgcctcccacctgaccctggcttcctttgcctctgggtgggaggaaaccccccttccctgttttcccctcttggggccctgggaccacccgaccctggcctcccctcccgccctgggccttgcactcctggctgtagagggagggctagtgttgtggctccaagtttcctttctgctggatgatcttggggacccctgggggccaccttctctgcctgacttcctctgtccttgcccctcc

SEQ ID NO: 62895 - DNA, 989 bp, Homo sapiens
gcggccgcctgtcggcttgctggagactcggttgaggtgaccacagaggccacactagtgggggtggagttggcctgagcggaggtggctgttgtccccttcagtgatgctggggtgggctgtgggatgttgacgagcaggctggtgttgggaacattggcgacgcggatgaggccctgctggatgatcctttgtccctgaatctgcacactgggcaccgacgcccggggggccaggaggaggggcggtggccctgtgctggaatgttgcctaatgctgtggatttgctgagccccccctgacgagtgggggcatgacgacctgtgagctcgcctgtggccccagctttgaggacgcctgctgcccacctcggaccaggggcgggggtatgacactgccgggcatccgagctgaagaggtctggagtgatggcttgccagcaggaatgttctgagtgccccgaacaagcgggggaggggtggtcacggtgctcccaacagaacctgtgggcttctgggcggtggcttccttttgtatttgactctgccgcaactttttcaacaacacgagttttgcttcttctaacctcaattcttccttcagctgcttgatcatcctttctcgttcttcaggactgcttttcatgagggcctcggtgctagtctccttcaaggccaccgtggtcagcccattcactctcgggctcgagggctgctcgttgtcggagagcacaatcacgtcaggtgaggggggtctcctctcggacttcatgtcatctatccgtgatcctcagagacatcttgcaaaaattatgtgatgcacaccttttttccagctggccccattttggcacagaacaaaacaaagccgtccacactcccacgttctggacaactgggtggctggatgtctgtgtgaggtgcgcatgtccacgggcccatcgcccaccagcccttcgcctctgcccatggccatggccgtggcctctg

SEQ ID NO: 62896 - DNA, 1401 bp, Homo sapiens
ccagagcaaaggcatacctccaccacattaagaatcctagacattattggccacaggtataaaatccgctggggctccaaacaaaggtatatagttaactatattgggggcattgctttaagatgagtgcctagcagcagtgacagtatctgggcctggaaaaaatgtaccacttacattgaatttgctcttcaacccacaggttctgactcctcaggagcaaaaaacataacctgaagagggaggaagtggatttggggttcaccatttcttggggcacacttgattgaaaactgagacttctgaagagaaggccagaagatacaaagacagaccatcccagttgaatgctgtcttccaagaacagaagaaaatgatccaggcccaggaatccataacactggaggatgtggctgtcgacttcacttgggaggagtggcaactcctgggcgctgctcagaaggacctgtaccgggatgtgatgttggagaactacagcaacctggtggcagtggggtatcaagccagcaaaccggatgcactcttcaagttggaacaaggagaacaactgtggacaattgaagatggaatccacagtggagcctgttcagacatatggaaagttgatcatgtgctggagcgcttgcagagtgaaagcctggtgaacagaaggaaaccatgtcatgaacatgatgcatttgaaaatattgttcattgcagcaaaagtcagtttctgttagggcaaaatcatgatatatttgacttacgtggaaaaagtttgaaatccaatttaactttagttaaccagagcaaaggctatgaaataaagaactctgttgagtttactggaaatggggactcctttcttcatgctaaccatgaacgacttcatactgcaattaaattccctgcaagtcaaaaactcatcagcactaagtcccaattcatcagtcccaagcatcagaaaacacgaaaattagagaagcatcatgtgtgcagtgaatgtgggaaagccttcatcaagaagtcttggctaactgatcaccaggtaatgcatacaggagagaaaccccacagatgtagtctatgtgagaaagccttctccagaaagttcatgcttactgaacatcagcgaactcatacaggagaaaaaccttatgaatgccctgaatgtggcaaagcctttctcaagaaatcacggctcaacatacatcagaaaacacataccggagagaaaccctatatatgcagtgaatgtggaaaaggcttcatccagaaaggaaatctcattgtacaccagcgaattcatacaggtgagaaaccttatatatgcaatgaatgtggaaaggcttcattcagaagacgtgtctcatagcacatcagagatttcacacggaaaga

SEQ ID NO: 62897 - DNA, 823 bp, Homo sapiens
cgcattgctcccgccgggctgtagctgagcgcggagcccgtgggggccggtgagaactagtaagactgctgcagagtccggaggaagaagtcacctagaaaagtctgggacagggcatttgagttcctgagatctagttggtgagagacatgatgttctaccggttgctgtcgattgttggaagacaaagagccagcccaggatggcagaactggtcctctgcaagaaacagcgcatcagctgccgaggcgcgttccatggccctgcccacccaggcacaggtggtcgtctgtggaggtggaatcacgggcacttctgtggcccatcaccaatccaaaatggggtggaaggatattgtccttttggagcagggcaggctggctgctggctctaccaggttctgtgctggcatcctgagcactgccaggcacttgaccattgagcagaagatggcagactactcaaacaaactctaccatcagttagagcaagaaacagggatccaaacaggttacacaaggacaggctcaatctttctggcccaaactcaggaccgactgatctccctgaagcgcatcaacgcagggctgaatgttataggtatcccttctgagatcatctcccccaagaaagtggccgagcttcaccatctcctcaacgtgcacgacctggtgggggccatgcatgttcccgaggatgcagtggtgtcttccgctgacgtggctcttgccctggcaagtgctgcctcccaaaatgtgggcatacgagctgggtctgtccaacgaggagccggttagtatcccgctacatgcctgcatgtatt

SEQ ID NO: 62898 - DNA, 587 bp, Homo sapiens
tgcaggatcccagcgactcgaattccgttgctgtcgaggggctcccagtcctttcttctgggaggccaaggcggcttcgcgttctgagaatagacagaacctctgttactctgtgaccggcaggcaccgggagatccgtagctcagacgccaggacatcccggaagctgggaaatggtgaatgtgccagggactgttgacattcagggatgtggccatagaattctctcggggggagtgggaacacctggactcagatcagaagcttttatatggggatgtgatgttagagaactacggaaacctggtctctctgggtctcgctgtctctaagcccggacctgatcacctttttggagcaaaggaaagagccctggaatgtgaagagtgcagagacagtagccatccagccagatatcttttctcatgatactcaaggcctcttaagaaagaagcttatagaagcatcattccaaaaagtgatattggatggatatgggagctgtggccctcagaatttaaacttaaggaaagagtgggaaagtgagggcaaaataatcctatggtgaaaaaaaaacaaaaataaaa

SEQ ID NO: 62899 - DNA, 321 bp, Homo sapiens; identical to SEQ ID NO: 44763

SEQ ID NO: 62900 - DNA, 1089 bp, Homo sapiens
ttttttttttttatttggaagcaaaatttttattttttaagaacagagctatttcataaagccagctacaacatctgtggtacaaactcatcccagctctctcgccatattccctctctgtagacccagagaccatatccataacccaaagggacacagggagggcagacagaccttctttaggagagaagtttagaaactgatccacttcatgaggctccagcttaattttaggaataatggtctggcacgaggaatcaaccccagtgttcatttccagaggaggttcctccttttccaacggggtggagatggctgtgatggtcagagtgacagacggaacgagtcctgggggtggttcgtctgtaactggctctgtcttgatggatgttgaagggaagtctgtagacaggtaccatttctcactttccacctcatcgtcattgaagctgtcactggtggtaatgtgggtgaagggcgactgggcccgaggctcctcgcacagggagtagctgtgctcagcctggatgagaggcgccggggacgtcggggaaggttccacctccattgacacactcttctctgagaggaaaggatcattcaggagctgacccaagacgttctgggaaaactcatccagaagttctgagaagtgcgtgtggtacatgagggcctcgccgtccccgggctctgacagctcgctcagcttgcggtcccactgcagcacgccctgctccccgctctccagcacctccatggcggtgcgggccgcgctgggccgaggatgctaagcgcaggaggggacgcgcagagctgcctcggaccggcaaggttcctctctctccgcgtgtgcttgcgtgtgtgcgcgcgcgtgtctgtagttttgcacttggaaagcaaacgtctgctcctctgccggagagaggatggccaagcgctcccgtccggtgtcctcggagatccgagaatccccagggacacgagccggaccaaaggctgccggggctaaagcgggatgtgcatccaaaatgaaggcagaagacccgctctcatcccaggaaaatcccttagccgcaagcccacttgccg

SEQ ID NO: 62901 - DNA, 600 bp, Homo sapiens
ggcacgaggcgacccaatgggagtccccgccaggagacacaaccggcggctctccggggatttataaggtcccgccagcaaccgcgcgttgggattcgtggtgttgctggagacccgtatggtgtctgcagtcagcgaccctccaacttcaactactggatcaaccatgtgtgagtgcatctccatccatgtgggccaggccggagtgcagatgggcaatgcctgctgggagctgtactgcctggagcacgacatccagcccagtggcaccatgcccagccacaaggccctggggagcagtgataactccttcaacaccttcttcagggagacccagcctggcaggcatgtgtcctgggctgtctgtggacctggagcctgctgtcatagcacaatgaagtcgctgtagagggaagggaccactgaaggtgccacctgctctccccgtctcaagcccaggcaggacctggccttagaagtgggtctctggttgggaggctgaggcaggagaatcgcttgaacccgggagacagaggctgtggtgagccaagatcgcgtgattgcactccagcctgggcaacaagagtgaaactccgtctc

SEQ ID NO: 62902 - DNA, 2526 bp, Homo sapiens
tttcgtgcttctaggaagtagaacgccggctcgcatgcctgcccgcccgccagcctgccgggtacggccttttccgccggggcttccaggtcaaagaattcgcctttgccgctaccgctttcttaccctccgcacccgttaagttctccggtcgggcggcagtctctgaacacttagccgcgccatccggggtcacaccgcctggaaggaggtgacgggggcggcgcggggcgcggacactccccgctgagagtccgcctgccatggactcggaatattacagcggcgaccagtcagatgatggtggtgctaccccagtacaggatgaacgggattcagggtcagacggtgaggatgatgtaaatgagcaacactccggatcagacactggaagtgtagaacgtcattcagagaatgaaactagtgatcgagaagatggcctccccaaagggacatcatgtgacagactctgagaacgatgagcccttaaatcttaatgctagtgactctgaaagtgaggagcttcacaggcaaaaggacagcgactctgaatctgaggaacgtgcagagcctcctgcaagcgattctgaaaatgaggatgtcaatcagcatgggagcgactctgagagtgaagagaccaggaaattacctggtagtgactctgaaaatgaggaacttcttaatgggcatgcaagtgactcagaaaacgaagatgttgggaagcatcccgccagtgattctgagattgaggagctccagaagagtcctgctagtgactctgaaacagaagatgctctaaaacctcaaatcagtgactctgagagtgaggaacccccaaggcaccaagccagtgactccgaaaatgaggagcctcccaaacctcgaatgagtgattctgaaagtgaggagcttcctaaacctcaggtcagtgattcagaaagtgaggaacccccaaggcaccaggccagtgactctgaaaatgaggagcttcccaaacctcgtatcagtgactcaaaaagtgaggaccctccgaggcaccaggccagtgactcagaaaatgaagagcttcccaaaccccgaatcagtgattcggaaagtgaggatcccccaaggaaccaggccagtgattcggaaaatgaggagctacccaaaccccgagtcagtgactctgagagtgaggggcctcagaaggggcctgccagtgactcagaaactgaggatgcgtccagacacaaacagaagccagagtcagatgatgacagcgacagggagaataagggagaggatacagaaatgcagaatgactccttccattcagacagccatatggacagaaaaaagtttcacagttctgatagtgaggaggaagaacacaaaaaaaaaaaaatggacagtgatgaagatgaaaaagagggtgaggaggagaaagtagcgaagagaaaagctgctgtgctttctgatagtgaagatgaagagaaagcatcagcaaagaagagtcgtgttgtctctgatgcagatgactctgacagtgatgctgtatcagacaagtcaggcaaaagagagaagaccatagcatctgacagtgaggaagaagctgggaaagaattgtctgataagaaaaatgaagagaaggatctgtttgggagtgacagtgagtcaggcaatgaagaagaaaatcttattgcagacatatttggagaatctggtgatgaagaggaagaagaatttacaggttttaaccaagaagatctggaagaagaaaaaggtgaaacacaggtaaaagaagcagaagattcagattctgatgataacataaagagaggaaaacatatggactttctgtcagattttgagatgatgttgcagcgaaaaaagagcatgagtggcaagcgcagacggaaccgcgatggtggcacctttattagtgatgcagacgacgtcgtgagtgccatgatcgtcaagatgaatgaagctgctgaggaagacagacagttgaacaatcaaaaaaagccagcactgaaaaaattaactttactgcctgctgtagttatgcaccttaagaagcaggaccttaaagaaacattcattgacagtggtgtgatgtctgccatcaaagaatggctctcacctctaccagataggagtttgcctgcactcaagatccgggaggagctgctgaagatcctgcaagagctgcctagtgtgagccaggagaccctgaagcatagtgggattggacgagcagtgatgtatctctataaacaccccaaggagtcaaggtctaacaaggacatggcagggaaattaatcaatgagtggtctaggcctatatttggtcttacctcaaactacaaaggaatgacaagagaagaaagggagcagagagatctagaacagatgcctcaacgacgaaaaatgaacagcactggtggtcagacacccagaagagacctggaaaaggtgctgacaggagaggagaaggctcttagacctggagatcctggattctgtgccccgtgcaagggg

SEQ ID NO: 62903 - DNA, 499 bp, Homo sapiens
acccacgcgtccgaaaagagcagagctaccatgtcctcttggagcagacagcgaccaaaaagcccagggggcattcaaccccatgtttctagaactctgttcctgctgctgctgttggcagcctcagcctggggggtcaccctgagccccaaagactgccaggtgttccgctcagaccatggcagctccatctcctgtcaaccacctgccgaaatccccggctacctgccagccgacaccgtgcacctggccgtggaattcttcaacctgacccacctgccagccaacctcctccagggcgcctctaagctccaagaattgcacctctccagcaatgggctggaaagcctctcgcccgaattcctgcggccagtgccgcagctgagggtgctggatctaacccgaaacgccctgaccgggctgcccccgggcctcttccaggcctcagccaccctggacaccctggtattgaaagaaaaccagctggaggtcctggagg

SEQ ID NO: 62904 - DNA, 589 bp, Homo sapiens
ttttttttttttcaagaataacttgttttattaccatgatttgtgaaaagcaacagggtagacagttcaaggaaggacacagacagtgccctgttttaggttccaaatttcttctttttaatgggtggtgggagctgagcaatgatgtcatccagaggccgttctactgccacgagtgttctttcatccaaaagatccatgaagagtagaggcttatatatcttagaaattttaaaagcatgagctgtgcgcctccggatgacatctgattcattcgtggggagggaaatgggattgtaggagtaaggtttttgtcatttgggaagggggcaatgacttgtcaaatgatgcagaacatgtaggcatccatggagaaggatgtgcatcggtctcttgggatgaaaactgatgttgtgttgataggggtatccccttggggcccaaggtggtgaaagccctgcttctggacagtccggctccaatctgtatactgtttgtctgggatgctgtactcaaatacctgctggtccgaatgagcgatgacaaggttgttggtattgggggcaatagccatagcagtcactgggaa

SEQ ID NO: 62905 - DNA, 402 bp, Homo sapiens
ggcacgaggagcaaattatttcttacgtgactttagagaaaacggctacctatctgaccccaaaacgacttgaggaaactgtttccacggtcctgctgcagaggggaagcacagtcgtcaagaagagagtggggtcaggatcaaaacacatttagtgtgacttagggaaagaaaacattttccctctttgaacctctctggatacagtcattttgcctctacttgaggatcaactgttcaacctcaatggcctttcaggacctcctgggtcacgctggtgacctgtggagattccagatccttcagactgtttttctctcaatctttgctgttgctacataccttcattttatgctggagaacttcactgcattcatacctgggccattcgctggctggggt

SEQ ID NO: 62906 - DNA, 1440 bp, Homo sapiens
cgtgagggtagccctggctgaggctcggaggtcctcccgggctgttcagagggccccaagcggtagccacgttctgatactggctagaagccaggggagggagcttggggtaaggggagggccctgagggaggggtcagacgctttaggaaagagttaatgcgaagagggggaggggataggacgaagaaaccgaagggaaagctcagggccgccaacttccagctgcagcggcgactttcagtttcatttccacggaccctcctgcctgggccgcagccgccgccgcgatgcccagtaagttcagctgccggcagctccgggaggcgggccagtgtttcgagagtttcctggtcgttcggggactggacatggagacagatcgcgagcggctgcggaccatttataaccgcgacttcaagatcagtctcctctgcttctggcagctttgggacccccgcccctggcttctcctccatgctgtatggaatgaagattgcaaatctggcctacgtcaccaagactcgggtcaggttcttcagactcgaccgctgggccgacgtgcgggtcccagaaaagaggagaatgaagctggggtcagatatcagcaaacaccacaagtcactgctagccaagatcttttatgacagggctgagtatcttcatgggaaacatggtgtggatgtggaagtccaggggccccatgaagcccgagatgggcagctccttatccgcctggatttgaaccgcaaagaggtgctgaccctgaggcttcggaatggcggaacccagtctgttaccctcactcacctcttcccactctgccggacaccccagtttgctttctacaatgaagaccaggagttgccctgtccactgggccccggtgaatgctatgaactccatgtccattgtaagaccagctttgtgggctacttcccagccacagtgctctgggagctgctgggacctggggagtcgggttcagaaggagccggcacattctacattgcccgcttcttggctgccgtcgcccacagccccctggctgcacagctgaagcccatgactcccttcaagcggacccggatcaccggaaaccctgtggtgaccaatcggatagaggaaggagagagacctgaccgcgctaagggctatgacctggagttaagtatggcgctggggacatactacccacctccccgcctcaggcagctgctccccatgcttcttcagggaacaagtatcttcactgcccctaaggagatcgcagagatcaaggcccagctggagacagccctgaagtggaggaactatgaggtgaagctgcggctgctgctgcacctggaggaactgcagatggagcatgatatccggcactatgacctggagtcggtgcccatgacctgggaccctgtggaccagaaccccaggctggtcc

SEQ ID NO: 62907 - DNA, 1007 bp, Homo sapiens
ggcacgagaggggagcgcgctgcgcgtcgcaggagtaacctacttggtctcctgctttcgcgacatggccttcaattttggggctccctcgggcacctccggtaccgctgcagccaccgcggcccccgcgggtgggtttggaggatttgggacaacatctacaactgcaggttctgcgttcagcttttctgccccaactaacacaggcactactggactctttggtggtactcagaacaaaggttttggatttggtactggttttggcacaacaacgggaactagtactggtttaggtactggtttgggaactggactgggatttggaggatttaatacacaacagcagcagcagcagcaaactacattaggtggtctcttcagtcagcctacacaagctcctacccagtccaaccagctgataaataccgcgagtgctctttctgctccaacgctgttgggagatgagagagatgctattttggcaaaatggaatcaactgcaggccttttggggaacaggaaaagggtatttcaacaataatattccgccagtggaattcacacaagaaaatcccttttgccgatttaaggcagtaggttatagttgcatgcccagtaataaagatgaagacgggctagtggttttagttttcaacaaaaaagaaacagagattcgaagccaacaacaacagttggtagaatcattgcataaagttttgggaggaaaccagacccttactgtaaatgtagagggcactaaaacattgccagatgatcagacagaagttgttatttatgttgttgagcgttcgccaaatggtacttcaagaagagttccagctacaacgctatatgcccattttgaacaagccaatataaaaacacaattgcagcaactttggtgttacccctttctatgactagaacagaactttctcctgcacagatcaaacagcttttacagaatcctcctgctggtatgtttctagaatcacagagttcaaa

SEQ ID NO: 62908 - DNA, 541 bp, Homo sapiens
ctctgttctgcattataagcaacatgaccagcagccacgtttgttgtaattttttaaatatgtggaaaaaaagcaagatatcaaccatgtattaccttaaccaagatgccaaattatctaacttgtttctccaggcaagcagcccaacaacagggacagctcccaggagccagtcaaggttgtctgtctgtccatccactcaggacatctgcagaatctgtcactgcgaaggggatgaagagagccccctcatcacaccctgtcgctgcactgggacactgcgctttgtccaccagtcctgcctccaccagtggataaagagctcagatacacgctgctgtgagctctgcaagtatgacttcataatggagaccaagctcaaacccctccggaagtgggagaaactacagatgaccacaagtgaaaggaggaaaatattctgctctgtcacattccacgtaatcgcgatcacctgtgtggtttggtctttgtatgtattgatagaccgaacaacggaggaaatcaagcaaggcaatgtatt

SEQ ID NO: 62909 - DNA, 487 bp, Homo sapiens
cgcagcgcggcctgggctcccgcgtgtttaaaagtgcgcttgtggctgctgctgtcttaactcctgtgcttggcggacagacaggcgagatggcggcggaggtgttgccgagtgcgaggtggcagtattgtggggcgcccgacgggagccagagagctgtactggtccagttctccaacgggaagctacagagtccaggcaacatgcgctttaccttgtatgagaacaaagattccaccaaccccaggaagaggaatcaacggatcctggcagctgaaacagataggctctcctatgtgggaaacaattttgggactggagccctcaaatgcaacactttgtgcaggcactttgtgggaattttgaacaagacctctggccaaatggaagtatatgatgctgaattgttcaacatgcagccactatttttcagatgtatcagttgagagtgaactggcgctagagagtcagaccaaaacttacagag

SEQ ID NO: 62910 - DNA, 1763 bp, Homo sapiens
gtttggaggaaccttctcaccttctcctaacacatggggaccattcccagtgagacctgtgaatcctggcaacacaaatagctctccaaagcataataacacaagccgtctacctaaccagaacgggactgttttaccctcagagtctgctggactagctactgccagttgtcctatcactgtctcttctgtagttgctgccagtcagcaactgtgtgtcactaatacccggactccttcatcagtcagaaagcagttgtttgcctgtgtgcctaagacaagtcctccagcaacagtgatttcttctgtgacaagcacttgtagttccctgccttctgtctcctctgcacctatcactagcgggcaagctcccaccacatttctacctgcaagtacttctcaagcacagctttcttcacaaaagatggagtctttctctgctgtgccacccaccaaagagaaagtgtccacacaggaccagcccatggcaaacctatgtaccccatcttcaactgcaaacagttgcagtagctctgccagcaacaccccgggagctccagaaactcacccatccagtagtcccactcctacttccagtaacacacaagaggaggcacagccatccagtgtgtctgatttaagtcctatgtcaatgccttttgcatctaactcagaacctgctccattgactttgacatcacccagaatggttgctgctgataatcaggacaccagtaatttacctcagttagctgtaccagcacctcgagtttctcatcgaatgcagcccagaggttctttttactccatggtaccaaatgcaactattcaccaggatccccagtctatttttgttacgaatccagttactttaacaccacctcaaggcccaccagctgcagtgcagctttcttcagctgtgaacattatgaatggttctcagatgcacataaacccagcaaataagtctttgccacctacatttggcccagccacacttttcaatcacttcagcagtctttttgatagtagtcaggtgccagctaaccagggctggggagatgtccactgtcctcacgagttgctacagatgcctctttcactgttcagtcagcgttcctgggtaactcagtgcttggacacttggaaaacatgcaccctgataactcaaaggcacctggcttcagaccaccttcccagcgagtttctactagtccagttgggttaccatccattgacccatcaggcagctccccatcttcctcttctgctcctctggcaagtttttccggcataccaggaacaagggttttcctgcaagggccagctcctgttgggactcctagtttcaacagacaacatttttctccccatccttggacaagcgcctcaaactcatgtaggaatcctggaggaactcttcccaaagagttttgaataagttattaaatcatttatttcagttacaacaccatgttgtaactttagtaaactaagtggtatacagatgcccaaggtttgttctgtggtcatgtgaaaaaattgtcagtcatttttagcatagaaaacttgagaattattctttcaagccaaaaatgttttacagtagaacttggatcaagaaaagaggtactaggctgggtgcagtggctgacacctgtaatcccagcactttgggaggcctaggcaagaggatcgcttgagcccagcagttggagaccagcctgggcaacagcaagaccctgtctctattaaaaaaaaaa

SEQ ID NO: 62911 - DNA, 1626 bp, Homo sapiens
ttgcgaccgctccaccgcgaacttctccgcgcactgcgcgcacagcgcctgggcctgggtgtccgcccgcgacgccagcgtccgcgcctgctgctcgggctccaggtacgacacgcagatgaagtcctgtacggaggagcgggaggcccgggccttagttgagagtacgccggcgctcacagcggtggatgggagtcctgcacctccacactcagctgccgggtcaccgtgatcttgtcgcagctcttgatgtgctccagggccccgtaggtggtgggtcagatagtaggaaccctcccccagctgcagggcgggggtccatgagctcattcatgtactccacattgagaagcatctcccgtgagggttgctgcgggccagcacatacatgagcacaggccaggaagtcatccgccccatagggcttcccctgggttgccgagggccatggagtcgtagatgagtttgcaggtcttgagcaggatggagatcttcttctcaggtgagtaggccttgtgcatgctggtgaacttctgcaggatcttctccatcatgggcacctccggcacggctggtggtcacacctaggtcagtggtggtggtggccaggatcactaactggttctccttgagctgctgcagcgaaccatccttgctgtggatctgatgcaggcatgagttgatggcttccttcaggggcttcaggacacatttgtacaaggcagactctacaattgcttcgagctcctcctcggagtgcagggcggggtccaccagggccttgagctcggtgctctgcagcaggtagctcttgagctgggtcatcatggtgcgaatctcctgcagcatctccgtgctggaggtctggcgcgccatcatctccaggctgtacaccttgtagtcctgcaccaggctgccaaagtacgagcccttgtcctgcgccagctccaccaccttcttgtacagcttgcggttgttggagaggaaagcgtggaacatgctgctgaaactggcaaagctcagccggtgccgagccttgcccaggatcatggagggcttcttcttcacgctggggctgctgaactgctccagctcctcctccgtgctgctggtggagtaggagtcctggtcggtggccatgacagacacccccaagctgtctgagagggaggccagggagcccttgaactctggagagctctgggaatgggcagtggcctgggcaggagggtgctgagtcccagcctgagaagcagggctttggccctctctgggtggacccggcgtgggtgtctccaaggccatcgcctgtgtgcagagctcagcgttctctaagggagctgggagggtcgaggccagttgtcgagagatccgttttttcctggggggcgggactgggggttgtttggctgtcctgggcagctctggcatgctgtgaggatcgctggctttcacctctgtgtcctggccttgctccgtgctctcccggggcatgtcctcagggccgtctgaggtcccttggggaggcaggctgagctggtccccctctgccgccatccccggactttggtcttctaaggacaccctctcggaaacgcggcgtctgggaggggcagtgggaaggtt

SEQ ID NO: 62912 - DNA, 2377 bp, Homo sapiens
ggcacgaggaaacctctaggtccaccacctccatcttacacgtgtttccgttgtggtaaacctggacattatattaagaattgcccaacaaatggggataaaaactttgaatctggtcctagggattaaaaagggccactggaattcccagaagtttcatggatggaagtgaaagatcctaatatgaaaggtgcaatgcttaccaacactggaaaatatgcaataccaactatagatgcaagaagcatatgcaattgggaagaaagagaaacctcccttcttaccagaggagccatcttcttcctcagaagaagatgatcctatcccagatgaattgttgtgtctcatctgcaaggatattatgactgatgctgttgtgattccctgctgtggaaacagttactgtgatgaatgtataagaacagcactcctggaatcagatgagcacacatgtccgacgtgtcatcaaaatgatgtttctcctgatgctttaattgccaataaatttttacgacaggctgtaaataacttcaaaaatgaaactggctatacaaaaagactacgaaaacagttaccttctccaccacccccaataccacctccgagaccactgattcagaggaacctacaacctctgatgagatctccgatatcaagacaacaagatcctcttatgattccagtgacatcttcatcaactcacccagctccgtctatatcttcattaacttctaatcagtcttccttggcccctcctgtgtctggaaatccgtcttctgctccagctcctgtacctgatataactgcaacagtatccatatcagttcattcagaaaaatcagatggaccttttcgggattctgataataaaatattgccagctgcagctcttgcatcagagcactcaaagggaacctcctcaattgcaattaccgctcttatggaagagaagggttaccaggtgcctgttcttggaaccccatctttgcttggacagtcattattgcatggacagttgatccccacaactggtccagtaagaataaatactgctcgtccaggtggtggtcgaccaggctgggaacattccaacaaacttggctatctggtttctccaccacaacaaattagaagaggggagaggagctgctacagaagtataaaccgtgggcgacaccacagcgaaagatcacagaggactcaaggcccgtcactaccagcaactccagtctttgtacctgttccaccacctcctttgtatccgcctcctccccatacacttcctctccctccgggtgttcctcctccacagttttctcctcagtttcctcctggccagccagccacccgctgggtatagtgtccctcctccagggtttcctccagctcctgccaatttatcaacaccttgggtatcatcaggagtgcagacagctcattcaaataccatcccaacaacacaagcaccacctttgtccagggaagaattctatagagagcagcgacgactaaaagaagaggaaaagaaaaagtccaagctagatgagtttacaaatgattttgctaaggaattgatggaatacaaaaagattcaaaaggagcgtaggcgctcattttccaggtctaaatctccctatagtggttcttcgtattcaagaagttcatatacttattctaaatcaagatctggttcaacacgttcacgctcttattctcgatcattcagccgctcacattctcgttcctattcacggtcacctccataccccagaagaggcagaggcaagagccgcaattaccgttcacggtctagatctcatggatatcatcgatctaggtcaaggtcacccccttacagacgctatcattcacgatcaagatctcctcaagcgtttaggggacagtctcctaataaacgtaatgtacctcaaggggaaacagaacgtgaatattttaatagatacagagaagttccaccaccatatgacatgaaagcatattatgggagaagtgttgactttagagacccatttgaaaaagaacgctaccgagaatgggagagaaaatatagagagtggtatgaaaaatattataaaggttatgctgctggagcacagcctagaccctcagcaaatagagagaacttttctccagagagatttttgccacttaacatcaggaattctcccttcacaagaggccgcagagaagactatgttggtgggcaaagtcatagaagtcgaaacataggtagcaactatccagaaaagctttcagcaagagatggtcacaatcagaaggataatacaaagtcaaaagagaaggagagtgaaaacgctccaggagatggtaaaggaaataagcataagaaacacag

SEQ ID NO: 62913 - DNA, 1163 bp, Homo sapiens
ttttttttttttcccagagtaaatcaactttattaagcaatagaaccgatgtcttagcatgttctaaactaagatttcgttgcatttcataacttacaaattggcttttgccatctatatttgtcatttctaatatttttgaagtcttgattccatcacgcaaaagaacccagaaatttgtgtccattggtaaaacaatgtgcagttttgttgtgtttaagatgggcaggctaccttcttcataatgaggaagagttctgaatcctaagaagacagtatttagatgcagatgagcaattttctggaaatctgagttttgtatttttgccccactcaaacctaggatttccacgtgtgacatgttgccagcttcctcacagataggcatggtgtcaaagtcatttaaagaaagatctaaatacctgagaccctgccagtaaataccaagttacactcttcagtctgttattagacaaatctaaatatcttaactccttgttgaattcaaaggttttgagatccagctgttgaattctgttatggcatagaatcaaaactctcagtttggagacagaatgaaaatctgaactctggagttgaaaaaggaggttataggataaatccagtgtcgttgtggctggggtcaagtctgcgggaacctttcttagagacatgttggagcagttggtcatcagttccctttcttctggcagctctggagcatcaccctctgctgtcataactatactacaaaatatgtaaatgtttctgatgagtctcattgtatttccaaggattttaccactgatttcctcatatgaatgatgaagatgagctcaaaaccctgtatattgggtcttcgacttgatctcagagcattggctgagaagtctccaagctggctactgtgccatgtctccgttgttgaggtaagtcaggattctcagagaggagaagcataatggacctttggtttaagaactgcattgtcaggccagactcaataccctctctcacatctccttttgatagccttacagatggaagtttcaaaacaggaaacaaatagaattattcctgtccttctgcctctatatgtcttcaggttggtggcaaaagcaatatgaactgctgcaaaataatagtattaatgttgaaacaca

SEQ ID NO: 62914 - DNA, 1970 bp, Homo sapiens
cccacgcgtccggcggggcagaggagggaggcagcgggtgagagttcagagttcagcagcagcagcccgagcccatgattcccatatgccctgtagtttctttcacctatgtgcccagccggctgggggaagatgccaaaatggcgaccggcaactactttggattcacccacagcggggcggcggcggcggcggctgcggcccaatatagccagcagccagcttcgggtgtagcctattctcatccaactacagttgctagctacactgtccatcaggctccagtagctgctcacacagttactgctgcctatgcaccagcagccgccacagttgcagttgccaggcctgctccagtagctgttgcagctgctgcaacagctgctgcttatggaggctaccccactgcacacacagcaactgactatggttatactcagaggcaacaagaagcaccaccaccaccacccccagctactacacaaaactaccaggatttcatactcatatgtaaggtccacagctcctgctgtagcttatgatagtaagcaatactaccaacaaccaacacagcaactgctgctgctgtagctgccgctgcccaacctcagccttctgttgctgaaacttactatcagacagcccccaaagcaaggttacagccaaggtgcaactcagtatactcaagcccagcaactcgacaagtgacagccataaaaccagccacaccaagtccagctaccactactttctccatctatcctgtatcctccaccgtacagccagtagcagctgcggctactgtggtgccatcctatactcagagtgctacttacagtaccacagcagttacatattctggtacgtcttattcaggttatgaagcagcagtgtattcagctgcatcttcctactatcaacagcagcagcagcaacagaagcaggcagcagcagcagctgctgctgctgctgcaacagctgcctggacagggaccacctttactaaaaaagcaccattccaaaataaacaactgaaaccaaaacagcctcccaaaccaccacagattcactattgtgatgtttgtaagatcagctgtgctggaccacagacttataaagaacatttagaaggacagaaaaaaaaaaaaaagaagctgcattgaaagcctcacaaaataccagcagcagcaacagttctactcgtgggactcaaaatcagctacgttgtgagctctgcgatgtgtcttgtacaggagcagatgcgtatgctgcccacattcgtggtgctaagcatcagaaagtggttaagttacacacaaaacttggtaaacccattccatcaacagaaccaaatgttgttagccaagctacttcttcaacagctgtatctgcttcaaagccgactgcctctccttcaagcattgcagcaaacaattgtactgtgaatacgtcatcaattgcaacgtcttcaatgaagggtcttacgactacaggaaactcgtctcttaatagcacatctaacactaaagtatcagcagtgcctacaaatatggctgccaagaaaacatctacccccaaaataaattttgttggtggtaataagctgcagtcaacaggaaataaagcagaagacataaaaggaaccgaatgtgttaaaagtactcctgtcacttctgctgtgcagattcctgaagtaaagcaagacacagtgtcagaaccagtcacacctgcatctcttgctgctttacagagtgatgtgcagccagtgggccatgattatgtggaagaggtacgaaatgatgaaggaaaagtaattcggttccattgtaaattatgcgagtgcagctttaatgatcccaatgctaaggagatgcacttaaaagggcgaagacacagacttcaatataaaaaaaaagtaaatccagatttgcaagtagaagtaaagcctagtattcgagcaagaaagattc

SEQ ID NO: 62915 - DNA, 868 bp, Homo sapiens
gcggccgccgggcattcgggcgccgcggcagctgcatccggctgccggccggcggcccgacgcgtcagcccgcccccgcttccgcccgactgtcctgctgcacgaccccttccaactctcctttcctcccccacccttgagttacccctctgtctttcctgctgttgcgcgggtgctcccacagcggagcggagattacagagccgccgggatgccccaactctccggaggaggtggcggcggcgggggggacccggaactctgcgccacggacgagatgatccccttcaaggacgagggcgatcctcaggagggaaaagatcttcgccgagatcgtcaatcccgaagaggaaggcgatttagctgacatcaagtcttccttggtgaacgagtctgaaatcatcccggccagcaacggacacgaggtggccagacaagcacaaacctctcaggagccctaccacgacaaggccagagaacaccccgatgacggaaagcatccagatggaggcctctacaacaagggaccctcctactcgagttattccgggtacataatgatgccaaatatgaataacgacccatacatgtcaaatggatctctttctccacccatcccgagaacatcaaataaagtgcccgtggtgcagccatcccatgcggtccatcctctcacccccctcatcacttacagtgacgagcacttttctccaggatcacacccgtcacacatcccatcagatgtcaactccaaacaaggcatgtccagacatcctccagctcctgatatccctactttttatcccttgtctccgggtgggggtggacagatcaccccacctcttggctggcaaggtcagccctgata

SEQ ID NO: 62916 - DNA, 2189 bp, Homo sapiens
tgaaggcccgtatgcgtattcgacatttacgactattgatagaaaaaccatatcagagatttatggtaagctataaagggtggtagagataagcctacttactgatgtatattaagaggaagtcattttgtgtacactaaattggaaacttttttctttatagacacaaggtgtgaacatagaacagttcacaggtaagagttacttgtatttgtaattttttcagggctttggagtaaataatagagtggaagtatgggtaacatttataaaataaaatgatgacagaggctgtattcctttgggtacagaattgaagaacacagtatcatacagtgggaaaaggaaagggcccgattcgttgtctgatggacctgcttgcaaaaggccagctctgttgcattcccaatttttgacaccacctcaaacaccaacgcccggggagagcatgggaagatgttcatctcaatgaacccaaacagggagagcagtgctgatctgcttcagaacattatcaacattaagaatgaatgcagccccgtttccctgaacacagttcaagttagctggctgaaccccgtggtggtccctcagagctcccccgcagagcagtgtcaggacttccatggagggcaggtcttttctccacctcagaaatgccaaccattccaagtcaggggctcccaacaaatgatagaccaggcttccctgtaccagtattctccacagaaccagcatgtagagcagcagccacactacacccacaaaccaactctggaatacagtccttttcccatacctccccagtcccccgcttatgaaccaaacctctttgatggtccagaatcacagttttgcccaaaccaaagcttagtttcccttcttggtgatcaaagggaatctgagaatattgctaatcccatgcagacttcctccagtgttcagcagcaaaatgatgctcacttgcacagcttcagcatgatgcccagcagcgcctgtgaggccatggtggggcacgagatggcctctgactcttcaaacacttcactgccattctcaaacatgggaaatccaatgaacaccacacagttagggaaatcactttttcagtggcaggtggagcaggaagaaagcaaattggcaaatatttcccaagaccagtttctttcaaaggatgcagatggtgacacgttccttcatattgctgttgcccaagggagaagggcactttcctatgttcttgcaagaaagatgaatgcacttcacatgctggatattaaagagcacaatggacagagtgcctttcaggtggcagtggctgccaatcagcatctcattgtgcaggatctggtgaacatcggggcacaggtgaacaccacagactgctggggaagaacacctctgcatgtgtgtgctgagaagggccactcccaggtgcttcaggcgattcagaagggagcagtgggaagtaatcagtttgtggatcttgaggcaactaactatgatggcctgactccccttcactgtgcagtcatagcccacaatgctgtggtccatgaactccagagaaatcaacagcctcattcacctgaagttcaggagcttttactgaagaataagagtctggttgataccattaagtgcctaattcaaatgggagcagcggtggaagcgaaggatcgcaaaagtggccgcacagccctgcatttggcagctgaagaagcaaatctggaactcattcgcctctttttggagctgcccagttgcctgtcttttgtgaatgcaaaggcttacaatggcaacactgccctccatgttgctgccagcttgcagtatcggttgacacaattagatgctgtccgccctgttgatgaggaagggagcagacccaagtactcggaacttggagaacgaacagccagtgcatttggttcccgatggccctgtgggagaacagatcccgacgtatcctgaagggaaagtccattcagcagagagctccaccgtatttagctcccattaagcttggagcctggctagcaacactcactgtcagttaggcagtcctgatgtatctgtacatagaccatttgccttatattggcaaatgtaagttgtttctatgaaacaaacatatttaagttcactattatatagtgggttatattaaaagaaaaggaggaaaaata

SEQ ID NO: 62917 - DNA, 566 bp, Homo sapiens
ccacccacgcgtccgcgctttccggccaacacagaggtgcctgaaggctggttggggtggtgaggcccgaggcagctcttgttcagcttctggaatttctgagcagccctcgtcagtacaagatggaccccgtagtcttgagttacatggacagtctactgcggcaatcagatgtctcactattggatccgccaagctggctcaatgaccatattattgggtttgcgtttgagtactttgccaacagtcagtttcatgactgctctgatcacgtcagtttcatcagccctgaagtcacccagttcatcaagtgcactagcaacccagcagagattgccatgttccttgaaccactggacctccccaacaagagagttgtatttttagccatcaatgataactccaaccaggcagctggaggaacccactggagtttattggtctacctccaagataaaaatagcttttttcattatgattcccatagcaggagcaactcagttcacgcaaagcaggtagcagagaaactggaggctttcttaggcagaaaaggagacaaactggcc

SEQ ID NO: 62918 - DNA, 1296 bp, Homo sapiens
gcagccacttgagatcaccaggcctcctgtagaccggcgggtgcagggcccggtcccagagttaagggtgaaagtcgtttggaaaccccaggccaacaggaccctttggcagctgaggctggaaacagcggaaccaaaggcagacggtcctcagttgcttgggcggacgtggacccaatctgtccgtccttacaagtttcccccaggggcaggacctagacgcgcggcgcattcaggttctcctggaccgtagtggtagtcgctggcccgagttagaggccagctgagaagtcttcgtgcttcagatttgtttacctacaaaatgcttcggtatccatatttttgtagaatgtataaagaatgcctttcatgttggttggaatctggcatacctaatttaggtgtctggccaaaaagaatacatactacagcagaaaaatatagagaatatgaagcccgggagcaaacagatcaaactcaagcccaggagttacacagatctcaagatagagattttgaaactatggctaaattacatattccagtaatggtggatgaagttgttcattgtttgtcaccacaaaaaggacagatttttctagatatgacatttggttcgggagggcacacaaaagccattctgcagaaggagtcagatattgttctctatgccttggacagagacccaacagcttatgcattagctgaacatctttcagagttgtatcctaaacaaatccgagctatgctgggccagttcagccaggcagaagccttattaatgaaagctggagtgcagccaggaacttttgatggagttcttatggatcttgggtgttcctccatgcaacttgatactcctgaaagaggtttttcccttcggaaagatggccctttggacatgagaatggatggtggcagatcaacaggcacttgcatctatcctaagaacatacggggaggagaagcatgccaagaaaatcgcttcagcaattgttcaggcacgcagcatctaccccatcaccagaacccagcagcttgccagcatcgttgcaggtagcctcattaattctcaacagtgtctaagagaaaaaattatatttacatgtgtgcatgtgtttgtgtgcatgcacgcatgcacatgtgtgtgtgcattaatcccccagactccctgagggattcatttgtacttgaaatccaggatagaatcttgcctatccttctctaatgtcagctttcttttgcttttgcatgcttctcccccaaaaaacctctcccccaaatacaatttttaag

SEQ ID NO: 62919 - DNA, 1170 bp, Homo sapiens
ggagtcttcggcgagacctaccgggccctgtctgtgccggccgtgagctgcggcaggacggctggagattacttctctaacaggatcaccagtttgctccacaaagcacaatgtctcgatcacgacaacccccccttgtgaccggcatctctccaaatgaagggataccatggacgaaggtcacaatcaggggagaaaatctggggactggccccaccgacctcataggcttgaccatttgtggacataattgcctcctgacggcagaatggatgtctgcaagtaaaatagtatgtcgagtgggacaagccaaaaatgacaaaggagacattattgtcaccactaagtcaggtggcagaggaacctcaacagtctctttcaagctactcaaacctgagaaaataggcattttggatcagtctgctgtgtggggttgatgaaatgaattattatgatatgcgcactgacaggaacaaaggaattccgcccttgtccttacgtcctgctaacccgcttggcattgagattgaaaaaagtaaattttcgcagaaggacttagaaatgctattccatggaatgagtgctgattttacaagtgagaatttctcagcagcctggtatcttatagagaatcactcaaacaccagttttgagcagctcaaaatggcagtcaccaacctaaagagacaggctaacaagaagagtgagggcagcctggcctatgtgaaaggcggtctcagtacattcttcgaagcacaggatgccctctcagccatccatcaaaaactagaagcagatggaacggaaaaagtagaaggatccatgacgcagaaactggagaatgttctgaacagagcaagtaatactgcagacacattgtttcaagaagtattaggtcggaaagacaaggcagattccactagaaatgcactcaatgtgcttcagcgatttaagtttcttttcaaccttcctctaaatattgaaaggaatattcaaaagggtgattatgatgtggttattaatgattatgaaaaggccaagtcactttttgggaaaacggaggtgcaagttttccaagaaatattatgctgaagtaggaaccaagggttgaagctttaagagaattacttctgggataaattgcttgagacaccatcaactttacatgac

SEQ ID NO: 62920 - DNA, 1918 bp, Homo sapiens
ttttttttttttgaggaccgatcacagaataattttatttataatgaatgttattctctccagacttcaactcatcagtttactcttataacagagaatcaatttaaataacaccatcaatatggaatgaaatataaaacaatctgctattacgtatccgatttctttgataggatataattatagccaattagtcttgcaacacatggtccatttccagtgaaattctcaataaactgctaggaattacagtccttcatattgacattttattgtaaagtctgctagacgtggctctcttgattgctttggaagtcagtcaaacaaatgctctgaagaaaaggctgacaccgcaaaacaacttcatatgaaatctgtccacaaatgggatagcaatgcctccagatcctttggtttttatcagtccctttggaaagttaattaattgatgattgttcccttaaaattctattttaaataggacaatcactgtctatacagtctgtgccagcgtccttgactttcttgcttccactgatttgtttatcaaatcatacagtgatggtagtcttattttatccatatttttgctgtaaacattaagaaatataccaaggacaactaacaaaccagaccatacatactgaaacgtgaatggtttagcaaagaatataaacgaaagtacaatggtcattgcttttcttcctgttgtcactgttacagcaataagtgcaccaaaaattttaatcaaagccagaacaaaggagattccaaaatatccagtgagggaaaaaaggaacgcataaccataggtccgaactggattctttgcacaaaatgttactgcagggcctaatccactagtgcatgtcaatcccagtaaaatgtatacaaaaccaattgaatacgaatacaataccatttcagaattagaagcattatgaagtttcatagctttctcttgaacatttccaatgacggcatctgcacatagtgccagggaaataagcaccacacccgtcaggttgaaatttggtgcagttgtgctgtcagcgagggtaaaccatatcaggccaaggctcatacatatggcagcagacacatctgcaacattataacgctttccttgaataaaaactcctcctagcataacaggaatcaatttgcagcacttgaagatgacttgggtagggtaattcaggtagcccaaggaagtgtttgataaccccatagtacccacagttagaaaagctattatcatgtaggtttttcctggtattctcctccttttgtcctgaataagctgaagttctattaggccaaatatggagtaaaaggcaaactgcactaaggtaaggtaccagccacaggacttaaaaccctccactgaaaatattaattcctgtaaatacccataaattaggtaaaatacaaaaactccagcaacacatatgaaaaactgagtaagtttgttaaacttgctgagattcatgccaagtaccacaacgtcgtcaactgacttgatgtgtggtgacattgtttgggttttggatggcacagtgatagaaatatatttcctggaattgttgaacttgagatccattgttattttgctgcattcaatgctttcagagttatttttgttggtttcctggactgttatgttctgtatgtcttttgcttgctgtgtcaagtccatgccattatgccttgattaactgcgctccggaatcaatcatggccccaaggccggtatgtcacccggaagggtgacggcagcctgcgtggcgtctgagctagacggagcatctccccctcccctggtccgtcgccatcacctcctcttcctcctcctcctcgcccactcctgcactttccaccgcggcggtcgcctccccggaaagcactctcaacgaaa

SEQ ID NO: 62921 - DNA, 979 bp, Homo sapiens
tactcggggcgggtgctgcttgctgcaggctctggggagtcgccatgcctacaacacagcagtcccctcaggatgagcaggaaaagctcttggatgaagccatacaggctgtgaaggtccagtcattccaaatgaagagatgcctggacaaaaacaagcttatggatgctctaaaacatgcttctaatatgcttggtgaactccggacttctatgttatcaccaaagagttactatgaactttatatggccatttctgatgaactgcactacttggaggtctacctgacagatgagtttgctaaaggaaggaaagtggcagatctctacgaacttgtacagtatgctggaaacattatcccaaggctttaccttttgatcacagttggagttgtatatgtcaagtcatttcctcagtccaggaaggatattttgaaagatttggtagaaatgtgccgtggtgtgcaacatcccttgaggggtctgtttcttcgaaattaccttcttcagtgtaccagaaatatcttacctgatgaaggagagccaacagatgaagaaacaactggtgacatcagtgattccatggattttgtactgctcaactttgcagaaatgaacaagctctgggtgcgaatgcagcatcagggacatagccgagatagagaaaaaagagaacgagaaagacaagaactgagaattttagtgggaacaaatttggtgcgcctcagtcaggtggaaggtgtaaatgtggaacgttgctgacagattgatgtgactgacactaagcatcctgtagctggacgaccgggtagaagggggcacgaagcgacgagcagtacatgcagctcctggagtcaaccctgaaggaaatgtgctgcgagcaccctaccattgcctagccacgggagaacttagtaaactggtcataggacgactgtaaaagctgctgtaatacccgggtgagacgaggaagagagcac

SEQ ID NO: 62922 - DNA, 944 bp, Homo sapiens
ctctgggattcaagatggaggcgctgagtcgagctgggcaggagatgagcctagcggccctgaagcaacacgacccctatatcaccagcatcgcagacctcacgggccaggtcgctctgtacaccttctgccccaaggccaaccagtgggagaagactgatatagaagggaccttattcgtatatcgaaggtcagcttccccttaccatggttttaccattgtgaatcgactaaatatgcacaatctagttgaaccagtgaataaagatttggaatttcagctccatgaaccatttcttctgtatagaaatgcaagcttgtcgatatatagtatctggttttatgacaagaatgactgtcaccgcatagcaaaactcatggctgatgtggtagaagaggagacacggcgatcccagcaagctgctcgggacaaacagagtcccagccaggccaatggctgcagcgaccacaggcccatcgacatcctggagatgctgagcagagccaaggatgagtatgagaggaatcagatgggtgactcaaatatctccagccctgggttacagccaagcactcagctctccaatctgggaagcaccgagactctagaagaaatgccctccgggtcacaggataagtctgctccatctggacacaagcatctgacggtagaagagttatttggaacctctttgccaaaggaacaaccagcagttgtgggtctggattcagaagaaatggagaggttgccaggagatgcctcccagaaagagcccaattcattcctaccatttccctttgagcagttaggaggagcccctcaatcagaaaccctgggtgtcccttctgctgcccaccattcagtccagcctgaaattaccaccccggtgctaatcactccagcctccatcaccagcagatccttgttttgaccaaaaaaaaaa

SEQ ID NO: 62923 - DNA, 1011 bp, Homo sapiens
gcggccgcggctgtggtggttcccgcagagtggataaagaactgggagaaatcagggagaggcgaatttttgcatttatgtcggatcctcagtgaaaataaaagccatgatagttcaacatacagagatttccagcaagctctctatgagttgtcatatcatgtaattaaaggaaatctaaagcatgaacaggcatctaatgttcttagtgacattagtgaatttcgtgaggatatgccctccattcttgctgatgtattctgcatattagacattgagacaaattgtttagaagaaaaaagcaagagagactattttacacagttggtattagcatgtttgtatttagtttcagacacagttctaaaggaacgcctggatccagaaacactggaatcattagggcttatcaaacaatcacagcaattcaatcaaaagtcagttaaaatcaagacaaaactcttttataaagcagcaaaaattcaattttggttaaagaagagaatgaaggttatgccaagctgattgctgaattggggcaagatttatctggaagtattactagtgatttaatcttagaaaatatcaaatctttaataggatgctttaatctggatcccaatagagttttggatgtcattttagaagtgtttgaatgcaggccagaacacgatgacttctttatatctttgttagaatcttacatgagtatgtgtgaaccgcaaacactgtgtcatattcttgggttcaaattcaagttttaccaggaaccaaatggcgagacaccatcatctttatacagagttgcagcagtacttctacaatttaatcttattgatttagatgatctttatgtacatcttcttccggctgataattgcattatggatgaacacaaacgagaaattgcggaagctaagcaaattgttagaaagcttacgatggttgtgttgtcttctgaaaaaatggatgagcgagagaaagaaaaggaaaaagaagaggagaacagag

SEQ ID NO: 62924 - DNA, 447 bp, Homo sapiens
ccaagccgcggtcccgggccggcacccaggatgggcgaggtggaggccccgggccgcttgtggctcgagagcccccctgggggagcgccccccatcttcctgccctcggacgggcaagccctggtcctgggcaggggacccctgacccaggttacggaccggaagtgctccagaactcaagtggagctggtcgcagatcctgagacccggacagtggcagtgaaacagctcccggtgggggcggagccagtcccagctcctccctctctttctgcagctgggagttaacccctcaactaccgggacccaggagttgaagccggggttggagggctctctgggggtgggggacacactgtatttggtcaatggcctccacccactgaccctgcgctgggaagagacccgcacaccagaatcccagccagatactccgcctggcacccc

SEQ ID NO: 62925 - DNA, 611 bp, Homo sapiens
ggggctctacatgaaccaaggatcctagctggttattttgattaaaagatgactcaaatgatgttaacactgatcagactttagcacgagagctgcagagaaggaagacactatgatgagaatatatttggggttttgagctgggaaaagacttcttaaatatgatccagaaagtactggccataaggaaaaaatgttaacagatttgtctgcaccaaaatctaccaagagagtcctttcaactagaactgccgtcaccacaatgatgaacatggggaaagaggagaggtacctgctgtatattctcaggccttttagaacacatggagttgttcctctggccacatccacacgaacctacaagaaaggagatgttatagacgtcaagagatgccccacggatgttaccaaggcaaaaggaatgccccacagatgttaccaaggcaaaagaggaagagactacatgtatctagtatgctgttggcatggttggaaacaaacaacagcatgattcttgccaagagaattcatgtgtgtgtatggagcataccaagcactccaagagctgggaaggccttcagaaacacgtgagggaaaatgatcaaaagaga

SEQ ID NO: 62926 - DNA, 1462 bp, Homo sapiens
cggacgcgtccgcccacgcgtccggggagcagctgcgggagaagcaaagggacgactgagggaataatcaggagaccactgaggcgtgaagtactaggcgtgcgataactgaaggaattacctggctggtgtttgcttgttctggagtgatcttctgactggaaaagaactatgtcatggatcaaggaaggagagctgtcactttgggagcggttctgtgccaacatcataaaggcaggcccaatgccgaaacacattgcattcataatggacgggaaccgtcgctatgccaagaagtgccaggtggagcggcaggaaggccactcacagggcttcaacaagctagctgagactctgcggtggtgtttgaacctgggcatcctagaggtgacagtctacgcattcagcattgagaacttcaaacgctccaagagtgaggtagacgggcttatggatctggcccggcagaagttcagccgcttgatggaagaaaaggagaaactgcagaagcatggggtgtgtatccgggtcctgggcgatctgcacttgttgcccttggatctccaggagctgattgcacaagctgtacaggccacgaagaactacaacaagtgtttcctgaatgtctgttttgcatacacatcccgtcatgagatcagcaatgctgtgagagagatggcctggggggtggagcaaggcctgttggatcccagtgatatctctgagtctctgcttgataagtgcctctataccaaccgctctcctcatcctgacatcttgatacggacttctggagaagtgcggctgagtgacttcttgctatggcagacctctcactcctgcctggtgttccaacccgttctgtggccagagtatacattttggaacctcttcgaggccatcctgcagttccagatgaaccatagcgtgcttcagaaggcccgagacatgtatgcagaggagcggaagaggcagcagctggagagggaccaggctacagtgacagagcagctgctgcgagaggggctccaagccagtggggacgcccagctccgaaggacacgcttgcacaaactctcggccagacgggaagagcgagtccaaggcttcctgcaggccttggaactcaagcgagctgactggctggcccgtctgggcactgcatcagcctgaatgaggctggccacctgccactttgccctgccctctgcctccagggctccactccccttccttttcttggtgaaaggcacctcctttcctgataatgaatggtgttccctttgcttggctggggagccccccaggccaggtttgctggccatagatacctttgggctgcctgggacaggctccttaggaggattgagggtgaaagtttcccccgagtaccctaaacctaggtttggtccccaatagggtttggaaagcaaagggccccaactcttcaccaaaaaaaaaa

SEQ ID NO: 62927 - DNA, 785 bp, Homo sapiens
  misc_feature (1)...(785): n = a,t,c or g
ccgctacacatgaaggtgggtgcacacacatatgcatacctcagagtcatgtgtagggtgtgcacacacatatgcatacctcagagtcatgtgtgtgggcacatatacgcttgtgttcacctgtatgcacatgtggatctgtgcacatgtacacaccaagcatgatcgcatatgttctcacacagtcacatggcacatgaagacatgtatacacacacaccatgtgtacacacatggtcacccccacatgcatactctgtatatgcttggacacacacacacaaacttatacacatgggtgcatgcacacacatcctgtgtgcacacatgtgggcacactcactcatacctgtgcccatttagtcacataccgcacacaggggttgtgcacgctcgtgtgtgtgcacctgtgctcatacatgggcccagggaatactcacacaggtacactcacagatttacatgtacacacttgggcacaacacacacataaccacccacacgtgtggattcatgcacatatgcaattttttcacccatttggaccttttttnnnnnnnnnnnnnnnnnnnnnnnnnnnnnnggctccaggcttttctcttacatctccacgggggccctgaggtctcttctgcatgggggtgtcatggccagagcaccccacaaaagagattttaccccacaacgtgggctctaaggagaaatgtcctaacaatgcagttacctgactttaaattaaaagttttggaatgaggaaaaagcttttgggtttaatggaaaacttt

SEQ ID NO: 62928 - DNA, 1181 bp, Homo sapiens
gcggggaattccaacctgttgagaagtcccaagtgactgggcaccatagatgctcaggagtggtgcaggccagctgcctgggacccgaggtccagcaggtgcaatgtgcccacattaactgttgttacctctacccccatgccaactatgactggactgcagtgttccaacgagaagtgccctaaacttagccataataagtaatttatttgtagattcctgaagtactggggtagggtgtggggtgcctttttcttatgattacagctatgttaacaatagggtttttttatgaaccaatctgttgttcatactgaagaattgatgtagcccttttgtttgcaggctgtggaaaatctctgttctcacaaagtctccccaatgctctacaagcaactgcgtcaggcctgtgaagaccacgtccaggcacagatccttccgtttagagaactcactagatagtgttttatttttaaagaagattaacacgtgctggcaggaccactgcagacaaatgatcatgatcagaagcatcttcctgttcttggaccgcacctatgtgctgcagaactccacgctgccctccatctgccaaaatcattaacgtgaacgtaggagtccaggtgggtcttagccttgaaacaccaggtgtctagccagcagcaaggagtggagcaggaagctcggacaggcggctgactttggtcatgagggtgaagacagagggtcttggtttctctctgacgactggaggttgagcctggagcggctctttccagcgctgcagttgaaactcggagaaagactggcctgctggcccgtggggtcgcagccctgaaggctgtgcgtcccctgtggaatggcttgctcagcctcccggcctcctgagcacatagcactcatcgtccgtcatctttcggggactgtatacaccaggggttctggggcctttcctcagcagcgttcgcggccacggaccccacatgtcctctgctgacccctgtgtgtcctctgtggccaccccatggcgctgaatcctgccgcctcctgcaagccgactttggacaaaagctgtgtccggtctcaccgtctgatttgtcttgttctctgttaatgtagtgtttcattcttctcacattcatacataaaagtgatgtcgtgccttttcatgaaaaaaaaaa

SEQ ID NO: 62929 - DNA, 709 bp, Homo sapiens
ctgacttacagctcttataaactagtggcaatttctgaacccagccggctccatctcagcttctggtttctaagtccatgtgccaaaggctgccaggaaggagacgccttcctgagtcctggatctttcttccttctggaaatctttgactgtgggtagttatttatttctgaataagagcgtccacgcatcatggacctcgcgggactgctgaagtctcagttcctgtgccacctggtcttctgctacgtctttattgcctcagggctaatcatcaacaccattcagctcttcactctcctcctctggcccattaacaagcagctcttccggaagatcaactgcagactgtcctattgcatctcaagccagctggtgatgctgctggagtggtggtcgggcacggaatgcaccatcttcacggacccgcgcgcctacctcaagtatgggaaggaaaatgccatcgtggttctcaaccacaagtttggaaatttgactttctgtgtggctggagcctgtccgaacgctttgggctgttaggggtaagtcaaaagtgcattcccccctgcctcacacatttttttggttcagcccccccacttgtctttttgctcctggtcattcagaacttgcagaagaatcaacagagtttttacttgatgaaatggtcctaataaactgcttttttattcttgctaggaaaaaaaaa

SEQ ID NO: 62930 - DNA, 2114 bp, Homo sapiens
cttttagtctaactagaattttgggattggtgtacatctagatgttgttccttaattcctagaggcaatgacaagatatctgtatttggcttcctctcctggtcctcacagaactcttatatgatgttggtctgaaatgtcctatatttcagttaaccattcaccaaaacacaagtataaaactcaatgttgacttgtaatttatcagtttaaacaaaaatgacaaaatggaaggtgtatttgacataatcagaaataaaatttcaaatagcctataattcacacaaagcctaggctggaaaatacaagtgctttgactcatttattaaaaaaggcttcatgtaaaccttgcatgagaagatgtccattagttactcaggatagagggcaaagagattatatacaaaaagtattttcaaggactatcttgttcttcctttataagaagttgaatttaatttttgaagtaattacttaggaagaaatgcagaggagttccacagaaaaagatggcaaccagaatgatattccgtcagccagatttttaaaattccttcactctgaaatttcttctttgtcagctaaaactgttttctgggtcagtttccttaggtgagccttgttcacattcagtatcaaaaccagctgacatttattattttggtttcattttcctttttgcgtctttatgtttctttcgacaatccatacgcaggttggttgttctggcctcccaagagttcctgctcatattacttcctactcctctccagaataagtcagaaccttgaagtcgttcatcattcttagagaaaaagaaaaatctagtggtctctttctcaagtaatgatgcttctccaggactggagtttctgtgatctgtttcttcagtaacatcttcctcttctgaactgctgtcttgtaaacgagggtcttcctgccagacaatctttccaggtttcactgtttcaactctgtaggtctcttcctttatgtctttagtgtctgaatcaaaaaaagagaacgtgaacccgctgggctgctcagcgtcactggtcagagctgcagggtcctggatttcctcaggtttctctttaccacagtcctcattccagggtgtgccctcttccttttcactggtatattttgtagtttggaatatttctttcagatccatagcaatattataatacatttctttagacacctcaggtagtttctcagcttcctcccttttcttttttcgttttgctttactttcttttggtttatcatctctttttctttcgtaagtggcatggtcttgcttcgttggatcataatgtatgatgtccttaaatttcttagcagctactgatcctctgtttgtagaattgcttaagttgatttgcaaaacactttgtacaacattcagggctttctttttttcttcagcaagctcttcttcctcagcagttttcttttcatttacctcttcctgttcctcttcactgtcagtttctagaaatcgagagtccatgcggaatctgtcatcggtgccaaagtgcgactgtaaatccatgagcttctgtccagctctgccctcaaactgaggtttaattttgaacctattactgtcatcttcagaatcagattcgtcatcatcactgctatcaaacagcttccctgatgttttacccatagactctttcacccattcctctcctggatggctctgctcctgagtcgatgtctcctctgtttcacattcactgtcagaaccgaagatgatgtgcgttggcttatcctctggatgaccatcctagggaggccatcgaaagcattgcatcttaaaaagatttatgatgaagactccaaaagcaattgcaacaaaatccaaaattgacaagtgggatctaattaaactaaagagcttctgcacagcaaaagaaaaacttatcaacaaagtaaacagacaacgtacagaatcggagaaaatatttgcaaactatgcatctgacaaaggtctaatacccagaatctataaggaacttaaacaaatcaacaagcaaaaaacaaccaaccctagtgaaaaatgggcaaaggacacagcagacacttctcaaaagacaaac

SEQ ID NO: 62931 - DNA, 2321 bp, Homo sapiens
cagactcagactcacgtcgcactcctcgcagttggactggtgggaactgggaacactggagacctgatttctaactgacgctaccgtcgcggccgccggcaagttcctttactgtgttttcttggttcagccttgaagtgagtcgtggacgaacctctctcagcgtccagcctagacggcggtgttgctccggcagcgttcctgggagccgagggccagagactaagttaaaaggcccctccccatcttcagaacagtcctgggttctgagcctgccatccaaggaactcaggaggaggagttgacagtctcttcgttcctaaccagtgtgggacgacttcagcatgtctcaggccaccaagaggaagcatgtggtgaaggaggtgctaggggagcacatagtgccctccgaccagcagcagattgtcagggtactcaggaccccagggaacaatctgcatgaggtggagacagcccaagggcagcgcttcctggtgagcatgccctccaaataccgcaagaacatctggatcaagagaggggactttctcattgttgaccccattgaagagggagaaaaggtgaaggctgaaatctcgtttgtgctctgcaaggaccacgtgcgctctctgcagaaggaggggttttggcctgaggccttctctgaagtggctgagaaacacaacaacaggaacagacaaactcaaccagaactcccagctgagccacagttatcaggagaggagtccagctcagaagatgattctgacctgtttgttaacacaaaccgcagacagtatcatgagagtgaggaggagagtgaagaggaggaggcagcctgagactccaggacccaattctccacttgctcagggactggcccctggctcttctgggcttggacattcccagggtgctctgcacatcttcacccctgcatgaggacaaagcagggctcctctctgaactgatcttttgattcagagaattaaacccctggtgggttggtgacttgttctggtgtctgagtggctctctcgggggagggagattgtgatgaagcgaaaaactgctccctatttattaaaaaccttgtgggtgggtgggctgaatggggaggaaatgggaaatggctggagtctttcccaggtggtttgttctttcttattgggcacttaaaaagtgccaggccgtgctctgggccttcttgcatgtgtttaacagctgggagcactcctgcttccttgcctgcttgcagttcataccaatttaagcattcaggatgacagccctaggacctaacacccacctgcctctaagagacgctcaggagcccatggtgcctcgtgctgttctccccacctttctagtcaccctgtgtacgggagtgctcacctccaggtactgtgtccatccccacatacgacctcatctctcccactctgcaccatctatcactttcagaaggtggctggcaaatctctctatccttaactttgttttgaatggtccatccatctcctgactttatttgaaacctgattattccctgaggacattgattgtcttataaccttttaaatagaggctgcttttccaccctcacccttcattcttctaaccagccctgacattctcatgagtaaccttctgccttcacttccctcttgtgtagcatcaattccgtagtccaccctacacccctctgtctccctccattctgttccgctagtaaaaccctaaccctgggtaaacccaatcattcacctctgtgcccaaacccaagtcaccatcattaggtgagaaaacagccagcctggccaccagttgtaccttatgtttatcattacaaacctcagatggacactaagcactgcccagcagatctactctgggatgtctgtttcaaaacttctgtcttatctatcaattcccccttgtggtagttaccacaacacatgcctcattaagaaacagcaaccatcagagggaatgcctgcctccctgttaccagctctgcagatgtgcacatatcttcctgtcgtaagccaatgggacttaaaccttacctcttgtgttttggagactatctttttttttttttgaaaaagggtccccttgggtggctaagcctgaagggcagggggggaatctgggttaattgaacccttcccctacggggttaaggaaactttcttgcctaaccctcccaagaagttggaactacgggggggccccaccaccccgggttaattttttgtattttaagaaaaaacggggttttgccatgttgcccggccgtggcttaaactccggactta

SEQ ID NO: 62932 - DNA, 579 bp, Homo sapiens
ccatttcccgggccgacccacgcgtccgagccggcgccgcgggccgagtgtcctggtgaagacctagttcttgccggagacaattccactgcagaagcactttacttaaaaggacttgccaggctggacaatgcccgttgacttggggcaggccctaggcctgctgccatcgctggcgaaggccgaggactcccagttctcagaatcagatgctgcccttcaagaggaactctccagccctgagaccgcacgccagcttttcaggcagttccgttaccaggtgatgtctgggcctcatgagaccttgaagcaacttcggaagctctgtttccagtgggctacagccagagggttcacaccaaagagcagatcctagagatcctcatgttggagcagtttctgaccatcctgcctggggagatccagatgtgggtgcggaaacagtgtccaggaagtggagaagaggcagtgacccttgtggaaagcttgaagggggacccccagagactgtggcaatggatcagtatccaggttctaggacaggacatcttatcagagaagatggaatctccaagctgc

SEQ ID NO: 62933 - DNA, 1128 bp, Homo sapiens
cccccttttttttttttttacaggtagggtaaccttcaattccaatgcgaatgttttttaggccccgttcctttaacactgtttttgcaacatccctattctcaatatatttgaagaatctgtagagcttggagctataaagaatttgggaatattcctcccccattggtggagggtggtcttcatcccagtccacagaatcctcatccgtcagcacaacaatgtggcactctcgttctcctttcttggcacagcccaccatgatgggcaagatgagctcttcgaggtagtgatcaaactgcttatgagcaccgtcattagacagttcatggagtaaagcactcagatcttgacatcggatagtgttgaagtcaaaattaatgcagagataatcacaaagtatctctaagatctgggatagagatgccatcaggacaattgatgataccggttttgtaaataaatccagcacttgtgcgaaatacagttgcactgatgccttcagcaatctcatactctcccttctcattgggccgagtgaagttgtactctcttcctggtccaaacatccttcccagcatggtatccggatgagcagtgaaaatctgtggattcacaacaaaacgtgtgccatctacaagaagcgtcactttctctggtgcttgggaatgggaattactgccaaagcccacactactgtttccaaatctttctggagcaataaaaggttcatggttccgtttattcccactttggaagcaagaacctttgatgtcttcagcaaggggcattatgtgagggaactgaagatttgctggctgagaggcatagtcaagtgagaggtcttcattcctgggacctagaggataagtaagattatgaggaccagatgaagccaggctgtttgcttctttttcttgggctacagctaaagtatcatccactaagcagctggcctcctgccgcaataacctgtcactgtcactgccacggtgaacattcatccttagattctgagtcctgaactgtccgtttgatcagagagaaatctcgtcgctccccgccgcgctgtcccgctcggggctggaatccgcacgggaggcgcgcgcaggccgcgcagccagaagc

SEQ ID NO: 62934 - DNA, 939 bp, Homo sapiens
  misc_feature (1)...(939): n = a,t,c or g
tgcgcagggcccccttgaacgccttcgatagagcgcgtagcggaccgccgaccacatcgtgcgggctggaggaggccgctgtctgaagggggaggaggttccctgtctgagggggcaggaggtccctgtctcaggggggaagaggcccctgtctgaagagggaggaaacctccgtctgaggagggaggaggtccctgtctgaagagggaggaggccttgaggggggaggaggtccccgtctgaggagggaggaggcctctgtctgaggagagaggaggtacctgtctgaggggggaggaggcctctgtctgaggggggaggatgcccctgtctgaaggggtaggaggaggcctctgtctcggggggaggagtcccctgtctgaggagggaggaggcctctgtctgaggggggaggatgccgctgtctgagagggtaggaggaggcctctgtctgttgggagaggaggcccctgtctgagggtgatgccgatgaggtgatgccctgccagcgtgaggtagagaagacccaggtctgaagaggggaggatcaagtcagagaagcgtagatgcccatctgagatggaggaggctcccgtccgaggggaggggacactcctgtctggaagggacagaggccttcagatgaggagccaggaggcccaggcctgagggaggagaagggcctagtctgatggggagaagggcccttgcctgaaggcagagcagtttcctgcctgggaaggtcatcccagccccgcccatcagtctgaattggacatcaccagtgcccaggacattggaggtctgagggaaaagtctagaaagatgatggggctggtcacacactaattaccaatgggaaagctaaggtgagttccaagtttggcttcaccagagaaaactaatttgtgtggcattccagaaagacctgcanactcg

SEQ ID NO: 62935 - DNA, 508 bp, Homo sapiens
ttatagacatggaccagatgcgcaaccccaagccccgttcctgcaccgtataccgcaataggcttaccttcagcggtgggcgccaccaaactgaatcagatgctcttttttcagcatcgggatcgccatcgatacagcggtaaaatcgttaataatttccagatggctaaaaccgagattctttttcatttcggcaattgagaacgcccaggtatggttggtcatcgccacccagtcaccggtaattgggcaagcgatggcaatacagccgtctttcacctcgaccttatgttcttcaagataaacgcgaatgaccgcttcgaggctggggtaatcaagccctgaataggtcttagcctgcgagatttcaccactggcaatatcacacagagcaagacgtgcgttggtgccgcccacatcaccgactaatgcatactttgtcattcttcaactgctccgctaaagtcaaaataattctttctcacactgtaaatacctgggggcatag

SEQ ID NO: 62936 - DNA, 1864 bp, Homo sapiens
ccgggacgacgagttcgaggaccctcgatccgagagcgccccagccagagcttgtgcccatgcccctgtcccgcaggggaaggggatcccgcctggccggctctcgagcggcgactagtaacctcccgcgggcgacagccctctccccaaagagtgccggccgcggggccctgtctgtaagccacgcgcaactcctcacccggcggcgccattcctccgagcaggtcccgccggagtccgagccgcgggctgacttccgctcgggaaagtggctccaagagcccgccacaggggacgccagggactcgcggcaggctctgcgggccaggatgagttctaagcacagacttggacatccctgacatccctggactccattgtgagcccctgtcacatagccccagacacctgacccaacaggacccgctcagtgaggccattgttgagaaactgatccagtccatccagaaggttttcaatggtgagctaaagggtgaacttgaaaagctgaaattcctaggagatctgtcttctctcagccaagctttaccttatgatgaaaccgcaaaatcattcattcacagccacatagcagacattgtgcataccttaaatgtactggtacaagaggaacgcccgcattctctgtccagttccatgcgccaggaggtctttgtcaccatcgctgatctcagttaccaagatgtccatttgctgttgggctctgaagatcgagctgagttgttcagtcttaccatcaagagtataatcactctgccctctgtaaggacccttacccagatacaggaaatcatgcccaatgggacctgcaacacagagtgtctttacaggcagacgtttcaggcattctctgagatgctccagagtttggtggtaaaagacccacatttggaaaatcttgacaccattattaagcttccactgcgattccaaagacttggacacctagtggctctgatggcactgctctgtggggacccacaggaaaaggtggctgaggaggctgcagagggcattcactccctgctgcatatcaccctgaggctgaagtatatcactcatgacaagaaagatcagcaaaacttgaaaagagcattgacaaaatgtcgagaattcctggagctccacagctctgccgctaaatgcttctacaactgtcccttcagaattgcccaggtctttgaaggttttcttgattcaaatgagctctgccagtttataatgactacatttgataccctgaaaaacctgaaacatccctgcatccagcgatcagcaggagaattactgctaactttggcgaaaaatacagagtcccaatttgagaaggtgccagaaattatgggagttatctgtgcccagttacccataatcagccagcctagagtccgccaacaaatcataaataccgtgagtttatttatatccagacccaagtacacagatatagtgctcagccttcccttctgtgtcatcccagtgccgtataacaggcacctggctgaggtgtggagaatgctgtcggtggagcttcccagcacgaccctggattctgtggaggctcctgaggaagctgcagaaatgccataatgagcctgcacaggagaagatggcatatgtggctgtggctgtaagcccttgagctttgcccctctaatgtcagcccctcccaggatgactgaccccacaccccagtggagagtgttccttttggtccctctcaaagcctgcatctgtcatccatttataagtctacagtgtttctgccaagggattgacatggagggagctggggagagtgaaggagtcagaatgccttaatacaaactcgtccaacctgcaa

SEQ ID NO: 62937 - DNA, 1255 bp, Homo sapiens
ccatgttggccagagccaccgcattatttttcagccaggtgcagtggctcacacctgtaaccccgcactttgggaggccaaggtgggtggatcacctgaagttgggagtttgagaccagcccgatcaactttgaagaaaccgtctctactaaaaatgcaaaaacctagccgggcgtggtggcacgtgcctgtaatcccagctactcgggaggctgaggcaagaggatggcttgaactcgggaggcagaggttgtggtgagccgagatcacggcactgcactccagcctgggtgacaagagcaagactccgtctcaaaataaataaataaaaataaaaaataaacatgatgatcacagatgcagtcacattttctgagttcttgtctctctgccagtgccacccagatagcctcacaaaactttgacccagccactgttagtgtcgccaccgcccataaaggagctgagcccagcaggggcactgcctggggccctgtagccaaaaggctacagcaggagctgatgaccctcatgatgcctggtgacaaaagaatttctgcctaccctgaaagccttatcaaatggacaccatccatgaagcagctggcacagtgtatgaagatctgaggtataagctcttgctggagttcctcaatgactacccacctttacgatgcacccacagtgaagttcctcacaccctgctaccaccctaacgtggacacccagggtaacatatgcctggacatcctgaaggagaagtggtctgccccgtatgatatcaggaccatcctgctctctatccagtgcctgctaggacaactcaacattgatagccctttgaacacacatgctaccaagctctgggaaaaccccatagctttaagaagtacctgcaagggtcaggcgcagtggctcacacctgtaatcccagcactttgggaggccgaggtgggtggatggatcacctgacgtagagagtccaaggcctgacaaacatggagaaatgtcatccctatttaaaaaaataaaaaaattagccaagtgtggtggcgcatgcctgtaatcccagctactcgggaggctgaggcaggagaatcacttgaacctgggaggtggaggttgcagtgagccgagatctcgctattgcactccagcctgggcaacaagagtgaaactctgcctcaaaaaaaagttatataaaataaaaatataaataaggaagtacctgcaagaaagctactcaaagtaggtc

SEQ ID NO: 62938 - DNA, 1074 bp, Homo sapiens
gcgaccgcgcggcccagagccatcaccgccagatggacgcattcggcggaacccagagccagcgatgcgcacagctcgggccgtgcagtggctgcgcggcagccagagcgctggtccgcgcaggttggccagcagcggcggcaccacgctagtagtgaagcccgcgtctaccaaggccaggtggcagaggaagtagtacatgggcgtgtgcaggcgcgggtcgcgcaccgccagcagcaccagcgccgagttgcccgtcaaggtcaggaggtagcacaggaggacaagggcgaagaggaccggctgcagggaaggccagtcggagaaacccagcaggagaaagcgctcctctgcgctgtagttggcctaaaggaggaaaactcccagaatgtttggaaggtcgaaataaaaaagggtgactaccccttataagcaaagggaaaaccttggagtgtggggctgggctgggagaaggaatggaatcatatacaaggtcagtttgtggattgtaatcccatttacagatgagattacttaaaaataaactccctaagaataagagcaacactccaagcttggcctggccaacactcggtaggcagaatgatcacctccgttgtttcaggtactctgtgtttatttatgcaacagttcatgtaaaatggagacgaggccagaagaatccttgagcagccagagcccagttgggcctccttaagtgaccttaaccttgcttgatttgcaagcatgtctgaaactttatttgtggtatttcttgtaaatgcctatgttaaagaaacacagaacttaagctcaaccaatcagaagcagccaacaaaaaacgtaattagtaactagggactttcctcatgggatagaccaaataaggcaactgtataactgtgtaactgtataactgtaaccaatgaaatattatctttgcttttatctatttgtcctaaaaagcctcctcctcatgttctctctggggagctccctagccacttctggcttggagctgcccaattcatggatccctgctcaaataaactcttaaatattttaaaaaaaaaa

SEQ ID NO: 62939 - DNA, 1498 bp, Homo sapiens
tttcgtgcgggggtgggctctgcgcgtaatggcagcgccgtggcctcgcgtccatctttgccgttctctcggacctgtcacaaaggagtcgcgccgccgccgccgccccctccctccggtgggcccgggaggtagagaaagtcagtgccacagcccgaccgcgctgctctgagccctgggcacgcggaacgggagggagtctgagggttggggacgtctgtgagggaggggaacagccgctcgagcctggggcgggcggaccggactggggccggggtaggctctggaaagggcccgggagagaggtggcgttggtcagaacctgagaaacagccgagaggttttccaccgaggcccgcgcttgagggatctgaagaggttcctagaagagggtgttccctctttcgggggtcctcaccagaagaggttcttgggggtcgcccttctgaggaggctgcggctaacagggcccagaactgccattggatgtccagaatcccctgtagttgataatgttgggaataagctctgcaactttctttggcattcagttgttaaaaacaaataggatgcaaattcctcaactccaggttatgaaaacagtacttggaaaactgaaaactacctaaatgatcgtctttggttgggccgtgttcttagcgagcagaagccttggccagggtctgttgttgactctcgaagagcacatagcccacttcctagggactggaggtgccgctactaccatgggtaattcctgtatctgccgagatgacagtggaacagatgacagtgttgacacccaacagcaacaggccgagaacagtgcagtacccactgctgacacaaggagccaaccacgggaccctgttcggccaccaaggaggggccgaggacctcatgagccaaggagaaagaaacaaaatgtggatgggctagtgttggacacactggcagtaatacggactcttgtagataatgatcaggaacctccctattcaatgataacattacacgaaatggcagaaacagatgaaggatggttggatgttgtccagtctttaattagagttattccactggaagatccactgggaccagctgttataacattgttactagatgaatgtccattgcccactaaagatgcactccagaaattgactgaaattctcaatttaaatggagaagtagcttgccaggactcaagccatcctgccaaacacaggaacacatctgcagtcctaggctgcttggccgagaaactagcaggtcctgcaagtataggtttacttagcccaggaatactggaatacttgctacagtgtctgttacagtcccaccccacagtcatgctttttgcacttatcgcactggaaaagtttgcacagacaagtgaaaataaattgactatttctgaatccagtattagtgaccggcttggtcacattggagtcctggggctaatgatcctgattatctgaaacgtcaagttggt

SEQ ID NO: 62940 - DNA, 1013 bp, Homo sapiens
agattcggcactaggggcttggctaaaagtaagggtgtcgtgctgatggccctgtgcgcactgacccgcgctctgcgctctctgaacctggcgcccccgaccgtcgccgcccctgccccgagtctgttccccgccgcccagatgatgaacaatggcctcctccaacagccctctgccttgatgttgctcccctgccgcccagttcttacttctgtggcccttaatgccaactttgtgtcctggaagagtcgtaccaagtacaccattacaccagtgaagatgaggaagtctgggggccgagaccacacaggccgaatccgggtgcatggtattggcgggggccacaagcaacgttatcgaatgattgactttctgcgtttccggcctgaggagaccaagtcaggaccctttgaggagaaggttatccaagtccgctatgatccctgtaggtcagcagacatagctctggttgctgggggcagccggaaacgctggatcatcgccacagaaaacatgcaggctggagatacaatcttgaactctaaccacataggccgaatggcagttgctgctcgggaaggggatgcgcatcctcttggggctctgcctgtggggaccctcatcaacaacgtggaaagtgagccaggccggggtgcccaatatatccgagctgcagggacgtgtggtgtgctactgcggaaggtgaatggcacagccattatccagctgccctctaagaggcagatgcaggtgctggaaacgtgcgtagcaacagtaggccgagtatccaacgttgatcataacaaacgggtcattggcaaggcaggtcgcaaccgctggctgggcaagaggcctaacagtgggcggtggcaccgcaaggggggctgggctggccgaaagattcggccactaccccccatgaagagttacgtgaagctgccttctgcttctgcccaaagctgatatccctgtactctaataaaatgccccccccccccgttttaaaaaaaaaa

SEQ ID NO: 62941 - DNA, 475 bp, Homo sapiens
  misc_feature (1)...(475): n = a,t,c or g
ggcacgagccgctagaagcccttcacaaactgcggcctggcaggcaaccaaccaaaaaacaaacaaagaatcctgaccgagcagcgggcatcaagttcccttcgccggcatctgggccctggacgccgggaaaggcctccgtgttccgcttcctgccgccttccacggtaggcttggcccagcctccatctttcgttctctcaggacggctagcagcagaattcattgtcggaaggaaatataaactgctttggaagatctggtgtagctccttcggagacatctgtctggcgatcagcactcaccaacggtaatgaagtggtagtgaagccagaatctcagggccaggcatccccagttgctgtacaagagcaggctttacaagatgcttcaaggtggggtttggcatcccccanatacggtggttgtggtcaggaagaagactataatggtactagtcatggatttttctgga

SEQ ID NO: 62942 - DNA, 1252 bp, Homo sapiens
ccgcccccagcagcgagaacatcccagctccacaccccccccccgcagccagtgctccttgtcaagctccccccgtcactccaggtgggagccaccccggtgagggggtgtgccacttgcccccagggcactcctctgggcatcccgggtgggggattttggggcctggggggcagtctttggtacctgtgttcgtcagggatgctctgacaaccaggtgtcgtccacgggcgggggcatgggcatggtgacagtggtcctgttgatgtcaccgatgatgctgagcgcctccttcagcgcgtggtgcatgtgcagcatctcgtcgtgctgctgtgcctgctctgccaactcctccatcagtgtgttctggttcccacatgagtacatattggccagcggctccgagatgatgaactccggggtctgagagtgggcaaacagggaagaaggttgggacctggtgcctgtgccgccctggctgccttgctgggcccttctgggactgtgcgctggacttggagccccttggagtatggcttttcacacgggcttctataccgcttcgactggaagatccacctccccactgccttttctcactcagatggggacaccgaggtccagaggaaaagacacctgtcaaatgtcacagatctgggaggggacttaagacttatcatgccaagaggacacctgtctactcagtttttttttggtggggcggggggcggtgatagggtctcgctctgtcaccaggctggagtacagtgatgactgctcactgcagcctccacctcctgggctcaaagtgatcctccaacgtcagcctctcgagtagctaggactacaggcacatgccaccaccaagcccagctatttttaaaatttttgtgtggagacaaggtctcactatgtggcccaggctggtctcgaactcctgggctcaagtgatcctcctgcctcggcctccaggagtgggagttggagttgatgcctggatacaggagctctgtgggtgggagtgagacaaaacacagggtcctgagctctggggaccaagcaatgtcctctggtgaaaaaaatcctggacttgctggcagaagatttgcctcttactcgccatgtgctctgaatacatttacctgccctctgggaaaggagaaagagaaagaggagcggaaaaaacaacagggggggggggcctttgaggaacccaatattggggcgggtggtgacaaaagttttttttttg

SEQ ID NO: 62943 - DNA, 1037 bp, Homo sapiens
cgcgaagcctgagaggcaggtagctgcggcgctgggctggcggcggcgagtccacgtgctccccgcggccggttgaaaccgttggcgggcgctggctgagaggcaatgtttgctgtcttccattggagtgactgaatttctacatgacggctttttgacaagacttaaaacctgtcttggatagagaatatttagccatttacctaaaaatggtattttttacatgcaatgcatgtggtgaatcagtgaagaaaatacaagtggaaaagcatgtgtctgtttgcagaaactgtgaatgcctttcttgcattgactgcggtaaagatttctggggcgatgactataaaaaccacgtgaaatgcataagtgaagatcagaagtatggtggcaaaggctatgaaggtaaaacccacaaaggcgacatcaaacagcaggcgtggattcagaaaattagtgaattaataaaagagacccaatgtcagccccaaagtgagagaacttttagagcaaattagtgcttttgacaacgttccccaggaaaaaggcaaaatttcagaattggatgaagaacagtttaaaagttcataatgaatccattctggaccaggtgtggaatatcttttctgaagcttccaacagcgaaccagtcaataaggaacaggatcaacggccactccacccagtggcaaatccacatgcagaaatctccaccaaggttccagcctccaaagtgaaagacgccgtggaacagcaaggggaggtgaagaagaataaaagagaaagaaaggaagaacggcagaagaaaaggaaaagagaaaagaaagaactaaagttagaaaaccaccaggaaaactcaaggaatcagaagcctaagaagcgcaaaaagggacaggaggctgaccttgaggctggtggggaggaagtccctgaggccaatggctctgcagggaagaggagcaagaagaagaagcagcgcaaggacagcgccagtgaggaagaggcacgcgtgggcgcaaggaaaaggaagcggaggcact

SEQ ID NO: 62944 - DNA, 812 bp, Homo sapiens
gctggcccatggctgagacctctctcccagagctggggggagaggacaaagccacgccttgccccagcatcctggagctggaggagctcctgcgggcagggaagtcttcttgcagccgtgtggacgaagtttggcccaaccttttcataggagatgcagctggtccttactccctgccatggggctctgccactttgccaccctggcactgatcctgctggtgctgctggaggctctggcccaggcggacacacagaagatggtggaagcccagcgtggggtcggccctagagcctgctactccatctggctcctcctggcgcctacaccccctctcagccactgtcttcagtctccacagaaacagcatcaagtgtgcggagacaggcggctgaaagccggcagcacgaactgcccgtcagagaagtgcacagcctgggccagatactcccacaggatggactcactgcagaagcaggacctccggaggcccaagatccatggggcagtccaggcatctccctaccagccgcccacattggcttcgctgcagcgcttgctgtgggtccgtcaggctgccacactgaaccatatcgatgaggtctggcccagcctcttcctgggagatgcgtacgcagcccgggacaagagcaagctgatccagctgggaatcacccacgttgtgaatgccgctgcaggcaagttccaggtggacacaggtgccaaattctaccgtggaatgtccctggagtactatggcatcgaggcggatgacaaccccttcttcgacctcagtgtctactttctgcctg

SEQ ID NO: 62945 - DNA, 1611 bp, Homo sapiens
tttccaggggtcactctggcttcgactccgtcgctctcaattcgtcaccaggaggaagacggagctggctgcccagcccaaaggcccatgaggggatgcagttatgggctctgtcgccgtggattgttattttgtgtcagtaagtaatccataaagtgccaacatgggaaagaaacggacaaagggaaaaactgttccaatcgatgattcctctgaaactttagaacctgtgtgcagacacattagaaaaggattggaacaaggtaatttgaaaaaggctttagtgaatgtggaatggaatatctgccaagactgtaagactgacaataaagtgaaagataaagctgaagaagaaacagaagaaaagccttcagtttggctgtgtcttaaatgtggccatcagggctgtggcagaaattctcaggagcagcatgccttgaagcactatctgacgccaagatctgaacctcactgtctggttcttagtttggacaactggagtgtatggtgttacgtatgtgataatgaggtccagtattgtagttcaaaccagttgggtcaagtggttgattatgtcagaaaacaagccagcattacaactccaaagccagcagagaaagataatggaaatattgaacttgaaaataaaaaattagaaaaagagagtaagaatgaacaagagagagaaaagaaggaaaacatggctaaagagaatcctcccatgaattctccttgccaaataaccgtgaaaggactcagtaatttgggaaacacatgtttcttcaatgcagttatgcagaacttgtcacaaacaccagtgcttagagaactactaaaagaagtgaaaatgtctggaacaattgtaaaaattgaaccacctgatttggcattaacagaaccattagaaataaaccttgagcctccaggccctcttactttagccatgagccagtttcttaatgagatgcaagagaccaaaaagggggttgtgacaccgaaagaactcttttctcaggtctgtaaaaaagcagtgcggtttaaaggctatcagcagcaagacagccaggagctgcttcgctacttattggatgggatgagagcagaagaacaccaaagagtgagtaaaggaatacttaaagcatttggtaattctactgaaaagttggatgaagaactaaaaaataaagttaaagattatgagaagaaaaaatcaatgccaagttttgttgaccgcatctttggtggtgaactaactagtatgatcatgtgtgatcaatgcagaactgtctccttggttcatgaatctttccttgatttgtccctcccagttttagatgatcagagtggtaagaaaagtgtaaatgataaaaatctgaaaaagacagtggaggatgaagatcaagatagtgaggaagaaaaagataacgacagttacataaaagagagaagtgatattccttctggaacaagtaagcacttacagaaaaaagcaaagaaacaagccagcattacaactccaaagccagcagagaaagataatggaaatattgaacttgaaaataaaaaattagaaaaagagagtaaatattgaacttgaaaataaaaaattag

SEQ ID NO: 62946 - DNA, 742 bp, Homo sapiens
agagtggtgcacggtccggatttcccgtgtcgacgatttcgtgcccattgagtgaggaagacaacggtaccccctctagcaatttttagcatatttggctgaaatgcaaatacccaaagagcgagacgcagggagggagctcgcttagataatctgtggttggaacaggtcatttcggttctgccgggccttgttacccagggcttccgctgtcactcaggaccgatgggacggggactggagcctcatccaatcaggggcgctggggcggggtcctgccaactgtccatccggggaaggggaggccgcattcccgctttcctgactcccaggcgtcttgcaccaaagggaggtcgggatctcggttttccggccccgagagggaccaggtgcctccgccatagcttctgtcgctccatcgcccgcactgtgactggactgttagagggatccgtggagaggaggccaggacacctggaagccgggaaatggattcagtggtctttgaggatgtagatgtgaacttcacccaggaggagtgggctttgctggatccttcccagaagaatctctacagagatgtgatgcaggaaaccttcaggaacctggcttctgtaggaaaaaaatggaaagatcagaaaattgaagatgagtacaaaaatcccaggagaaacctaagaaattatgtgtaccatttcagtcttaaaaagtggagttggtcgctgtacgcaagacagacatt

SEQ ID NO: 62947 - DNA, 619 bp, Homo sapiens
aaaaaacaagttattcgtatttgccaaacagacctcaaaactgctgaagaggccaggattaagtatcagattttctagatagtttttctaaacatttggacttagaaatttcaagtaaaaatgtgttttgttgtgaacagaaattcaccggcattattacctaagtgtatttccgagatgttgccacgtatgttttcttatttacagctagagttaattatgaaaattgtggggttggaggcgaggtgggggtggcggtttgttttctcgtgctctccaactagcgtgctctcttcccctcccccgcggcgtgcagtggggtagagaaaaggtggcgacggcgactggagcagcagaggctgtagcatcggatacccacctcccacgaaccgggtcctcttccccctccttgctgtgtgtttgatgtgttgaagcaggagggagaacgccgcgagcagcgccgtgagcaacactaccatcgtccccagcactgcggatccgggccctagcggcgggcccagtatcggaggtggtggcggcggtggaggcggcggcatcgaggtaataggtgactaatctccccgggcgctagctctgagcagatgcggactctcttcgg

SEQ ID NO: 62948 - DNA, 780 bp, Homo sapiens
ccacgcgtccgcggacgcgtgggggagcgctgggcctttttgtccgttccggcagccatgagctcggagatggagccgctgctcctggcctggagctattttaggcgcaggaagttccagctctgcgccgatctatgcacgcagatgctggagaagtccccttatgaccaggcagcttggatcttaaaagcaagagcgctaacagaaatggtatacatagatgaaattgatgtagatcaggaaggaattgcagaaatgatgctggatgaaaatgctatagctcaagttccacgccctggaacgtctttgaaactccctggaactaatcagacaggagggcctagccaggccgttaggccaatcacacaagctggaagacccattacaggtttcctcaggcccagcacgcagagtggaaggccaggcactatggaacaggctatcagaacacccagaaccgcctacacagcccgccctatcaccagctcctccggaagatttgtcaggctgggaacggcttccatgcttacaagtcctgatggaccatttataaatttatctaggctgaatttaacaaagtattcccagaaacctaagttggcaaaggctttgattgagtatatctttcatcatgaaaatgatgttaagactgctttggatctggctgccctctccacagaacattctcagtacaaggactggtggtggaaagacagattgaaaaatgttactacagggtgggaatgtatcgtgaagcagaaaaacagattaaatcatccc

SEQ ID NO: 62949 - DNA, 1599 bp, Homo sapiens
gcggccgcgagaaggaaggggcgggttgggggaggcgctgaggtggtagcagcggcggcttttgctgagttttctctggcccagagcgctcgggctgtcggtctagcaggggggactcccctgaggggccgctgcgggtcgccgtcttcggaggcaccggcgagggcagagccaacagcctcttcacggtctgtaaggtcattgtttgccagtcgtgggcagcgcggcaaacctgctgggaaaaggttttctggttggaataggatgagtaccgcaccagctttgccttccagctgagatgtaaatttcaggcctccatcctgtggaacgtgggaaaactatcttgagtgttggcatgttctaagtatgacataatagtttaatgtatgataaatcatgggtgtttagacgaaagatttacacatataaattggaggctttagcggtcttagtgtaactaacttttcgtccccttaacccttgatgcctgttctatgggtctctagagcggaaggagcattatactccggaaacatttgctggaaggggttatgagaaattcctctctgtatgctaactccgtaatacaagcgtttgtgtattttaaaatcacagctgttccaaatataatctagcctcgttttccccctccgtcggatgataggtgttcttcaggacagttttattttaagcaattcttagtctcaagtaaacaccatcattaaaagaactgagaactattatcaattcttcctttggagtccatcttcaatggaaaggagaagggaaaaccttttttaaaaagaagaaagaaaactgaagtttttgatttgactagagaaatattcagaagactccttattttcacctagtctaatcacaaaattgagaaacaaacattatcccttgaccatgtaaattttacaccacattatgtcaacagcatgtaccttccacattgagtattcagaaagaagtgatctgaactctgaccattctttatggatacattaagtcaaatataagagtctgactacttgacacactggctcgagcaaacatgaacgttggagttgcccacagtgaagtgaatccaaatacccgtgtcatgaacagccggggtatgtggctgacatatgcattgggagttggcttgcttcatattgtcttactcagcattcccttcttcagtgttcctgttgcttggactttaacaaatattatacataatctggggatgtacgtatttttgcatgcagtgaaaggaacacctttcgaaactcctgaccagggtaaagcaaggctcctaactcattgggaacaaactggactatggagtacagtttacatcttcacggaaggttttcacaatttctccaataagtctatattttctggcaaggttctatacgaagaatgattcaactcacttcatcctaaacacagcttctctcctgaggggactaattcccaatgccacaactacatggtggtcggagctttgtaattaataagtattgaaatgttttgaaactggaaaaaaattttacagctactggatttcttataagggccgcgaggctagtaaaacgcaccgcg

SEQ ID NO: 62950 - DNA, 782 bp, Homo sapiens
taccgcctctgtttctgcggcgattgaacagccgagctttgcggccgggatcgcggaaagtgatggctgtcgtcccggcgtctctctcaggacaggacgtgggatcatttgcatatcttacaattaaagacagaataccacagatcttaactaaggttattgatacattgcatcgacataaaagtgaattttttgagaaacacggagaggaaggcgtggaagctgaaaagaaagctatctctctcctttctaaattacggaatgaattgcaaacagataaaccatttatccccttggttgagaaatttgttgatactgatatatggaatcagtacctagaatatcaacagagtcttttaaatgaaagtgatggaaaatcaagatggttctactcaccgtggttgttggttagaatgttacatgtatcgaagaattcatgaagcaatttatccagagtccaccaatcgattactttgatgtatttaaagaatcaaaagagcaaaatttctatgggtcacaggaatccatcattgctttatgtactcacctgcaacaattgataagaactattgaagacctagatggaaaatcagctgaaagatgagttttttaaacttctgcagatttcactgtggggggaaataagtgtggatctgtctcttctcaggtggagaaagtagttctcagaataccaatgtactaaattcattggaagacctaaaacctttcattttattgaatgatatggaacatctttggtcattgcttagcaattgcaagaa

SEQ ID NO: 62951 - DNA, 438 bp, Homo sapiens
tttcgtggcgagtagaaccgctgaggcgggcgcgggcccggatggggccaaggttccggccactctgcagaatggagataatcaggagcaattttaagagtaatcttcacaaagtgtaccaggccatagaggaggccgacttcttcgccatcgatggggagttttcaggaatcagtgatggaccttcagtctctgcattaacaaatggttttgacactccagaagagaggtatcagaagcttaaaaaggtatataacgaagtcatttaacttctatgttttcccgaaacccttcaatagatcctcaccagatgtcaaatttgtttgtcagagctccagcattgactttctagcaagccagggatttgattttaataaagtttttcgaaatggaattccatatttatatcaggaagaaaaaagacagttaagagagccg

SEQ ID NO: 62952 - DNA, 980 bp, Homo sapiens
gcggccgctttgccggtcattcccgaagcccggcaactgagggcggccccctttccttaacagtctcctcgctacagatcgtctgctccctcagcctcgcccgagacccacttccccagtctcgcccgggtggaggtcgacgaggaggagacaagagtcacccttcctccaggcggcgccggccccctcacccgcgggtgtgtcctataaatggcgtcggaaagcgacaccgaggaattctatgatgcccctgaagatgtgcacctagggggcggctaccccgtggggtctccaggaaaagttgggctttcaacattcaaggaaacagagaacactgcatacaaagttggaaatgaatcccctgtacaagaattgaaacaagatgtgtctaaaaagattattgaaagtattattgaggagagtcagaaagtactacagcttgaagatgactctttggattccaaaggaaaagaactctctgatcaagctactgccagtcctattgtggctagaacagatctgagcaatatacccggactgttagccatagatcaagtactaccggaagaatcccaaaaggcagagagtcagaatacatttgaagagactgaattagaattaaaaaaatgctttccttctgatgaaacctgtgagaaaccagtagatgaaaccacgaagttaactcaaacaagttcaactgagcagcttaatgtgcttgaaactgaaacagaagtattgaacaaggaagcagtggaagtcaaaggaggtggtgatgttttagagcctgtgtcctcagactccttatctactaaagattttgccgctgtggaagaagtggcccctgccaaacccccaagacaccttactccagagcctgatatagtggctagtacaaagaagcctgttccagcacgcccacctcctccaactaaatatcccacctcctagacccccacatgtattgcggccgctctagagga

SEQ ID NO: 62953 - DNA, 792 bp, Homo sapiens
gactgcagatctccgggagtcgagctcgtgcgccggcgcactggcgcgctccgtttacacgctccggggcctgtatgcgccgcgagttccggctgtcgccgtcgccgcggcggctcctggaggtcggttgcgacgagtaacggcgccaggacgagccctgcgccttctttttcgatatgtacccgaattggggccggtatggcgggagcagccactatccgccgccaccggtcccaccgccgccgccagtggcgcttcctgaggcctcgccggggcccggatactcgagctcgacgactcccgcggccccctcctcctcgggcttcatgagcttccgcgaacagcacttggcgcagctccagcagctgcagcagatgcaccagaagcaaatgcagtgcgtgcttcagccccaccaccttcctccgccccctctgccgctcccgccagtgatgccggggggcggctacggagactggcagccgccaccgccaccgatgcccccgccacccgggccggccctcagctatcagaagcagcagcagtacaaacaccagatgctccaccaccaacgagacgggcctcctggtttggttccaatggagctggaatccccccctgaatctccccctgtgccgcctgggtcctatatgcccccatctcagtcttacatgcccccacctcagccgccaccctcttactaccccccgacctcatctcagccctacctgcctcctgctcagccgtccccttcgcagtccccaccttcccaatcctacctggcgcccctgtatt

SEQ ID NO: 62954 - DNA, 1026 bp, Homo sapiens
ccggggcgcgaccatctgcgctgcggcgccggcgactcagcgctgcctcagtctgcggtgggcagcggaggagtcgtgtcgtgcctgagagcgcagctgtgctcctgggcaccgcgcagtccgcccccgcggctcctggccagaccacccctagtcccccctgccccaagtcgcagccatgaactacctgcggcgccgcctgtcggacagcaactttatggccaatctgccaaatgggtacatgacagacctgcagcgtccgcagccgcccccaccgccgcccggtgcccacagccccggagccacgcccggtcccgggaccgccactgccgagaggtcctccggggtcgccccagcggcctctccggccgcccctagccccgggtcctcggggggcggtggcttcttctcgtcgctgtccaacgcggtcaagcagaccacggcggcggcagctgccaccttcagcgagcaggtgggcggcggctctgggggcgcaggccgcgggggagccgcctccagggtgctgctggtcatcgacgagccgcacaccgactgggcaaaatacttcaaagggaaaaagatccatggagaaattgacattaaagtagaacaggccgaattctctgatctcaaccttgtggcccatgccaatggtggattctctgtggatatggaagttcttcggaacggggtgaaggtcgtgcggtctctgaagccggattttgtgctgatccgccagcacgccttcagcatggcacgcaacggagactaccgcagtttggtcattgggctgcagtatgctggaatccccagtgttaactccttgcattctgtctacaacttctgtgacaagccctgggtgtttgcccagatggttcgactgcataagaaactggggacagaagaattccctctaattgatcagaccttctaccccaatcacaaagaaatgctcagcagttacaacgtaccccgtggttgtgaagatggggcacggaacactctggggatggggcaaggtcaagg

SEQ ID NO: 62955 - DNA, 1938 bp, Homo sapiens
tttcgtctgggacttgtgggactgtggccgttttcgcaatttgggctggacgaaaaagacggtcttgctttcccggtcgccgctgtcgggaagggctgcagggtgtccgcgagacccgcggcccggcgagctgaccccgcctcgcctttcctgcctagccctcattccacggagccggtcgcgcccggtccttgcgcgacgcttcccggcccaggccgcctggtctggcgctggaggccggagtcccgcggcctgtgctggatccgcgcacacccagtggcggcggatgggcggccggggcggccggggcggccggtcctgagcgcggcccgggctgtcagggctggctgctggcgggatggacaccctggaggaggtgacttgggccaatgggagcacagcgctacccccacccctggcaccaaacatcagtgtgcctcatcgctgcctgctgctgctctacgaagacattggcacctccagggtccggtactgggacctcttgctgctcatccccaatgtgctcttcctcatcttcctgctctggaagcttccatctgctcgggcgaagatccgcatcacctccagccccatttttatcaccttctacatcctggtgtttgtggtggcgctggtgggcattgcccgggccgtggtatccatgacggtgagcacctcgaacgctgcaactgttgctgataagatcctgtgggagatcacccgcttcttcctgctggccatcgagctgagtgtgatcatcctgggcctggcctttggccacctggagagtaagtccagcatcaagcgggtgctggccatcaccacagtgctgtccctggcctactctgtcacccaggggaccctggagatcctgtaccctgatgcccatctctcagctgaggactttaatatctatggccatgggggccgccagttctggctggtcagctcctgcttcttcttcctggtctactctctggtggtcatccttcccaagaccccgctgaaggagcgcatctccctgccttctcggaggagcttctacgtgtatgcgggcatcctggcactgctcaacctactgcaggggctggggagtgtgctgctgtgcttcgacatcatcgaggggctctgctgtgtagatgccacaaccttcctgtacttcagcttcttcgctccgctcatctacgtggctttcctccggggcttcttcggctcggagcccaagatcctcttctcctacaaatgccaagtggacgagacagaggagccagatgtacacctaccccagccctacgctgtggcccggcgggagggcctggaggctgcaggggctgctggggcctcagctgccagctactcgagcacgcagttcgactctgccggcggggtggcctacctggatgacatcgcttccatgccctgccacactggcagcatcaacagcacagacagcgagcgctggaaggccatcaatgcctgagggcagctgccagggcctgtggaggacaggccagagaggaggccagcaggcccagagtccccaggggaggaggaccaggtcaagggacgttctgtgggcagtagccctgtgtggccctgttcccaccatgagtctggaggccccacctccctggggctcccaatcccctttgccatctctgctctcactggggaccctcctccccttcccacctgctctcatactgctcagtgacatggcccaggctttccttccagggccatgcttggcaaggttggctgagggcaccctccttctctgcacccttggcacgagggcagggctggctctcccaatgcctccatcccatccccatggtgctttggcctcctcaaagcatccaccatggtggatggactgaagtgtgtatattttcttgatctattttttaataaaaaggaaaaggagcaaaaaaaaaa

SEQ ID NO: 62956 - DNA, 1115 bp, Homo sapiens
ttaatagaagtggtttcttcgaacgaagggtggggttcagcccaggagcatttggcacactccgtctctcctacccctcagctcggccgccacttgtgagccgttgatgtgcgggaagggcgctctctacggcgggatcctcgctggtaggaggcaggtcccaggcctggcaagggttgtccccggagggctgggccggggcggcaccccaggagcacctgcccatgaggcggctgcgcgtacagacgttccagcccctcccgcctcaccgtgtgtttacgtgtagacgaagatgtcggcggcggcggcggtgacggcgcttcccgtgcggctgaggacgatccgccagtgagcgcggagactgcttccacttcgggcgggggagccccggaccgaatcggctctctaggccgtggagcttgccgtcccacctccgtccaaatcgacctttcctttctatccccaaccacccctcaacccctgttttcccctgccttccttgcagaggccatggaggacgaggagagacagaagaagctggaggccggcaaagccaagcttgcccagtttcgacaaagaaaagctcagtcggatgggcagagtccttccaagaagcagaaaaaaaagagaaaaacgtcaagcagtaaacatgatgtgtcagcacaccatgatttgaatattgatcaatcacagtgtaatgaaatgtacataaatagttctcagagagtagaatcaactgtgattcctgaatctacaataatgagaactctacatagtggagaaataaccagtcatgagcagggcttctctgtggaactggaaagtgaaatttcaaccacagcagatgactgcagttcagaggtaaatggttgcagttttgtgatgagaacaggaaagcctacaaatttattaagggaagaagaatttggggttgatgattcttattctgaacaaggagcacaagacagtccgactcatctagagatgatggaaagtgagttggctgggaagcagcatgagattgaagagctaaacagagagctggaagaaatgagggttacctatgggactgaaggactggccccagttccatgatttggaagctgccattaacg

SEQ ID NO: 62957 - DNA, 819 bp, Homo sapiens
ggcacgagttttaaaatgataaagaaacggggataaaaataaaccacctaaatgagtcatattagtttctttagctttttcaaatagtttctaaaatggaaggagattgaaagccagttttttaagatttatttcaagtgttgtgcaaagagggcttatgcaattcttcagaccctatttattttatttatttatttatgtacattcttctggaaaggattactaaagccaaactaagaaaagtatgtaagtgatggattatcaggcgcccttgtttgaggtcagagtaaacagacagactcccgataggttggtttaaaagtagatacctagattgcctggaagcattcaactcagctttgtgggagcatttggtcaaacttccaagtcattgttttttttgtgtgtgttcattttgttacttttccagttcttcctttgttctgtttatgtgccaatgtgcacagagaagatcaacatccccattggcccatgcggcggcatgtgtctttcagtcaagagacgctgtgaacccgtcctgaaggaatttggatttgcctggccagagagtctgaactgcagcaaattcccaccacagaacgaccacaaccacatgtgcatggaagggccaggtgatgaagaggtgcccttacctcacaaaacccccatccagccctggggaagagtgtcactctgtgggaaccaattctgatcagtacatctgggtgaaaaggagcctgaactgtgtgctcaagtgtggctatgatgctggcttatacagccgctcagcccaagaagtcactggatatctggatggct

SEQ ID NO: 62958 - DNA, 855 bp, Homo sapiens
tgttttcctcttgatcgggaactcctgcttctccttgcctcgaaatggaccccaactgctcctgctcgcctggtaagggacacctagctccgcgccttgggatgcccgtttcccagccacagtacagactcttcctgggtttgaagaagtcgcatttaaagttctgagctgaaggggctcctttatttcgttaggtgctttcttcccgatcacgtccctgagaccacttctcgcctccctgtgcctctaagttagagttgagggtactgaggcccaaggctgtcctgctccatgtcacccagttggtcagggggctgctggctgagccccaatgctctgaccaggctctgagcagtcagggtggatgggaagtggggggccattgccttctcggagttcaggacagaaggttctggcctcctgtcttagccttcctgggctgtgtctggagcctgggaccttgcttgtggggtaaaagcaacagaacacttgcccttcccaaaatgaagggagaggagatggggcttctcttcctctcccctgagtgggaaaggagctctgggggctggtcctgcagcacagaggaggggtcactgaagcgttattgaccagctgctgtaccttctgcatctcactccacgctcactgcctttttctcttccttgcagttggctcctgtgcctgtgccggctcctgcaaatgcaaagagtgcaaatgcacctcctgcaagaagagtgagtgcagggccttccctgcgaatctgggggatgggccaagttagagcagggaacccagagctctgcaggcaggggcaggccaatgaccagcttccccaaacccctccttcaacacctg

SEQ ID NO: 62959 - DNA, 497 bp, Homo sapiens
  misc_feature (1)...(497): n = a,t,c or g
ggaggggnnnnnnnnnnatagaagaccanatagatagnccgtcggaanncgccgcagcggcagggccggcggggaagtgggaagagggacctggacttcgggacnnnnnnnnnnnnnnnnnnnnnnntctccaccagctcaggctgaacgcgcctggaacgtcccaggtcccctctgccaccatgaggaacattttcaagaggaaccaagagcctattgtggctcctgccaccaccacgtcacgatgcccattggacccgtggacaactccaccgagagtgggagtgctggggagagccaggaggacatgtttgccaaactgaaggagaagttcttcaatgagattaacaagattccctaccaaggagctcatattatcagagttgctgtccaacctgtacttgcatgggaaccagaacacgctgatggaggagttggcagagcacgcacagtggcgagatgagatgctgcgcatgtaccacgtgctgaaggaggtg

SEQ ID NO: 62960 - DNA, 1215 bp, Homo sapiens
  misc_feature (1)...(1215): n = a,t,c or g
cgacccacgcgtccgctctagttcaccagcacatccaaaacaaacattagaaaacaaccacccaaatccattcttgacaaatgcacttttaggtaatcaccaaccaaatggagttattcaaagtgtcattcaagaagctcctctagcacttactaccaaaactaaaatgcagagcaagattaatgaaaacattgctgctgcaagtagcacccctttttcctcacctgtaaatctgagtacaagtgggagaagaacccctggcaatcagacacctgtaatgccctctgcctctcccatcctgcatagtcaagggaaggaaaaagcagttagcaataatgtaaacccagtaaaaacacagcatcactcccatcctgcaaaatctttagtggaacaattcagaggaacagattcagacattcccagtagtaaagattctgaagattcaaatgaggatgaagaggaagatgatgaagaagaagatgaggaagatgatgaagatgatgaatctgatgacagccaatcagaatcagatagtaattcagaatcagatacagaaggatcagaagaagaagatgatgatgataaagaccaagatgaatcagatagtgatactgaaggagagaaaacttcaatgaaactgaataaaacaacttcctctgtcaaaagcccttccatgagtctcacaggtcactcaacacctcgtaacctccacatagcaaaagccccaggctctgctcctgctgccttatgttctgaatcccagtcacctgcttttcttggtacatcttcttccacacttacttcaagcccacactctggcacttccaaaagaagaagagtaacagatgaacgtgaactgcgtattccattggaatatggctggcagagagagacaagaataagaaactttggagggcgccttcaaggagaagtagcatattatgctccatgtggaaagaaacttaggcagtaccctgaagtaataaagtatctcagcagaaatggaataatggatatctcaagggacaatttcagcttcagtgcaaaaataagagtgggtgacttctatgaagccagagatggaccgcaggaantgcagtggtgtcttttgaaagaagaggatgtcattcctccgtatcagggcantggaaggtcgtagnggaagncccccanatccaggatngaccaccgggccaggaggggctnccaggntta

SEQ ID NO: 62961 - DNA, 855 bp, Homo sapiens
ggaattccatctccagggatcagagacaggcctgccacctcccttttctgaaaagatgcctttgggtgtcatgccctggggtggcactggaagcctgggatggaaccaggaacctgggactgtgcggggacccccctcacaccccttcaccagctggcttcctgccctccctgttagccatcaccctctggtcaccaaggtgctgtgcccggccctgggctggatgctgggaacccagagtgaattcgaagtggcccggcccaggggagccaacgtgtggcccaacatggacgctcaggacagctgggagacggcaccggccgggcccagggcagtgccagagtgcccacagaggccagccctgtcccactgggcttcacctgctcgtgctgcctttccctagagccctgggggcttcctaggaatgtgccgcacccgccgccctgctgccctggcattggcctaggtgggcgctgcagctccatggccccacagaggccgcttgtccaggcagggagggccgctcagggcgggtaccatgcctgctgccctctcacaggactgccttcagggcatccggagcttcctgaggacacaccagcaggtcgcctccagcctgaccagcatcggcctggccctcacggtaccctctcgcctccctcactgccccttcccacctcctgcccctcagcctgcccagcccccgacttacatggaatggtgacccgggacaggatctctggtcttgagcctcactggctgccaacctcagggagctgctctggtgctacagggcctgcctgctacagctgggccgatcacttacactggcaagtcctggatgctcccgggggg

SEQ ID NO: 62962 - DNA, 871 bp, Homo sapiens
gtgctggaattctggggggagtcgaggtcattggtggaggtggagcttggctatataccaagtgaggagtacctgcagcctggggaggatgtggcattggatggcttattggtggtggaggaggtgggggtggtgcataatgttgctgtggaggcataatatgatgagggtgcgataccactggttgaccctgatattcaggatgatggtgagcaggtgctggggcaggaggtggtggttctctatcacctgaatttgagtcatcctgaatagggacggttattaaattgctgtgttttcttgttgaaatacgaaaggtttcctgactgaccgatcgaggtggaggtggagccatggacaattctgctggaggagcacgaatatcctcatgtggctgattatagtgctcatgtggcacatgttgcaaaggaggtggtggcatcatgatgtgctgctttggcggaatatggctcatatggtgcttgtctggtggcattataaaacgctcagggatttcagttggtggtggggcaataggaggatgaacattttcaagtgaagcacgggtaacaggttttccagctctcatatggcgatggttgatatgagcctgtaagtctctctgagacaaatatgttctcttgcacccttgaacaatgctacacatgaagagagaacctcgtgtacactgctcaattcgctgcacaggatcactacagcctggacacatcttatctccctttttttcatgtaaaatagcacagtcatagcaaaaaacatgcttgcatgggatcattctcccatagattttaataggctatccacacttgtcacagacacgaaccggtgaatcatccttttcacctaagat

SEQ ID NO: 62963 - DNA, 1504 bp, Homo sapiens
ttcggcacgaagcgtgtctcggggtggacgatgttatttgaaaagttacaggacagattttctgtgttaatggacatgagccatacattgagagggctgctggctactgaaagaaatataaaattttaaaatttctgaaatcatgcagttaacatctgcacacttcactatattttaagtttttgttaatataaaagaataagaaaacagaaaagtattactgttaaacaataatagagaaatgtatactttatttataaatttctccctctagctgatcatacagttgaccagttcagggtgcccgctgctggttggatgccaggcggaatgtcagggtgttctctggtgtctgttgtggctgtgggatccacggttactgggcggagccctgtggtggctgtggtgccatggaggggctgcgatcttctgtggagctggaccctgagctgactccagggaagctggatgaggagatggtggggctgccaccccatgacgcgagtcctcaagtcactttccacagcctcgatgggaagacagtggtgtgtccacacttcatgggcttactgctgggtctcttacttttattgactttgtctgttaggaaccaactctgtgtaagaggtgaaaggcagcttgcagaaacactgcattcacaggtgaaggagaaatcccagctcattggcaagaaaacagattgtagagactgaggcatctttaaaagatgtcagggtacagaaaaagtctttcaacacccccggctttgtagatgcctacaagaaggtgaatagcaccaacgagatgctgatggagaaatttaccaccctcgttcaagaactgaaagaagagacatcctccagactctccaggcaacaagaggagctggtagagatgctaacaacgctggaggccctgggagaggccatgagagccaccccgtcacaaggagcttttccacacctgccatgcagctgagagccaagccctgctgctctctcccccacgagggggctgggtcttagagcagcactgttcttttcccctccacccaggcctcccgagctgccaggctctgtgctcccacactgactccatctgaggggtccttgaggccagtggatctggagtaccccgcccctggcctggagttcctcctccttctcacgctgacactgcagccagctcctcaatgggcggtgcctccaaatctaaagaatatggaggtcctggagcacaccaagaaatgagggactttttctttgcagaaagtttgaattctgtcttaatgagacagaatgccatacttgagcacctcatcttttgctcaaattgaaatgtcatcgaactgtatttctcaagtcaaaggtctgtaaatatgatttatgtattaatctcctaagtgaacaatttatattttatcctctacataattatcgtattatgctttaaatatatatttagtttatcaataaagacattcagtactcaatagcaaaaaaaa

SEQ ID NO: 62964 - DNA, 1406 bp, Homo sapiens
  misc_feature (1)...(1406): n = a,t,c or g
ttttttttttttgcagctgcggagcgactttattgtcttctccttcgacagcttcgttgtacatagctgggcccccgaggccctgactgtccctgggaaccaagccacgtggggtgaagctactttgaaacctcacccacagttcacacgtggtgaaagagaaaatctagcaaagtaaatccaacaacaacccaaattaacagtattattaacttcctaccccaagctggctctcccccaggccctgaactggctcaggaaggaggcaggaatgagctgaccgagacaaggcatcctccacccacacatcccatcttctgagtggtcccagagctgtgcgccacccctgtgggacaatcaggcactcctgggtctctaccagctgtgatgagacgtacaagaggagggtctgagcccagaataaacaagagcatcctgaggctggagaggcaggcccagtgtgcccggaccaccctgctctgcctgagaggatgggctgggttccagctggcccggccgccacctagtgactgcttgggacagtggagatgatgacaggatgcccactcgccctaggcagtcagaagcggggtacacacaaacactctagaagccacacttagcaggaattcccagtcttccggcccaggggagggtgccaccagctcaggcagccctcaagaggaggccgggagcaacttctccagggccttcttctgcttctcggtggctgcagccagggcctcaaccagcttctcctcgggcatcatgttgagcaccttgagggcaaagaggagctggcacttagccgtgctcacgaaggcgttgctcaggaagttggggaagcctccgactcggtccttctgggtgtacagcgggacccgcacgaggcccagcacctgcgcagacaggaggtaggggttggggccaggcctgccacacaatggcacctccagcaggaggggcctggaagctatgaggccagggtatgagcagccagctttgccaaggacttaatgggagacccacgcagggcctggcagaagccagccagctccctcggagcagtgcagccccctcctccccaagcaagtgtggaggctgaccccatgcactcccccccctcgtacccaggccaccccaccccggggtccgcaccccatgctccccccgtccacccaacgaagcctgaacacccgcagtccagcccttccagaccacaaagtacaaatcccaagagccttcacgcccaacatgaggttcccaagttttacaacccccgctgtgctcaagtttcccaactccccaaacaatccccgctcctcccccatcccttcctccccaccgatcccactcccgaattcnccgcncttcctatgatctcagttggtttctatggnggccct

SEQ ID NO: 62965 - DNA, 879 bp, Homo sapiens
tttcgtcccggcggtcacgggaatatccgtcgcgccgagaacgctggttagtcttgtttcgggttccggctgcgttgggcttgcgtgcggctcgctaagactatggcgtccgggcctcattcgacagctactgctgccgcagccgcctcatcggccgccccaagcgcgggcggctccagctccgggacgacgaccacgacgacgaccacgacgggagggatcctgatcggcgatcgcctgtactcggaagtttcacttaccatcgaccactctctgattccggaggagaggctctcgcccaccccatccatgcaggatgggctcgacctgcccagtgagacggacttacgcatcctgggctgcgagctcatccaggccgccggcattctcctccggctgccgcaggtggcgatggcaacggggcaggtgttgtttcatcgttttttctactccaaatctttcgtcaaacacagtttcgagattgttgctatggcttgtattaatcttgcatcaaaaatcgaagaagcacctagaagaataagagatgtgattaatgtattccaccacctccgccagttaagaggaaaaagcgaccagctacatttaccaaagcctgggtgatgtggagtggtacatagagatgaagctgtcgtcatggcaacagactccaagccccctgatccttgatcagaactacattaacaccaaaaatcaagttatcaaagcagagaggagggtgctaaaggagttgggattttgtgttcatgtcaagcatcctcataagatcattgttatgtatttacaagtcttagaatgtgaacgtaatcaaaccctggttcaaactgcctgggtagtccatgatggaattacatgaatgac

SEQ ID NO: 62966 - DNA, 497 bp, Homo sapiens
gcggccgcgggacggggtagtgagcgcgtcacttcctgccgctgccaggcgcgtcctcccgcgcgctatgacggccagcgcacagccgcgcgggcggcggccaggagtcggagtcggagtcgtggtgaccagctgcaagcatccgcgttgcgtcctcctggggaagaggaaaggctcggttggagctggcagtttccaactccctggaggtcatctggagttcggtgaaacctgggaagaatgtgctcaaagggaaacctgggaagaagcagctcttcacctgaaaaatgttcactttgcctcagttgtgaattctttcattgagaaggagaattaccattatgttactatattaatgaaaggagaagtggatgtgactcatgattcagaaccaaagaatgtagagcctgaaaaaaatgaaagtaagagaattatatataatcatgcatttttctttcaggagagcaagtggtctggaggaatattacagtaatgtt

SEQ ID NO: 62967 - DNA, 1018 bp, Homo sapiens
tatccgcagcttcagcttccgccgcctcttcagccctcggcgccgccgcctgacccgcaggccgccgcggccgcaagagcccatgagggcgcgggcaccgccgccgcctccgcggcgtcgccgtcgtcccggagcgccccgagctggcgcgggcatggccgcggcatgagcgtggagccgccgccggagctggaggagaaggcggcgtcggagcccgaggcgggagccatgccggagaagcgcgcgggcgcgcaggccgcggggagcacctggctacaaggctttggcccaccaagtgtgtaccatgctgctattgtcatcttccttgaattctttgcgtggggccttttgacaactccaatgttgactgttctacatgaaacattttctcaacacacattcctcatgaatggtctcattcaaggtgtaaagggcctgctctcttttttgagtgccccactcattggtgccctgtctgatgtgtgggggaggaagccctttctcctcggcactgtattctttacctgcttcccaatcccactgatgaggatcagcccatgtttatgcaaataccgtatacgtgataaacgtccctacaacatgatctttggaatgaactaagacaaaggaaactctgaggaaggaccatggcctgagaggtggaattcatccttccgaggactgagatgaggacggaaaatgaaccatcggggggattgacggtgaagatgctaatacctgcccagcatcgaccctagtgcgggtcccaagaccatccccctgtgcaggctccaccaccgctgtgctaactggaccgcggcagaagagtgggtgtgtgccaggtttctgctgggccctgcagctcctccccccagccccatgtgatgtgcccctggccattgacactcagttcgagggaaggcactggggtgtacactcaaagacctaaacccagggtgggtgcggtggctcacgtctgcaatcccagcactttgggaggctgaggcgggtggatcac

SEQ ID NO: 62968 - DNA, 1574 bp, Homo sapiens
ggaagacatcctgagcgatgaggtcaacgtggcccgtggtgtggccagcctctttgccggacgctctgtggcctgtgtggacagaaagggctctggacgctactctatctacattgccaattacgcctacggtaatgtgggccctgatgccctcattgaaatggaccctgaggccagtgacctctcccggggcattctggcgctcagagatgtggctgctgaggctggggtcagcaaatatacagggggccgaggcgtcagcgtgggccccatcctcagcagcagtgcctcggatatcttctgcgacaatgagaatgggcctaacttccttttccacaaccggggcgatggcacctttgtggacgctgcggccagtgctggtgtggacgacccccaccagcatgggcgaggtgtcgccctggctgacttcaaccgtgatggcaaagtggacatcgtctatggcaactggaatggcccccaccgcctctatctgcaaatgagcacccatgggaaggtccgcttccgggacatcgcctcacccaagttctccatgccctcccctgtccgcacggtcatcaccgccgactttgacaatgaccaggagctggagatcttcttcaacaacattgcctaccgcagctcctcagccaaccgcctcttccgcgtcatccgtagagagcacggagaccccctcatcgaggagctcaatcccggcgacgccttggagcctgagggccggggcacagggggtgtggtgaccgacttcgacggagacgggatgctggacctcatcttgtcccatggagagtccatggctcagccgctgtccgtcttccggggcaatcagggcttcaacaacaactggctgcgagtggtgccacgcacccggtttggggcctttgccaggggagctaaggtcgtgctctacaccaagaagagtggggcccacctgaggatcatcgacgggggctcaggctacctgtgtgagatggagcccgtggcacactttggcctggggaaggatgaagccagcagtgtggaggtgacgtggccagatggcaagatggtgagccggaacgtggccagcggggagatgaactcagtgctggagatcctctacccccgggatgaggacacacttcaggacccagccccactggagtgtggccaaggattctcccagcaggaaaatggccattgcatggacaccaatgaatgcatccagttcccattcgtgtgccctcgagacaagcccgtatgtgtcaacacctatggaagctacaggtgccggaccaacaagaagtgcagtcggggctacgagcccaacgaggatggcacagcctgcgtggaaagaaccttgctacttggtctctgcaatctccttggaaaatagaatgctcctgtagccagaacactctttggaaatgatgtaacgccacagaatatgctcacgaccagcctcagtagtgaaggcttgttataaaacatagatctattcttcatggggaaaaaaagtcatcccaggatataataaaattacacttaagaatgcagcaaccctttttagaacatat

SEQ ID NO: 62969 - DNA, 1120 bp, Homo sapiens
aaatttgcaccgcgctgcaggcgcggaggccaggagctgcgcaaggaggcggaggaggaaactgaggcatgaaaaatgcctcacagaagagggttagggacacctccaggagcagagggagtttcaaccccaccacctcctcacccgggaagttggatctgcctccactccacagaatgtgagagcacccagccctgacagcattaaggagccccttcctgcattcctagagaagtacggatacctcaatgaacaggtccccaaagctcccacctccactcgattcagcgatgccatcagagcgtttcagtgggtgtcccagctacctgtcagcggcgtgttggaccgcgccaccctgcgccagatgactcgtccccgctgcggggttacagataccaacagttatgcggcctgggctgagaggatcagtgacttgtttgctagacaccggaccaaaatgaggcgtaagaaacgctttgcaaagcaaggtaacaaatggtacaagcagcacctctcctaccgcctggtgaactggcctgagcatctgccggagccggcagttcggggcgccgtgcgcgccgccttccagttgtggagcaacgtctcagcgctggagttctgggaggccccagccacaggccccgctgacatccggctcaccttcttccaaggggaccacaacgatgggctgggcaatgcctttgatggcccagggggcgccctggcgcacgccttcctgccccgccgcggcgaagcgcacttcgaccaagatgagcgctggtccctgagccgccgccgcgggcgcaacctgttcgtggtgctggcgcacgagatcggtcacacgcttggcctcacccactcgcccgcgccgcgcgcgctcatggcgccctactacaagaggctgggccgcgacgcgctgctcagctgggacgacgtgctggccgtgcagagcctgtatgggaagcccctagggggctcagtggccgtccagctcccaggaaagctgttcactgactttgagacctgggactcctacagcccccaaggaaggcgccctgaaacgcagggccctaaatactgccactcttccttcgatgccatcactgtagacaggcaacag

SEQ ID NO: 62970 - DNA, 2556 bp, Homo sapiens
  misc_feature (1)...(2556): n = a,t,c or g
agcggccgcggggccccggacaagggtccgcagagctgcagccttcgagggccagccctctccgagtccggggctgggtcccaccagtgacaaggcggcagccccgcgcacaccaaagagaaggcggctgtggcggcagcggcagccccagccatgctgtgttatgtgacgaggccggacgcggtgctgatggaggtggaggtggaggcgaaagccaacggcgaggactgcctcaaccaggtgtgcaggcgactgggaatcatagaagttgactattttggactgcagtttacgggtagcaaaggtgaaagtttatggctaaacctgagaaaccggatctcccagcagatggatgggctagccccttacaggcttaaacttagagtcaagttcttcgtggagcctcatctcatcttacaggagcagactaggcatatctttttcttgcacatcaaggaggccctcttggcaggccacctcttgtgttccccagagcaggcagtggaactcagtgccctcctggcccagaccaagtttggagactacaaccagaacactgccaagtataactatgaggagctctgtgccaaggagctctcctctgccaccttgaacagcattgttgcaaaacataaggagttggaggggaccagccaggcttcagctgaataccaagttttgcagattgtgtcggcaatggaaaactatggcatagaatggcattctgtgcgggatagcgaagggcagaaactgctcattggggttggacctgaaggaatctcaatttgtaaagatgactttagcccaattaataggatagcttatcctgtggtgcagatggccacccagtcaggaaagaatgtatatttgacggtcaccaaggaatctgggaacagcatcgtgctcttgtttaaaatgatcagcaccagggcggccagcgggctctaccgagcgataacagagacgcacgcattctacaggtgtgacacagtgaccagcgccgtgatgatgcagtatagccgtgacttgaagggccacttggcatctctgtttctgaatgaaaacattaaccttggcaagaaatatgtctttgatattaaaagaacatcaaaggaggtgtatgaccatgccaggagggctctgtacaatgctggcgttgtggacctcgtttcaagaaacaaccagagcccttcacactcgcctctgaagtcctcagaaagcagcatgaactgcagcagctgcgagggcctcagctgccagcagacccgggtgctgcaggagaagctacgcaagctgaaggaagccatgctgtgcatggtgtgctgcgaggaggagatcaactccaccttctgtccctgtggccacactgtgtgctgtgagagctgcgccgcccagctacaggtaggggagtcagctgcccacttttgcctgcagcctcacctatccctcctcttaacggggagtaggagccaggtactggctcgctaatgcacagacggggaatgcccatcttcacccggaaagggtctttgtatttggtgacctaaaaggcattgccctttagaaacattttagattagcatactattttcaacaacataattactccaaattatgcagtgttttcaagttctgaaaatgaggctgagattcctgggtaacatatctagttagcggcttacctgaggacaagaatccaggcctcctgaggcctggcccagggctgcttcctctatttcaagttgcctccctttttctgacacttaggaggatggtctttattacttaagatatttgggaaagaatacttctcaattatccatggatgggttgttgactctgtgatattggtgattaatttccttttatgattgcaaatgcctcaagggcatatgggttggctgttatttattagcaagtcaaactaattttaatattaacacgaaaaagagaactcacatatagttttcttcctttcttgcatgaagaagaattttaaatttcctcttacaagttttttcaatttgtttttatttctcagatgtgtttgccaaatgtcactgtggttttatgtaaaactggttctagataatacttagtccttcagaagctgctaatttcagagctaataagaccaaatgacccctgtgtcctttccccagaagcagtcataggcttgtctttttctgcccacctattctgactctcatccctaagtctctcctgagggctgatgatgggcacgggctttctgagaagtcagccaggaatgtggagctgccacctacggctagaagcagagccaccctccctggccatgtgggcatcagcccagaaatgttggcctgagtcagtcagctgagctaaggacacacaatttcaagaagggtctcctgcattgctgcctgaagtgttatagtctactcatgtagagaccacattctgcacagaaagacgtcttcagtaattgctttattcaatgtaccttctttagcggttcactaaaaatgtaattaatttccttcaggttatactatggcataanaattatttttt

SEQ ID NO: 62971 - DNA, 897 bp, Homo sapiens
ttttttttttttgtgactcataaagtgctctttattggcatctgaaaaagaagtgcctcagccttcaaggctgggacagaagttggggaggagctgctctgccccaggctcaataccaatagaccttcttgtatttccgggtctccttgatccccatggcctccatcacctcctcctgcagtgtctttagacagggcacataggttctttctaaagcatcttccactgatgtgtctttggggccatcaatccacgtttcagggacgatgccatcagctctgggaaattcgggtttagggataattctccctgatcgtgtggagactcgtacccgctctcctgcttcagtaaatctccactcgatctcagtgggtttcctgtccataggatccacaagtttgacctggcggtggagcaagggggcttcactagggatcatggttccccggtaatccatggtcttgccaatgtagcggtaatgtgtgttcagccctcccacgaccacccagtttcgctgccggataacttgaaccactttgccctgcttcccggcatccttgccttctaggatctccaccgtgtccccacagaacagataccagtcttcatcagagatgggttccacaaccactgggcgccgcctgatccatggggggttcttcctcttgtctgcaacagagcctggggggctcatcccatagcggtaatgggggggcagagtgaccttggatgccaaggccagcagggcagaaagacgcatgcctggaggttgtaagaaatccctttgccagcaaaacgctcgaaaccttccttgtcagctctgcctctcggacgggcacctctagggcgggcggccctcacctccactttccgcggcacttcggattttcctcgtgc

SEQ ID NO: 62972 - DNA, 1382 bp, Homo sapiens
ggaattccagaggggagcagttttttctttggagggacaccaatgaaacatgtgcctttgaagcctgggtctcctttggatctgtggcagcagacagctccatttggcaaaggttaagatgagacattaacaatcttccacccccttcttttagagccctggcaagaccagtgaattgaatgaaggaattatacctagaggtacatacctgagcctgggttgctgctatgagataaaacaccattaatgccttctctttttccttttcaaacagttggaatttggagctggagacctacaggggcctttgttcggtctcaagctgttccgtaatctcacaccaagatgctttgtgacaacaaactgtgctctgcagttttcatcccgtggaatccgacccggcctgaccactgtcctagctcggaacctagacaagaacaccgtgggctacctgcagtggcgatggggtatccagtcagccatgaacactagcatcgtccgagacactaaaaccagccacttcactgtggccctgcagctgggaatccctcactcctttgcactgatcagctatcagcacaaattccaagatgacgatcagactcgtgtgaaaggatccctcaaagcaggcttctttgggacggtggtggagtacggagctgagaggaagatctccaggcacagcgttttgggtgcagctgtcagcgttggagttccacagggcgtttctctcaaagtcaagctcaacagggccagtcagacatacttcttccctattcacttgacggaccagcttctgcccagcgccatgttctatgccaccgtggggcctctagtggtctactttgccatgcaccgtctgatcatcaaaccatacctcagggctcagaaagagaaggaattggagaagcagagggaaagcgccgccaccgatgtgctgcagaagaagcaagaggcggagtccgctgtccggctgatgcaggaatctgtccgaaggataattgaggcagaagagtccagaatgggcctcatcatcgtcaatgcctggtacgggaagtttgtcaatgacaagagcaggaagagcgagaaggtgaaggtgattgacgtgactgtgcccctgcagtgcctggtgaaggactcgaagctcatcctcacggaggcctccaaggctgggctgcctggcttttatgacccgtgtgtgggggaagagaagaacctgaaagtgctctatcagttccggggcgtcctgcatcaggtgatggtgctggacagtgaggccctccggataccaaagcagtcccacaggatcgatacagatggataaactgccaagaaccagatttttcaaaaggccgcaaaaaatcttttcctggaagtctaca

SEQ ID NO: 62973 - DNA, 463 bp, Homo sapiens
aatagaaaaccttgataaccctttccagtgtgcggaattccctgggattccgaggtgtttccattcggtgatcagcactgaacacagaggactcaccatgtttttttggctgagctgggttttccttgttgctattttaaaaggtgtccagtgtgaggtgcagctggtggagttaggaggaggcatgatccagcctggggggtccctgagactctcctgtgcagcctctgggttcaccgtcagtagcaaatacatgagctgggtccgccaggctccagggaaggggctggagtgggtctcagtcatatatagtggtggtagcacatactacgcagactccgggaagggccgattcaccatctccagagacaattccaagaacacgctgtatcttcaaatgaacagcctgagatccgggacacggccgtgtattattgtgcgagatctgactacggtggtaacg

SEQ ID NO: 62974 - DNA, 2231 bp, Homo sapiens
  misc_feature (1)...(2231): n = a,t,c or g
gcggccgcagacaaagggcggctcgcgcccgggccgccacgctctcgggctctgcctcgggaaggagacttggtctgaaagatgccacattcctgcagcctctcttggtgcagtggaatacagtcttgggcgaggtggcgtggatgagctggtgaaagaggatgctgcccacatccaaaggctccagaggatcctgggcctgggcagctgagctcccctgcatttgggaacctcaggcgtaacttgggtgtagagctcatgaaaggtgcttgtgtttctccagctttttttcaccagtgccttaccagactgggctcaggttttgggaattctaagggtgagctgggtaggaaacagggagagggtaggaaagaagcccctggggatgccttcccagaattcatttgatggggatccctggcataactgcttgggaacacagaaagaggctgtgacacagctgagcttttggagcattttaaggagctccagctccagcaaaacaaactcttgcatttcagcccagaaagagcctcttgtaacaaagtattccaaaggggagagtttctgcatcttttactttgcagtccactatggtagaaaacttgacattccatagataatgatactgggttttctttccaagatgccagctttaaaagaaatatgagccattctaagctttaagaagggttcaggaaacacaggaattagtagacagccctcccaatgcaggttaagacgacagcctgcgcccccaactagcacagctcagcgagcatgaccatatgccattctcgtctccagagagctggtggcagtgacctcactaggagaaaacacatccctcagccgtgggacttgacagaatgaggtgcgcgagggaggccgctagccgagacttggcctttcctgactgcccctgtgttacctgggcagctccagatcactgagcccacaatggctgagaagggtgactgcatcgccagtgtctatgggtatgacctcggtgggcgctttgttgacttccaacccctgggcttcggtgtcaatggtttggtgctgtcggccgtggacagccgggcctgccggaaggtcgctgtgaagaagattgccctgagcgatgcccgcagcatgaagcacgcgctccgagagatcaagatcattcggcgcctggaccacgacaacatcgtcaaagtgtacgaggtgctcggtcccaagggcactgacctgcagggtgagctgttcaagttcagcgtggcgtacatcgtccaggagtacatggagaccgacctggcacgcctgctggagcagggcacgctggcagaagagcatgccaagctgttcatgtaccagctgctccgcgggctcaagtacatccactccgccaacgtgctgcacagggacctgaagcccgccaacatcttcatcagcacagaggacctcgtgctcaagattggggatttcgggttggcaaggatcgttgatcagcattactcccaacaagggttatctgtcagaagggttggtaacaaagtggtaccgttccccacgactgctcctttcccccaataactacaccaaagccatcgacatgtgggccgccggctgcatcctggctgagatgcttacggggagaatgctctttgctggggcccatgagctggagcagatgcaactcatcctggagaccatccctgtaatccgggaggaagacaaggacgagctgctcagggtgatgccttcctttgtcagcagcacctgggaggtgaagaggcctctgcgcaagctgctccctgaagtgaacagtgaagccatcgactttctggagaagatcctgacctttaaccccatggatcgcctaacagctgagatggggctgcaacacccctacatgagcccatactcgtgccctgaggacgagcccacctcacaacaccccttccgcattgaggatgagatcgacgacatcgtgctgatggccgctaaccagagccagctgtccaactgggacacgtgcagttccaggtaccctgtgagcctgtcgtcggacctggagtggcggcctgaccggtgccaggacgccagcgaggtacagcgcgacccgcgcgcgggttcggcgccactggctgagaacgtgcaggtggacccgcgcaaggactcgcacagcagctccgcctcgtgccaagctggtcgtaatggtgtcagtcggtatcagtntnntctcccct

SEQ ID NO: 62975 - DNA, 940 bp, Homo sapiens
cgttgctgtcggccatggcggcgaaggtggacctgagcacctccaccgactggaaggaggcgaaatcctttctgaagggcctgagtgacaagcagcgggaggaacattacttctgcaaggactttgtcaggctgaagaagatcccgacatggaaggagatggcgaaaggggtggctgtgaaggtggaggagcccaggtataaaaaggacaagcagctcaatgagaaaatctccctgctccgcagcgacatcaccaagctggaggtggacgccatcgtcaacgccgccaacagctccctgctcggaggcggtggcgtggacggctgcattcatcgggccgccggccccctgcttaccgacgagtgccggaccctgcagagctgtaagactggcaaggccaagatcaccggcggctatcggctcccggccaagtacgtcatccacacagtggggccctctcgcatacggggagcccagacgccagccagtgctgccgacgtccgcagctgctacctgagcagtctggacctgctgctgcgattgacgcgtccgcttcggtgggcgttcccctgcatctccaccggcgtgtttgggttacccctgtgtagcggccgccgagatcgtgctggccacgcttgcggagagtggcttgggagcagcacaagggacaaggtgggaccggcttgattcatcttgcgtgttcctcgagaaggacgaggacatctaccggagccggctcccccactacttccccgtggcctgaggctcccgcagcccaccctgaccgggactgacccgccttcgggaccccgctcccagctctgagaggtcgccaaagcctgcagcctggcctgggcctggccaccccttctttccctccgcgccccgcccccgaggagcctaataaagatctcgttgtggcaaaaaaaaacctcgtgccg

SEQ ID NO: 62976 - DNA, 869 bp, Homo sapiens
cgcacaccccctttgcctttagcattttcctcctctcctctaattgcgtggcgtccccagatgaatggtgctggaaggaaaccctgaagtggggtccccccgaacctcagacctccagcaccgggggaacaagggctcttgcgttctctcctctcccggtgaagatgcgcaccaggcgaggagcccatcaagtatggtgaactcatcgtcctgggctacaatggttgtctggcaagtggggacaagggccgccgcgaacgcctggcactgagccgccggtcgcacgccaacggggtgaagccagacgtcatgcaccacatctccacgccgctcgtctccaaggcactgagtaaccgtggtcagcacagcatctcgtatacactgtcccggagccactcggtcatagtggagtatacacatgatagcgacacagacatgttccagatgggccgctccacagagaacatgattgacttcgtggtatcagacacgtcccctggaggaggggctgccgagggcccttctgcccagagcaccatctcccgctatgcctgccgcatcctctgtgaccgccggccaccctatactgcccgcatctatgccgctggcttcgatgcctctagcaacatcttccttggagagcgagcggccaaatggcggaccccaaatggcctgatggatggactgaccaccaatggagtcctggtgatgcacccggcaggcggcttctccgaggactcagccccgggtgtctggcgggagatctcggtctgtgggaatgtgtacacattgcgggacagccgctcagcccagcagcggggcaagctggtggaaaacgagtccaacgtgctgcaggacggctctctcat

SEQ ID NO: 62977 - DNA, 2081 bp, Homo sapiens
tttcgtgcggctgcggcggcggcgggacccccaggcctcctccggggtatgaaaatcggcagtgggttcctgagtggcggcggaggtaccggcagtagcggtggtagcggctccggcggcggtggtagtggcggcggcggcggcggcggcagcagcggcaggagggcagagatggaacccacctttccccagggtatggttatgttcaaccaccgtcttcccccggtcaccagcttcacccggccggcggggtcggccgcccctcccccgcaatgcgtgttatcctcctctacctccgcagccccggccgctgagcccccccctccgccagccccggacatgactttcaagaaggagccggcggcgtcagccgcggccttcccctcgcagaggacctcctgggggttcttgcagtctttggttagcatcaaacaggagaaacccgcggatcctgaggagcagcagtcccaccaccaccatcaccaccaccactatggggggctgttcgctggagctgaagagaggtctccaggcctaggaggcggtgaaggggggagtcacggcgtcatccaggacctcagtattctccaccagcatgtccagcagcaaccagcccagcaccaccgtgacgtattactcagcagcagtagcaggactgatgaccaccatggcactgaggagccaaagcaggacactaatgtcaaaaaggcaaaaaggccaaagccagaatctcagggaatcaaagccaagaggaagccaaagtgcatcttccaaaccgttctttggttggagatggagaaggtgccatcctctccccaagtcagaaacctcatatctgtgatcactgtagtgctgctttccgaagctcctatcacctgcggagacatgtcctcattcatacaggagaaagacctttccagtgcagccagtgtagtatgggtttcattcagaaatacctacctacagagacatgagaaaattcatagtagagagaagccatttggatgtgatcagtgcagcatgaagtttattcagaagtaccatatggagagacacaagaggacacatagtggagaaaagccatataagtgtgacacttgccaacagtatttttcaaggactgatagattgttgaagcacaggcgcacatgtggtgaagtcatagttaaaggagccactagtgcagaacctgggtcatcaaaccataccaatatgggtaatctggctgtgttgtctcagggaaatacaagttcttcaaggagaaaaacaaagtcaaaaagcatagctattgaaaataaggaacagaagaccggtaaaacaaatgaatcgcaaatttcaaataatataaacatgcagagttactcagtagaaatgcctaccgtgtcttccagtggaggcataattggcactggaatagatgaactgcagaagagggtgccaaaattgatctttaagaaaggaagcagaaagaatacagataaaaactaccttaactttgtgtcaccattaccagacatagtaggacagaaatccttgtctggaaaaccaagtggctcacttggcatagtatcaaataatagtgtggagaccattggtcttctccaaagtacaagtggcaaacaaggtcagataagtagtaattatgatgatgccatgcagttttcaaagaaaagaagatatttaccaactgccagcagcaacagtgccttttctataaacgtaggacacatggtctcccaacagtctgtcattcagtctgcaggtgtcagtgttttggacaatgaggcaccattgtcacttattgactcctcagctctaaatgctgaaattaaatcttgtcatgacaagtctggaattcctgatgaggttttacaaagtattttggatcaatactccaacaaatcagaaagccagaaagaggatcctttcaatattgcagaaccacgagtggatttacacacctcaggagaaacactcagaattggttcaagaagaaaatttgagcccaggcacccaaacacctttcaaatgataaaggcaagtatgttgcaagaatactccaaatacctccaacaggcttt

SEQ ID NO: 62978 - DNA, 484 bp, Homo sapiens
gcggccgccggcccgcaatggtgctaccctggttgctgctcgagactgcgcgcagggcggtcctcgggtccgcggaggctgcgctctgcgccatgaaaatgacagatgaaaatagaaaagtgtggctggtctgaaggtttgacgtcaataaagggaaactgccacaatttttatactgctatttctaaagatgtcacttataaggaacttaaaaacctgttgaattctaaaaatattatgttaattgatgttagagagatatgggaaattctggagtatcaaaaaatccctgagtctatcaatgtaccattggatgaagtaggtgaagctctacagatgaatccaagagacttcaaagagaagtacaatgaagtaaaaccatccaaatctgacagctagtgttttcttatttagccggagtgagaagcaagaaggccctggacacagcaatatctctgggctttcacagttactatgagaggtg

SEQ ID NO: 62979 - DNA, 439 bp, Homo sapiens
gaagagcagtcccaactgctttccgaggataccgttgttgccgagattgccaaattgctttggaggttttaactgaatctaagaaaagtccaaaatagatttgagactgtaaaaacagaaactgcaacatgggggattcagtgccaatgcatcaacaaaaaagacaaccacagttagtggaaggaaatcttcctgttttcgtgttccccacggagctcatattttatgcatatgatcagtcaacacataagcaagtgttgacactgtacaatccctatgagtttgccttaaagttcaaagggtgattcgtcatcgagatgttcgatcctgtcactatggtgtaatagacaaattccgtctccaagttttcgagcaaagccaaaggaaggcttttggaagaaaagaaggtggtgctactctttttcccttaacaaaaaga

SEQ ID NO: 62980 - DNA, 406 bp, Homo sapiens
tgggcacatttgtcttgttctggatcttaaaggaaaagctttcaactttccttgttgagtatgtcagctgtgggtttttcatatatgacctttatcgtgttgaggtgcgttccttctgtaccaaatttgttgggagttttactatgaaagaatattggattttgtcaaatgcttttttctgcctctaatgagatggtcattttttttccttcattccgttgatgtgttttacaacatttatagatttgtgtatgtttgactctccttgcatccctgagatgaataccacttgctaaagatgaatgatgttaaaaatgtgctgttagatttgatttgccagtgttttttttgaggacttttgcatttaggtttatcaggcatattagcctttagttgttttttttct

SEQ ID NO: 62981 - DNA, 1052 bp, Homo sapiens
gggggcctcccgaagaaaagggagccgcgcagcgcctacgggagtccggcggcagcagccggtaccggcaaccacgggcagctctcagggaatctccgtcgtgaggccagaggctccagtccccgcgagtccagatgcctgtccagcctccaagcaaagacacagaagagatggaagcagagggtgattctgctgctgagatgaatggggaggaggaagagagtgaggaggagcggagcggcagccagacagagtcagaagaggagagctccgagatggatgatgaggactatgagcgacgccgcagcgagtgtgtcagtgagatgctggacctagagaagcagttctcggagctaaaggagaagttgttcagggaacgactgagtcagctgcggttgcggctggaggaagtgggggctgagagagcccctgaatacacggagccccttggggggctgcagcggagcctcaagattcgcattcaggtggcagggatctacaagggcttctgtctggatgtgatcaggaataagtacgaatgtgagctgcagggagccaaacagcacctggagagtgagaagctgctgctctatgacacgctgcagggggagctgcaggagcggatccagaggctggaggaggaccgccagagcctggacctcagctctgaatggtgggacgacaaactgcacgccagaggcagctccaggtcttgggactccctgccgcccagcaagaggaagaaggcacctctggtttctggcccatacatcgtgtacatgcttcaagagatcgacatcctggaggactggacagccatcaaaaaggctagggcagctgtgtcccctcagaagagaaaatcggatggaccttgaccctgctgttcacagccagggggaccctcagagcagctggcactgcacccaggattctcgtcttcctcctgcagacaggcggacccacaggcccctcagggtctgcccagccaggctcctgtggtgctgctgggccctcccactccatctggcactggtctggactcctcctctgcc

SEQ ID NO: 62982 - DNA, 956 bp, Homo sapiens
cccacgcgtccgcttttttccccaggcttgccatggctagacgaggggctcggcagcgcctgaagggcagcggggccagcagtggggatacggccccggctgcggacaagctgcgggagctgctgggcagccgagaggcgggcggcgcggagcaccggaccgagttatctgggaacaaagcaggacaagtctgggcacctgaaggatctactgctttcaagtgtctgctttcagcaaggttatgtgctgctctcctgagcaacatctctgactgtgatgaaacattcaactactgggagccaacacactacctcatctatggggaagggtttcagacttgggaatattccccagcatatgccattcgctcctatgcttacctgttgcttcatgcctggccagctgcatttcatgcaagaattctacaaactaataagattcttgtgttttactttttgcgatgtcttctggcttttgtgagctgtatttgtgaactttacttttacaaggctgtgtgcaagaagtttgggttgcacgtgagtcgaatgatgctagccttcttggttctcagcactggcatgttttgctcatcatcagcattccttcctagtagcttctgtatgtacactacgttgatagccatgactggatggtatatggacaagacttccattgctgtgctgggagtagcagctggggctatcttaggctggccattcagtgcagctcttgggtaagaaactaacagttctcctcccatatatcgctgggcatatagtaaatcttaatgttggattagctccatattgtctgcatagaatctgaagttaatcaattgggctttcaaagattctgggaaatggaagaatatttctcttagcacttactattatgattaattctaataagaataatgaccattgagcatctgctatgtgttaggcacagtgaaaccc

SEQ ID NO: 62983 - DNA, 2381 bp, Homo sapiens
ttttttttttttcatttcaacaggaaacatttatttcaaaacatgaaggtggttatccttccatgagtttgaagtacaaaggcaggctcacggtgtcgtcagaattcagaacgatggtcgtggggctgggggtgctgggaggggctgggcatggttggctttgtgatctggggtctggtgtgttccatctctgaatctctctcgagctgcactctttcttaatacattttcataagtttaaccaaaaataaaacgaggatgcgaagcttgcttgggttgttaagcctagggaaattatccagccatgagccctggcccagatgcttctagaagcctggagggaactgagaactttccaagtggagggccgcagaggcaaggccctgaggtgggagcacacggctgttcgtccctagctctgaagggggtgccctggtcggaatcagtgctgggtgcagcgaaagccgatctcacccgctccgcagggtgttcagcctgccagcagggggccagctggtcctcctgggatatggcacggacccagcagctctgtctgaaatcataatggcggaaccaagggccctctacgtccaggtccgttgggaggcggggcatggagttccactgcaggaatctccaggaaccctgaggtcctccctgagccagggccgggctgggcacaccctgagtgcccacagggtaggtgtcttcccggacagccccaccaggacagggtgtggaagaacgaggtgcccgtggcggggaagctgaccaaatgggccgcgggaaccgggctggtgggcctggaggggcctgcctgtcccccttgcagagggtcttcccgccacgtgaagccggcacaggcctggatgccgacgacccttgctcgggtttggctgggggttgcaggtccccctgctttcttgttagtttcttcatagaggccctaagatgcttgagcacagtgtcctcatccctggcccaggtatcaacgaaccggttgcaaaaacgtgcccacgggccacacctggacgtcttcgtgaggcgcttctgctgaaccttaaaggcgattcttgttatcggcatcaacgcctgttcgccttctaccagatacacgtcccacaggcgcagggtgagcccgagagagatcccgtcaatcaatatccggatgaggcagcctaacggggaacactgcccacatagatctttcttgtcctgatgccccatggtcttgggttgtgacgtggctaccacatgctcctgttggtcttggagcccctggacggtcccgccatttgggctgtgaaatccctgcagggagtgcctctcactggccagcagctgcaccagtgcccagaatgcatcctcctcaggaagatagaggaggaacaaggcggcgatgtggctcaggtccctgcagtagcccacctccgggttatactcctcatatgccaggaggatgtggagtagttcccgctgcttggttccgtatcgatccctgaagaatatatgcttccttaatgtcccgcttacgtcccggtcgatgcgctggatgtgctcagatgacctcttgcccttctccttcatgatctggtatcttccggggtttttcaacttcatttcctcagtgttcaggaggactgaccacatcgggccccggatgttcatgggcattcccttgtacgctcgatctatgagctttctgctgcttttgtatttctcccagtctcccagcatatccacccacttgctctttcggctgatctcccgccgaatttgcttcgcctcccgcgcagtcagaggaggcagctccgtctcactgtaaggcaacccaggcagagctgaggaactgcacggggcctggagcggccccagcctgggtgccgacccccagaaaggactggctctgtccctttccagctcagggctcagcccaggagaaggcacagggaagggaggacaagggccttcctgtggggctgactcccaggagcggcaggacctgggagaagaaggagtgtagggacagcctggccggggttactggggcccctggcgtggggggcggtcaggctgcccaatggggctgcccgtcctggactcgaggtggtgctttctgctggagctgagaaaggttagccctgagatgggatgggggccgcccagggtgggcgaccgggccctgacaggagtccctcagggagtgaccacatccccccgccagggtcaagggagcctgccctgagacctgcccggtgtactctggctgcaccaggggcccaccccacttgacagccccaaggcccttgcaggttctgacctcccagcatccacctgcctctccctgcacccgagccacacaccctgcgtttcagacgaaa

SEQ ID NO: 62984 - DNA, 1232 bp, Homo sapiens
caggagaccgccactcacgcggagccaatcggaactcgcggcggggttgctgggtcttccaggatcgcgcattagcggacgctggctacgggtggccgggcgggatgtaaccggctgctgagctggcagttctgtgtccccaggcttcggcccggccgccgccgcacataaactgcgaggaggagctttacgacttcccggtcttcggggccgggcgcagcaagggccagactctgcgctagcaggcgctgcgcgccaaccggccggcccctgtcgcagaaggtgcaaccgatcgcactgtcgcgcagaagctcctcaatggccagcgccagctgcagccccggctgcccactcgcctcacctgagcctgggtggaacaatccaaagttttaatcaaagaaggtggtattcagttgctgcttacaatagttgataccccaggatttggagatgcagtggataatagtaattgctggcagcctgttatcaattacattgatagtaaatttgaggactacctaaatgcagaatcgcaagtgaacagatgtcagatgcctggtaacagggtgcactgttgtttatacttcattgctccttcaggacatggacttaaaccattggatattgagtttacaaagcatttgcatgaaaaagtgaatatcatcccacttattgccaaagcagacacactcatgccagaggaatgccaacagtttaaaaaacagataaagaaatccaagaacataaagttaaaatatatgaatttccagaaacagatgatgaagaagaaaaaaaacttgttaaaaagataaaggaccatttacctcttgctgtggtgggtagtaatactatcattgaagttaatggcaaaagggtcataggaaggcagtatccttggagtgttgctgaagttgaaaatggtgaacattgtgattttacagttttaagaaatatgttgataagaacacacgcaggacttgaaagatgttactaataatgtccactacgagaactatggaatcagaaaactggcagctgtgacttatcatggagttgataacaagaagaataaagggcagctcactaagagccctctggcacaaatggaagaagaaagaagggagcaagtagctaaaattaagaagatggagatggagatggagcaggtgtttgagatgaaggtcaaagaaaaagttcaaaaactgaaggactctgaagctgagtctgcagaa

SEQ ID NO: 62985 - DNA, 971 bp, Homo sapiens
tttcgtgtggcaggggctgaggcactgagagaccggaaagcctggcattccagagggagggaaacgcagcggcatccccaggctccaggatctgtcacaactcgagaggtggaaattccggtttccctggcctagagctcccagtgctggctttggcatgatgggcacctggagggccgcactcccgttccagccaggctgagccttctgtcccctgcctctggggcctgggaaccccccttcttctttctcctgaatggcacccccgccctagaatccagacaccgagtttcccactgtggctggttcaagggtatgtgagagctccctggtgacagtctgtggctgagcatggccctcccagccctgggcctggacccctggagcctcctgggccttttcctcttccaactgcttcagctgctgctgccgacgacgaccgcggggggaggcgggcaggggcccatgcccagggtcagatactatgcaggggatgaacgtagggcacttagcttcttccaccagaagggcctccaggattttgacactctgctcctgagtggtgatggaaatactctctacgtgggggctcgagaagccattctggccttggatatccaggatccaggggtccccaggctaaagaacatgataccgtggccagccagtgacagaaaaaaagagtgaatgtgcctttaagaagaagagcaatgagacacagtgtttcaacttcatccgtgtcctggtttcttacaatgtcacccatctctacacctgcggcaccttcgccttcagccctgcttgtaccttcattgaacttcaagattcctacctgttgcccatctcggaggacaaggtcatggagggaaaaggccaaagcccctttgaccccgctcacaagcatacggctgtcttggtggatgggatgctctattctggtactatgaacaacttcctgggcagtgagccca

SEQ ID NO: 62986 - DNA, 726 bp, Homo sapiens
ccgtagagggtgagtcggtggcaggtcctgacggccggcgggtccttgggcggtggtcgccgtctttcatccttgctctccctgtctctggcttccgcgggggcgcgtagggggaggccggaccgggacctggagggcggggaggccgttccggaccccgtggagtatcccgctcgtgcgagtgtcctcggcgcaggtgtcctccccggcacatgtgtcccccccaggcgtaggtgtccccttggcacatgtgtccccacaggcacaaggtccttcctggtgcaggtgtccccttaacagtgtcttcccccacgccccaggcgctggtgtccttcctggcacaggtgtcccccctcggagcaggtgtccctccttggggcagatgtccctccaggcacaagtgtccttcctggcgcaggtgtcccctcggcgcaggagttctccaaggtgcaggtgtcccctcaagcacaggtgtccctcccaggcacaagtgtacttcctggtgcaggtgtcctcttgacggtgtccccccccaggcgcagttgtccttcctggcacaggtgtcccccctcggaccaggtgtccctcgtcggagcaggtgtccttctgggcacaagcgtccttcctggcctttaggaagctttcaaggtgcaggtgtcctccaaggtgcaggtgtcctccagcggagtgtcccctccgtgaggtgcctcccagcacaggtgttct

SEQ ID NO: 62987 - DNA, 776 bp, Homo sapiens
  misc_feature (1)...(776): n = a,t,c or g
tttcgttgcgagtgtcgctgctgaaggctgtggtggaccgggctggatcgcggattctgagctacattgcgggtttgggggtggatcttggatttgggggtggatcgcgggttgcgggggggatcgcggatttggggcggagtgggggtggaaaggccacgaggagccgccgcggctcanggagcgggtggtgggcgtctgagaagtcgccaccatgaggaagctcttcagcttcgggagacgcctgggccaggcgctcctggactccatggaccaagagtatgcgggtcgggggtaccacatccgggactgggaactgcggaagatccacagggctgccatcaagggcgacgccgcggaggtggagcactgcctgacgcgcaggttccgggacttggacgcccgcgacagaaaagacaggactgttctacatttgacctgtgcccatggccgtgtggaagtggtcaccctcttgctgagcagaagatgccagatcaacatatatgatagactaaacaggacacctttaatgaaggctgtacactgccaggaagaggcttgtgcattattctcctggaacatggcgccaatccaaacattaaggatatctacagcaacactgctctccattatgctgtgtataataaggggacttcactggcagaaaaactgctttcccaccatgcaaatattgaagcactaaacgaggngggaaacactccacttttgtttgctaaaaattctaggagacagcaaattgtggattttctgttgaa

SEQ ID NO: 62988 - DNA, 2540 bp, Homo sapiens
tttcgtggcgcgggagccgagaggtggcgcgggggtgccaccgttgccgcaggctggagagagattgctcccagtgaggcgcgtaccgtctgggcgagggcttcattcttccgcggcgtccctggaggactggagactgatgcatgagggggctacggaggcgcaggagcggtggtgatggtctgggaagcggagctgaagtgccctgggctttggtgaggcgtgacagtttatcatgaccgtgttcaggcaggaaaacgtggatgattactacgacaccggcgaggaacttggcagtggacagtttgcggttgtgaagaaatgccgtgagaaaagcaccggcctccagtatgccgccaaattcatcaagaaaaggaggactaagtccagccggcggggtgtgagccgcgaggacatcgagcgggaggtcagcatcctgaaggagatccagcaccccaatgtcatcaccctgcacgaggtctatgagaacaagacggacgtcatcctgatcttggaactcgttgcaggtggcgagctgtttgacttcttagctgaaaaggaatctttaactgaagaggaagcaactgaatttctcaaacaaattcttaatggtgtttactacctgcactcccttcaaatcgcccactttgatcttaagcctgagaacataatgcttttggatagaaatgtccccaaacctcggatcaagatcattgactttgggttggcccataaaattgactttggaaatgaatttaaaaacatatttgggactccagagtttgtcgctcctgagatagtcaactatgaacctcttggtcttgaggcagatatgtggagtatcggggtaataacctatatcctcctaagtggggcctccccatttcttggagacactaagcaagaaacgttagcaaatgtatccgctgtcaactacgaatttgaggatgaatacttcagtaataccagtgccctagccaaagatttcataagaagacttctggtcaaggatccaaagaagagaatgacaattcaagatagtttgcagcatccctggatcaagcctaaagatacacaacaggcacttagtagaaaagcatcagcagtaaacatggagaaattcaagaagtttgcagcccggaaaaaatggaaacaatccgttcgcttgatatcactgtgccaaagattatccaggtcattcctgtccagaagtaacatgagtgttgccagaagcgatgatactctggatgaggaagactcctttgtgatgaaagccatcatccatgccatcaacgatgacaatgtcccaggcctgcagcaccttctgggctcattatccaactatgatgttaaccaacccaacaagcacgggacacctccattactcattgctgctggctgtgggaatattcaaatactacagttgctcattaaaagaggctcgagaatcgatgtccaggataagggcgggtccaatgccgtctactgggctgctcggcatggccacgtcgataccttgaaatttctcagtgagaacaaatgccctttggatgtgaaagacaagtctggagagatggccctccacgtggcagctcgctatggccatgctgacgtggctcaagttacttgtgcagcttcggctcaaatcccaatatccaggacaaggaagaagaaacccccctgcactgtgctgcttggcacggctattactctgtggccaaagccctttgtgaagccggctgtaacgtgaacatcaagaaccgagaaggagagacgcccctcctgacagcctctgccaggggctaccacgacatcgtggagtgtctggccgaacatggagccgaccttaatgcttgcgacaaggacggacacattgcccttcatctggctgtaagacggtgtcagatggaggtaatcaagactctcctcagccaagggtgtttcgtcgattatcaagacaggcacggcaatactcccctccatgtggcatgtaaagatggcaacatgcctatcgtggtggccctctgtgaagcaaactgcaatttggacatctccaacaagtatgggcgaacgcctctgcaccttgcggccaacaacggaatcctagacgtggtccggtatctctgtctgatgggagccagcgttgaggcgctgaccacggacggaaagacggcagaagatcttgctagatcggaacagcacgagcacgtagcaggtctccttgcaagacttcgaaaggatacgcaccgaggactcttcatccagcagctccgacccacacagaacctgcagccaagaattaagctcaagctgtttggccactcgggatccgggaaaaccacccttgtagaatctctcaagtgtgggctgctgaggagctttttcagaaggcgtcggcccagactgtcttccaccaactccagcaggttcccaccttcacccctggcttctaagcccacagtctcagtgagcatcaacaacctgtacccaggctgcgagaacgtgagtgtgaggagccgcagcatgatgttcgagccggg

SEQ ID NO: 62989 - DNA, 1007 bp, Homo sapiens
gacaacaaagggccgcgggcggcgggcagtggtgtcccagtctcccggtgcttccctgaggctgaggcgcccggcctcccgcccgccgcgctccagatgaagtgtgagcactgcacgcgcaaggaatgtagtaagaaaacaaaaactgatgaccaagagaatgtgtcagccgatgcaccgagtccagcccaggaaaatggagagaagggagaattccacaagttggctgatgccaagatatttttgagcgactgcctggcatgtgacagctgtatgactgcagaggaaggagtccaactttcccagcaaaatgccaaggacttcttccgcgttctgaaccttaacaagaaatgtgatacctcaaagcacaaagtgctggtagtgtctgtgtgtcctcaatctttgccttattttgctgctaaattcaacctcagtgtaactgatgcatccagaagactctgtggtttcctcaaaagtcttggggtgcactatgtatttgatacgacgatagctgcggattttagtatcctggagagtcaaaaagaattcgtgcgtcgctatcgccagcacagtgaggaggaacgcaccctgcccatgctgacctctgcctgtcctggctgggtccgatacgccgagcgggtgctgggtcgccccatcactgcccacctctgcaccgccaagtccccccagcaggtcatgggctctttggtgaaggattatttcgccagacagcaggtcttccacgtgctgccctctcccctggatggagcccagagctatgtgtcctcctgtaggtgccatgaggggcagccgcagagacccggcctccagcagcctctcacctgaccacctggcacagctgcaaccaggggcgggtttcctcttttgctccgcccctgccctgagagggtcctttccacccagacctcaccacagggtcacttggcaactgctggctcctggctttgccaccagttcaggcccagccacaggcacctgctctgtgg

SEQ ID NO: 62990 - DNA, 755 bp, Homo sapiens
aataattctctgcctcagtggttcaagttgcgtaaattatgcgtttacacttttcttcggattacttttaaaatgacaaccactatgttttgctggtctcaattaccagagaattggcaagaaacctgacagctggggcttaggattccctgcgccagacctccgagctacaccagagggcgtactttccttactcggcctcggccacatccgggttccaccgcagattcgggcagggagcgggcggaacctttctaccgcgtctctagctaacacgcacggcggggacagtttaggcctccgcgcaccgttcgccgggagtcttgcagtttgcttggtgcagggaaggcgggcgcggaggttctatctgtttcttcctccttcgtgagcagcatggacgtgctagcggaggagtttgggaacctgactccggagcagctggcggcgccgatcccgactgtagaggaaaaatggaggctgcttccagcatttttaaaggtgaaaggccttgtgaaacagcatatagattcatttaactatttcattaatgtagagataaagaagataatgaaagccaatgaaaaggttacaagtgacgctgaccctatgtggtacttaaaatatcttaatatctatgttgggcttcctgatgttgaagaaagcttcaatgtaactagaccagtgtccccttcatgagtgccgtttgagagacatgacatactctgcccctattacagtggatattgaatataccg

SEQ ID NO: 62991 - DNA, 1520 bp, Homo sapiens
ggcacgaggcccccggggccctggcccagaccgccgcccccggtccgggcaggaaggagctgaagatcgtgatcgtgggcgacggcggctgcggcaagacctcgctgctcatggtgtacagccagggctccttccccgagcactacgccccatcggtgttcgagaagtacacggccagcgtgaccgttggcagcaaggaggtgaccctgaacctctacgacacggccgggcaagaagactatgaccggctgcggcccctgtcctaccagaacacccacctcgtgctcatctgctatgacgtcatgaatcccaccagctacgacaacgtcctcatcaagtggttccctgaggtcacgcatttctgccgcgggatccccatggtgctcatcggctgcaagacagacctgaggaaggacaaggagcagctgcggaagctccgggccgcccagctggagcccatcacctacatgcagggcctgagcgcctgcgaacagatccgagctgctctctacctggaatgttccgccaagtttcgggagaatgtggaggacgtcttccgggaggccgccaaggtggctctcagcgctctgaagaaggcgcaacggcagaagaagcgccggctctgcctgctgctctgacccagggcagacagacctcacgacagcactgacagggcccgggggcccaggtgccgattgcaccagggaggctgccccatcccgaccctccagctcatggtgtctggggcctgcggctagactcttggaacattctggaactctctcctttcctggctggggctctgaccacaaactcccctccaggctgcccctgggacatggtggtgatgtgggtgcaggagccagtgtctgttgtcgggactcgcaagtgccctcatcacagccacccccaccacgagtgtctccccagtgcagactcaagttatgcttgaaatgaaaaagtctatctggtagtgggtaaacgtagacctggcactgttccacgcgggcgccccaagcctgccactcctgtgtccctgcctccctgggctcccgagataggcaccactgtatcctccagctccttccttccttcccccaggaacacggaggccaccgagggggctgggcctatcaggaggacacaggctgcagcctggcacccacccctcccatctccaccccacatggaagacttgtcttcaacttggccactgtctttgcagagctgggcacatgtgcccagggggcagaaaaaatggcttctcagttgttaaaagtataccctggaccacccatctgaccatctccttaaggtttcacccaaagcccccagtgtcagagacttgggatgggaagaacagtcggctcccagtgtggtcatgagcaagttttctgtggactgttccccccactgtggtaggacaggactggcccacttagtcctcaagctcccaacctgctgtccctcaagccccgcttctaccagcctgtggagttcaggaggcgagacatcctggg

SEQ ID NO: 62992 - DNA, 1085 bp, Homo sapiens
tttcgtgcggcgcggatgggccaggattgggtcccttttaggtgccctgtaaggcaggcaggtagacgtacgcgtcgctccgtgcgtaggagcgcgcgcacggcttgtagaccccgcgagaaggaaggtcgagccaggttaccaccaaagaatatgattttggtctaggggctccagtttctgaagctgaaaactaccagaatactctccagctagaacaagaagtgagaaaccaagatagattcatctcgacactgaaattacagattgaagatctcaaacagacaaatcatggcttggaagaatatgttaggaaactcttggatagtaaggaggtggtaagcagtcaagtagatgatttaaccagccacaatgagcatctttgtaaagaattgattaaaattgaccaactagcagagcaactcgaaaaagagaaaaattttgtggtggattccgccaacaaggaacttgaagaagccaagattgatctcatttgccagcaaaataatattatagtattggaagatacaataaaaaggcttaaatctacttgattcctttgtcaagactttggaagcagacaaagatcactataagagtgaagctcaacatttgagaaagatgatgcgaagtaggtctaaaagtccaagacgcccatcaccaactgcccggggtgcaaactgtgatgtagaacttttgaagacaacaacaagagatcgtgaagaacttaaatgcatgctggaaaaatatgagcgccatttggcagaaattcagggtaatgtcaaggttcttaaatctgagagagacaagatcttccttctttatgaacaggcacaggaagaaattacccgacttcgacgagaaatgatgaaaagctgtaagagtcctaaatcaacaacggcacatgctattctccggcgagtggagactgaaagagatgtagcctttactgatttacgaagaatgaccacagaacgagatagtctaagggagaggctaaagattgctcaagagacagcatttaatgagaaggctcacctggaacaaaggatagaggagctggagtgtacagttcataatgtaaa

SEQ ID NO: 62993 - DNA, 556 bp, Homo sapiens
tttcgtcgcgggccgggcggggcgcggcgcccagagctcagggggagacaaaggggaccggttcctctctaggcgccaagatgtggatacaggttcgcaccattgatggctccaagacgtgcaccattgaggacgtgtctcgcaaagccacgattgaggagctgcgcgagcgggtgtgggcgctgttcgacgtgcggcccgaatgccagcgcctcttctaccggggcaagcagttggaaaatggatataccttatttgattatgatgttggactgaatgatataattcagctgctagttcgcccagaccctgatcatcttcctggcacatctacacagattgaggctaaaccctgttctaatagtccacctaaagtaaagaaagctccgagggtaggaccttccaatcagccatctacatcagctcgtgcccgtcttattgatcctggctttggaatatataaggtaaatgaattggtggatgccaaagatgtcggccttggtgcttggtttgaagcacacatacatagtgttactagagcttctgatggacaggg

SEQ ID NO: 62994 - DNA, 374 bp, Homo sapiens
gcgtttgggttccggtctccgcttctccagtggccccggtggctccaccgcagcgtctggcgcgctgggacctgcacaggccggagagagccgtaggcaggaccccgggacaccctggaagccaggaaatggactcagtggcctctgaggatgtggctgtgaacttcacacttgaggagtgggctttgctggatccttcccagaagaaactctacagagatgtgatgcgggaaacctttaaaaacctggcctgtgtaggaaaaaaatgggaagaccagagcattgaagattggtacaaaaatcaggggagaattttaagaaatcatatggaagagggactcagtgaaagtaaagaatatgatcaatgtggagag

SEQ ID NO: 62995 - DNA, 433 bp, Homo sapiens
gggtcgacccacgcgtccgctagaagtgaaactgataggaagcctactgcattcctacttaatttatacaaacagaaaacttctaggtcaaatagacaaaagactaatttgaattataaaaatagggaatcatggcccctcaatcaatttccagacttgagccagtttatagacccagaaccccttcaatgaaggggaggctgggtccccttgaggaagtactactttattgacaatttatgcagtgaatctttacctcatccttccccaaggagacctagggccttttaccaggataactgtgcactgggaagaggggaatgatcagacactttggggactactggacactggctttgagctgacgttgattccaggggacccaaaacatcattgttgtcctccagttaaagtaggagcttatgtacgagct

SEQ ID NO: 62996 - DNA, 856 bp, Homo sapiens
cggggctctgcgctagcgatggacgactgaagggacgggcaggtgtgggcgcggggccaggcagcccgacggcgggagtcgcaggtgctgggtgcatgggccagtgaggacgcacagagatccctcgccgcgcggaggaggagcagcgcgggagccaggcgctgccccaagaccctgcctgcgtccgagcgagcggaacctcgcgcttcgcccggggacaatccgaagtccgcgctatggaagaggagaaatatttgcctgagctgatggcagagaaagatagcctggatccatcttttgtgcatgcgtcgcgccttttggcagaagaaattgaaaagtttcaaggttctgatggaaaaaaggaagacgaagaaaagaagtatcttgatgtcatcagcaacaaaaacataaagctctcagaaagagtactgattcctgtcaagcaatatccaaagttcaattttgtggggaaattgcttggaccaagaggaaactccttgaagaggctacaggaagaaacaggtgctaaaatgtctatcctgggcaaaggatcaatgagagataaagctaaggaagaagaactaaggaagagtggggaagccaaatatgcccacttgagtgatgagcttcatgtattaattgaagtgtttgctccacctggggaagcttattcacgtatgagtcatgcattggaagagattaaaaaattcctggttcctgactacaatgatgaaattcgtcaggaacaactacgtgaattatcttacttaaatggctcaaaggactctggtcgtgcagaggtattaaaggcagagggatcagaatagctcccacagctccttcaagggcgcggggg

SEQ ID NO: 62997 - DNA, 465 bp, Homo sapiens
gcgcgcgcgtcgggaagatggcgctacgtctgctgcggagggcggcgcgcggagctgcggcggcggcgctgctgaggctgaaagcgtctctagcagctgatatccccagacttggatatagttcctcatcccatcacaagtacatcccccggagggcagtgctttatgtacctggaaatgatgaaaagaaaataaagaagattccatccctgaatgtagattgtgcagtgctcgactgtgaggatggagtggctgcaaacaaaaagaatgaagctcgactgagaattgtaaaaactcttgaagacattgatctgggccctactgaaaaatgtgtgagagtcaactcagtttccagtggtctggcggaagaagacctagagacccttttgcaatcccgggtccttccttccagccttgatgctaccaaaggggggaaagtcctgaagaaatccagtggtttgcaaa

SEQ ID NO: 62998 - DNA, 719 bp, Homo sapiens
cccacgcgtccgaatttttaaaaaaaatattactattttttttcatcagagccattgcactggaaaataattttttattttcatgatagcctaccgttgaatttaccgttctgatattaatgaaacatctctataaagggttgaagtgtcttcccgcaacaattgctaaggaacagaattgtcaatttattaatgaaatatgacgtgtgttgaacaagacaagctgggtcaagcatttgaagatgcttttgaggttctgaggcaacattcaactggagatcttcagtactcgccagattacagaaattacctggctttaatcaaccatcgtcctcatgtcaaaggaaattccagctgctatggagtgttgcctacagaggagcctgtctataattggagaacggtaattgttggagtgcagtggtgcgattatagctcactgaagcttcaaattcctggggtcaagggatcctcctgcctcagcttcccaagtagctgggactatagacatgtgccaccaggcctgggaacagtgctgcggacttctattttgaaggaaatattcatcaatctctgcagaacataactgaaaaccagctggtacaacccactctttttccagcaaaaggggggggaaaaggcaggaagaagctccgactgtttgaataccttcacgaatccctgtataatcccgaaatggcatcttgtattcagtgggg

SEQ ID NO: 62999 - DNA, 727 bp, Homo sapiens
ttttcgttgaccattagcccagagcggtggaattccacttccaacctttaaaggaccggtctgcggccccgccctcctcgcaagttttaggcgctcccaagtccccgccccagactagcccaaacctgcgagcagagcggtagagccggctgtggggactggctgtgcctcctggtcggagcgtagctgcaggatgataaaggggcccgagccagggtgaggccaacggggtgggtgcggcgggaccttcctggacctcccgggaaggcgggatcgaggtgggcctgagcccccgggttggagcgaacatagatgagaacacttcccgaggtctccaggtcttctggggagccaggaggaagtaggggatgagtccatcttccaaacggaggggaaggtctccgcttttctgggctgggacccggggaaggcagtgggccggcttctggaaggtcggcctgggaggccgtgctggggtctggggatgtcccgcggctagacccggcgcggcccatgtgtcctccagtacctgagctctgccgcccttgaacgctgtgcttccgtcaacgaccaggggttccccagggtacctagaacctggaaatgtagcagctcaacacccgctccccaccccgtttcaaatatctgggcgctggggtcccaatgtacaccaaatatcatgggccagacctttgagagaggcctgaggcagggcagtgaaaaactt

SEQ ID NO: 63000 - DNA, 1790 bp, Homo sapiens
cgggacccgactcaggtgaaggtctggtccccgtagttggagcagtgggcggccaagccgggtctcttaacatcttgtcgaatctgtggaagggccgggagcgatcttttgggtagcccggcggccccgggcggcgacgatcgatgctatagaagacaaacaagggaaggttttttttccttttgcatcatggctcaatttggaggacagaagaatccgccatgggctactcagtttacagccactgcagtatcacagccagctgcactgggtgttcaacagccatcactccttggagcatctcctaccatttatacacagcaaactgcattggcagcagcaggccttaccacacaaactccagcaaactatcagttaacacaaactgctgcattgcagcaacaagccgcagctgcagcagctgcattacaacagcaatattcacaacctcagcaggccctgtatagtgtgcaacaacagttacagcaaccccagcaaaccctcttaacacagccagctgttgcactgcctacaagccttagcctgtctactcctcagccaacagcacaaataactgtatcatatccaacaccaaggtccagtcaacagcaaacccagcctcagaagcagcgtgttttcacaggggtggttacaaaactacatgatacatttggatttgtggatgaagatgtattctttcagcttagtgctggcaaagggaaaaccccccaagtaggtgacagagtattggttgaagctacttataatcctaatatgccttttaaatggaatgcacagagaattcaaacactaccaaatcagaatcagtcgcaaacccagccattactgaagactcctcctgctgtacttcagccaattgcaccacagacaacatttggtgttcagactcagccccagccccagtcactgctgcaggcacagatttcagcagcttctattacaccactattgcagactcaaccacagcccttattacagcagcctcagcaaaaagctggtttattgcagcctcctgttcgtatagtttcacagccacaaccggcacgacgattagatcccccatcccgattttcaggaagaaatgacagaggggatcaagtgcctaacagaaaagatgatcgaagtcgtgagagagagagagaaagacgtagatcgagagaaagatcacctcagaggaaacgttcccgggaaagatctccacgaagagagcgagagcgatcacctcggagagttcgacgtgttgttccacgttacacagttcagttttcaaagttttctttagattgtcccagttgtgacatgatggaactaaggcgccgttatcaaaatttgtatatacctagtgacttttttgatgctcaatttacatgggtggatgctttccctttgtcaagaccatttcagctgggaaattactgcaatttttatgtaatgcacagagaagtagagtccttagaaaaaaatatggccattcttgatccaccagatgctgaccacttatacagtgcaaaggtaatgctgatggctagccctagtatggaagatttatatcataagtcatgtgctcttgctgaggacccacaagaacttcgagatggattccaacatcctgctagacttgttaagtttttagtgggcatgaaaggcaaggatgaagctatggccattggaggccactggtctccttcgttggatggaccagacccagaaaaagatccctctgtgttgattaagactggctattcgttgttgtaaggctctgacaggca

SEQ ID NO: 63001 - DNA, 337 bp, Homo sapiens
tagaggcatatagtgataggcgaggggaaacttaaatcatcaacctggagcagccgtggcagctccatgcgtgaggctggtgccacacagtatcccggtgttggcattgtctccaggccttctctgttccgcacgcagttacaaaacaaaagaacagttgccagcagttggaagaggatgtggatccaaaccaaatgggggacagatactccctctatggacaagatactcatggaagaagtcaagttagaagagcaactgaaggaggttgtggaagaagataagcaagcattggcagatactgagggcttgcagcagagcagccaaaaattggtgg

SEQ ID NO: 63002 - DNA, 775 bp, Homo sapiens
  misc_feature (1)...(775): n = a,t,c or g
tgatatttgaccctaactttcttcttgcttgcttgcttttttttctttggaagtatatatcttgcccaggtttggctttggtatcaacataatgccagctttatagagtaagttgggaagtattcctgctcttcagctctctggaagagtttgtgaataattggtattatttcttccttaaatggttggtagaattcaccaaggaagctgtctgggcctggagtttgttttgtaggaaagtttctaactataagtttgatttctgtggtagatagagggctgtacaagttatatgtacatctgtctgtgtgtgtgttgtctgtcttgtcactctggccctgaagtgtgttttgtaggacagcatctaactacaagtttgatttccatggtagatggagggctatactagttatatatacatctgtctgtccgtccatctgtttgtcactccatccatccatctatctctagagtgagctttgatggtttgtgtctttcaaggagtttttctgttttatttaagtactcaaatttttcaaaatattattttcatacttgtagaatttgtagtggtgcaacctcttctattcctgatactggtaatgtctatatttttcttttaaccttgattgggttgggtagagatttatcaattttacaattttattgatcttaaagtacttggtattattgaattttctggtttctgatattttgggatttttctttttcattttgagntttactaatgccttccgcttttattggatttcat

SEQ ID NO: 63003 - DNA, 2532 bp, Homo sapiens
tctccctgcggacgggcgctgattggcccgtttgaaaatgcgcccaggcgggagctcacctgggctcttagcgtcgccgccggcttcgcagagcaccgcgccttagccgcgaagttctagttcttgctgccggtcctaacgtcccgcagtcttcgccagccagccgtcccgcatgcgcgtttgggcggcgtggagcctgctgccatgaagtcagcgagagctaagacaccccggaaacctaccgtgaaaaaagggtcccaaacgaaccttaaagacccagttggggtatactgtagggtgcgcccactgggctttcctgatcaagagtgttgcatagaagtgatcaataatacaactgttcagcttcatactcctgagggctacagactcaaccgaaatggagactataaggagactcagtattcatttaaacaagtatttggcactcacaccacccagaaggaactctttgatgttgtggctaatcccttggtcaatgacctcattcatggcaaaaatggtcttctttttacatatggtgtgacgggaagtggaaaaactcacacaatgactggttctccaggggaaggagggctgcttcctcgttgtttggacatgatctttaacagtatagggtcatttcaagctaaacgatatgttttcaaatctaatgataggaatagtatggatatacagtgtgaggttgatgccttattagaacgtcagaaaagagaagctatgcccaatccaaagacttcttctagcaaacgacaagtagatccagagtttgcagatatgataactgtacaagaattctgcaaagcagaagaggttgatgaagatagtgtctatggtgtatttgtctcttatattgaaatatataataattacatatatgatctattggaagaggtgccgtttgatcccataaacccaaacctccacaatctaaattgcttcgtgaagataagaaccataacatgtatgttgcaggatgtacagaagttgaagtgaaatctactgaggaggcttttgaagttttctggagaggccagaaaaagagacgtattgctaatacccatttgaatcgtgagtccagccgttcccatagcgtgttcaacattaaattagttcaggctcccttggatgcagatggagacaatgtcttacaggaaaaagaacaaatcactataagtcagttgtccttggtagatcttgctggaagtgaaagaactaaccggaccagagcagaagggaacagattacgtgaagctggtaatattaatcagtcactaatgacgctaagaacatgtatggatgtcctaagagagaaccaaatgtatggaactaacaagatggttccatatcgagattcaaagttaacccatctgttcaagaactactttgatggggaaggaaaagtgcggatgatcgtgtgtgtgaaccccaaggctgaagattatgaagaaaacttgcaagtcatgagatttgcggaagtgactcaagaagttgaagtagcaagacctgtagacaaggcaatatgtggtttaacgcctgggaggagatacagaaaccagcctcgaggtcccacttggaaatgaaccattggttactgacgtggttttgcagagttttccacctttgccgtcatgcgaaattttggatatcaacgatgagcagacacttccaaggctgattgaagccttagagaaacgacataacttacgacaaatgatgattgatgagtttaacaaacaatctaatgcttttaaagctttgttacaagaatttgacaatgctgttttaagtaaagaaaaccacatgcaagggaaactaaatgaaaaggagaagatgatctcaggacagaaattggaaatagaacgactggaaaagaaaaacaaaactttagaatataagattgagattttagagaaaacaactactatctatgaggaagataaacgcaatttgcaacaggaacttgaaactcagaaccagaaacttcagcgacagttttctgacaaacgcagattagaagccaggttgcaaggcatggtgacagaaacgacaatgaagtgggagaaagaatgtgagcgtagagtggcagccaaacagctggagatgcagaataaactctgggttaaagatgaaaagctgaaacaactgaaggctattgttactgaacctaaaactgagaagccagagagaccctctcgggagcgagatcgagaaaaagttactcaaagatctgtttctccatcacctgtgcctgtaagttatttgtaattgtgtagtaactttgtactagagaaattttgttcagattagatgactatttctatgaggatttttacattttataatacttacatttctgaaatttctctaaaaatattttaaaatttagaataaacacaaatttagcacaaaaaaatagaacaaataattatttgtaatgttaagtcttcatgtgctaacattatagaaaagtaatgaattgtttctctcagtttttcagtcttgctcattaat

SEQ ID NO: 63004 - DNA, 460 bp, Homo sapiens
accgtgcggtggaattccactttgggtagtactgacaccttatcaatattaaatcttctaatccatgaacatggaatgtctttccatttattggtgtcatctttaatttctttcaccaatatcttgtagtttttagcatacaatatttaacctttgttaagtttattcctcggtactttattctttttgatgctattgtaaatggaattattttcttaatttcctttttggattgtttattgttagttgtagaaatgtaaccaatttttgcgtgttcattttgtatccttcaactttgctgaatttattagttctaattgccctgcttttaaaatcaaattaattccaacattcaaatcttaattaaattcacataaaactctagacttcctttttgtcataaaatattggaagatgtggcacctctgagctgacattcccacatggcacccaccgcttg

SEQ ID NO: 63005 - DNA, 1516 bp, Homo sapiens
tttcgtgcagccgcagaagcggcagcggcggcggcgcggcgcaggcaccggcccggggagaggcaccatgagcggatcacagaacaatgacaaaagacaatttctgctggagcgactgctggatgcagtgaaacagtgccagatccgctttggagggagaaaggagattgcctcggattccgacagcagggtcacctgtctgtgtgcccagtttgaagccgtcctgcagcatggcttgaagaggagtcgaggattggcactcacagcggcagcgatcaagcaggcagcgggctttgccagcaaaaccgaaacagagcccgtgttctggtactacgtgaaggaggtcctcaacaagcacgagctgcagcgcttctactccctgcgccacatcgcctcagacgtgggccggggtcgcgcctggctgcgctgtgccctcaacgaacactccctggagcgctacctgcacatgctcctggccgaccgctgcaggctgagcactttttatgaagactggtcttttgtgatggatgaagaaaggtccagtatgcttcctaccatggcagcaggtccgaactccatactctttgcgattaacattgacaacaaggatttgaacgggcagagtaagtttgctcccaccgtttcagacctcttaaaggagtcaacgcagaatgtgaccttgctgaaggagtccacgcaaggagtgagcagcgtgttcagggagatcacagcctcctctgccatctccatcctcatcaaacctgaacaggagaccgaccccttgcccgtcgtgtccaggaatgtcagtgctgatgccaaatgcaaaaaggagcggaagaagaaaaagcaagtgaccaacattaactcatttgatgatgaggaagatgagcagaactctggggacatgtttaaaaagacacctggggcaggggagagctcagaggacaactccgaccgctcctctgtcaatatcatgtccgcctttgaaagccccttcgggccaaactccaatggaagtcagagcagcaactcgtggaaaattgattccctgtctttgaacagggagtttgggtaccagaagcttgatgtgaaaagcatcgatgatgaagatgtggatgaaaacgaagatgacgtgtatggaaactcatcaggacggaagcacaggggccactcagagtcgcccgagaaaaacggagcacactctgtcacccaggctggagtgcaatggcacgatctcagctcactgcaacctctgcctcccgggttcaagtgattctactgcctcagcctcccgtgtagctgggattgcaggcgcgcaccaacacacccgactaatttttgtatttttagtaaagacagggtttcaccatgttggccaggctggtcttgcactcctgacctcacgtgatctgccccaccttggcctcccaaagtgctgggattacaggtgtgaaccactgcgcccagccccaagtggctttttcaattacatgagccaacatattctcacaagtca

SEQ ID NO: 63006 - DNA, 734 bp, Homo sapiens
tttcgtgtccccgaagggtgaggctcggaggcgccgtggagggggggctccctagagaggagggggcgctgcgggaaggcccccaagggaggctgcgtttaaccctcgacgccctgcacccagcccagcggcgcgcccagcccttacctatggtggtgatgaccgtgatcgcaaagtaaaaggagccggcgaatttccactggacgccggcgcggtgcggttccgactgcaggatcaccagctccagctgccggtagtcctcgctgctgatgatgtacttccccttgatccggatctcctcggctttgagtttctcctcctcgcgcatctcgtggtccgactcgagggcgtcgaacacggcggcgcccaccagcagatgggaaaacttccagcaagacaggatcacgtgcccaggatcccacagtgattccgatgtggagccagccctggaagcctctccgtggcttaaggacccccgctgctttctggccccaagcttagagtgccttgagtggccacctaccagcccccagaccctggttcttcctctcttccacccgtgggaatagacccgtggactcaggacctcccaggcagtgtctgagccgtggaagcagagggttcctcgtccgcccgtccacaccccacatgtgccactttccaaggcgctggacctgcgggtggaatgggagctcctgggagcaaagcctggggcttaatccaggcttcttctc

SEQ ID NO: 63007 - DNA, 966 bp, Homo sapiens
ccagccggtgctgccgtctgttgtacctgagaggcttgcgcatgctcgacgcacggattcgaggcggggagcatgggaagaagcggccaggagtatgacctgatcattgcgaccaccgctaggggaagggaggagagggtgtagaaacggggacgagggtgggggaagggcaaggaggcgctcgagctggtgcgcggagcatcctgggagacgtagtccagcgggagggggaagtcgaagactgcgcgtgctcaggagcgcggagcggcccgctgagcgcagaggggcagacactggcctcagatacctgacctggtaccctctatgaggcctgcggtgctgggctccccagaccgagcacccccagaagatgaggggcctgtcatggtgaagctagaggactctgaggaggagggtgaggctgccttatgggacccaggccctgaagctgcacgcctgcgtttccggtgcttccactatgaggaggccacagggccccaagaggccctggcccagctccgagagctgtgtcgccagtggctgcgtccagaggtacgctccaaggagcagatgctggagctgttggtgctggagcagttcctgggcgcactgccccctgagatccaggcccgtgtgcaggggcagcggccaggcagccccgaggaggctgctgccctagtagatgggctgcgccgggagccgggcggaccccggagatgggtgagtgagtgtccacgagtggggttcaggactggagcatcatccagctcggcctcaccctgggcagcaccacgctttgccagacacacgttctcccttgtggtacagaagtggccacctgcaacagagaccctgtgcaaggctgcccagggcagagggattccagggccagactccccagcccattcctgcatcacctgcagtcacgtggacataggagctgcaggctaggggaatatggggaag

SEQ ID NO: 63008 - DNA, 602 bp, Homo sapiens
acgacgatttcgtgggagctgtggtcccagggctggactggagttttgtttgtgagaatttgcccgggggccaaggggggttctcttctcctggatcttagtctcggtagcctgtcacctggcctccacccaaggagctcctgaagatgtggacatcctccagcggctgggcctcagctggacgaaggccgggagccctgcacccccgggagtcattcctttccagtcgggcttcatctttacgcagcgggcccggctccaggctcccacgggcaccgtcattcctgccgccttgggcacagagctggcactggtgctgagcctctgctcccaccgggtgaaccatgccttcctcttcgctgtccgcagccagaaacgcaagctgcagctgggcctgcagttcctccccggcaagacggtcgtccacctcgggtcccggcgctcagtggccttcgacctcgacatgcacgacgggcgctggcaccacctggccctcgagctccgaggccgcacagtcactctggtgactgcctgcgggcagcgccgggtgcctgtcctgctgcctttccacagggaccctgcactcgaccctgggggctcct

SEQ ID NO: 63009 - DNA, 1286 bp, Homo sapiens
cggaccacccgcggggcagcctcgggcctctctccatctcttaagtggtggtggctgtgggtttttctgcaggcgatccttttgagtaatttgtttcacgcacgcgccctgctgtggggtaaagcggcagattcatgctgctgtcatttgtcgttaaaacgatgggctccctgttatgtgtgtacttcttggatttgagggcagggggatgacattgtgacttggcttcctgtgaccgtccattctcaaggcctgagacctgggaggaagctggagaaaagatgccctctgaatctttgtgtttggctgcccaggctcgccttgacaccgaatggttgaaaacagatatacagatgatagtgtcgaaccaagtggaacaaagaaagaagatctgaatgacaaagagaaaaaagatgaagacgaaactcctgcacctgtatatagggccaagtcaattctggagacctgggtgtgggtcaagcaaccaggaaacggaagcccaaagaggaggggagcttacagcaggccctggactagggattaacacaaaaacaacagcaacaaatctgatttaagcttcacacattctggctctgttatccaggctggaatgcagtggcgtgatctcaactcattgcaagctccaccttctgggttcatgccattctcctggcttcagcctctgagtagctgggactacaggcgcccaacacccacactgggctaatttttgtatttttagtagagacggggttttaccatgttagccaagatggtctccatcttctgacctcgtgatccacccacctcggcctcttagagtgcttgggattacaggcgtaagccaccactcccggccgatatattgctttatgaaaattatactggatctgttacagatgatagtgttgaaccaagtggaacaaagaaagaagatctggatgacagagagaaaaaagatgaaactcctgcacctgtatatggggccaagtcaattctggagagctgggtatggagtaagcaaccaggtaatctttgatcagagatagaaattagtgtagacattttgcctccagatcctcaagtggttttagaaattggttctctaattctgtgggagaaggttgatactggtatagtcttacacgtcattgaaactggaaaagatagctagatattctcctactcatgttttggataatgagataaattattttatgcttcacacacttggagtatgtcatctactgtaatatagtatctgaatgaatactttaaataaaata

SEQ ID NO: 63010 - DNA, 624 bp, Homo sapiens
aaggtccggggggagctgttccgctgcgctgccctcgttattcacacggacgctgcggagcttcccagggctgcttccctgtccccctgggtggaggctgccgtctaaacctgactccagagtttaagatgcaatggccagaagacatgaacgtgtcactagaaggatgtggacatgggctccgggactgttgatgatgactgtggtgttttggggtcatcaggggaatggacaaggccaaggatcgcgtcttcgccaggaggactttcccccgcggattgtggagcatccttccgatgtcatcgtctctaagggcgagcccacgactctgaactgcaaggcggagggccggccaacgcccaccattgagtggtacaaagatggggagcgagtggagactgacaaggacgatccccggtcccacaggatgcttctgcccagcggatccttattcttcttgcgcatcgtgcacgggcgcaggagtaaacctgatgaaggaagctactgtttgtgttgcgaggaaatatgttgtggaagcagtgaggccaaatgcgcctatggaggtggcatgctagtgaacataatgaacctcctgtgcacatttacttttatttatttcaagag

SEQ ID NO: 63011 - DNA, 1121 bp, Homo sapiens
  misc_feature (1)...(1121): n = a,t,c or g
cgagcgcggaacgcgaggggctgctggggtgtttgtcgcagcgggttttcctcggcggtttgcggagctgctaggatggagcaggttgcggagggagcaagggtgaccgcagtccctgtgtcagctgccgacagcactgaggagttggccgaagtcgaagaaggagttggagtagtgggcgaagataatgacgcagccgcgagaggagcggaggcctttggcgacagtgaggaggacggagaggatgtgttcgaggtggagaagatcctggacatgaagaccgaggggggtaaagttctttacaaagttcgctggaaaggctatacatcggatgatgatacctgggagcccgagattcacctggaggactgtaaagaagtgcttcttgaatttaggaagaaaattgcagagaacaaagccaaagcagtcaggaaggatattcagagactatccttaaataacgacatatttgaggcgaactctgatagcgatcagcaaagtgagacaaaagaagatacttccccaaagaagaaaaagaaaaaattgaggcagagagaagagaaaagcccagatgatctgaaaaagaaaaaagcaaaggccgggaagctaaaagacaagtccaaaccagacctggagagctccttggaaagtttagtttttgatttaaggacaaagaaaagaatttctgaagccaaagaagaactaaaggagtccaaaaagcccaaaaaagatgaagtaaaagaaacaaaagaattaaagaaagttaaaaagggtgaaataagagatttaaagacgaaaacaagagaagatcccacctataatagaactactgataatgaaaaatttgtcgaatcccaggtggaatctgaatcaagtgtacttaatgattctccctttccagaggatgacagtgaagggctacattccgacagcagagagaagagaaaagcccagatgatctgaaaaagaaaaaagcaaaggccgggaagctaaaagacaagtccaaaccagacctggagagctccttggaaagtttagtttttgatttaaggacaaagaaaagaatttctgaagccaaagaagaactaaaggagtccaaaaagcccaaaanaaaaaaaaaa

SEQ ID NO: 63012 - DNA, 700 bp, Homo sapiens
tttcgtctgccttcctgagtgagcggtggagggaaccctagaggacagagcccccagcccggcagcaggccccctctccgcccgccaccacggaggagaaggaggacagccagcccctccagccctggcctggcccagcgggggcagtaagctcctacttgcccccagcttggtgcccacacgggcccagtgcatgagcagccgagcctgctaaccgcagctccgcacttgtccatccccctgcggctacaccatgtccagctcctacgatgaggcctcactggcgccagaggagaccaccgacagcttctgggaggtggggaactacaagcggaccgtgaagcgcatcgatgacggccaccgtctatgcaacgacctgatgaactgcgtgcaggagcgcgccaagatcgagaaggcgtacgggcagcagctcaccgactgggcccaagcgttggcgccagctcatcgagaaaggtgctcccccaggctcacattgtgcgcgcccccaggccgtcacgagccccctaggtttgggtcctaggagccccggctacttgcatgcaccatgccctccatttaccagacacaggacattttcaggcgctgttccctcctagatcaaaccaggcctacctgttcatctctattttgtacaattttaggttgaattaaaaaaaaaaaaacactttttatcttgaaa

SEQ ID NO: 63013 - DNA, 1420 bp, Homo sapiens
tttcgtggccgccatcgctattgcggcattctccctcggctccggaggtaggggcaactcttctcttcctgtctgggaaaaagaccatagctcaaaaggaaggccgagggagaagttagaaagggatgatgaacgaagcgttttgaggggactgcaacgccgcggcaatacccgcccctgagctgcgcgcactaccgcctcggtagctgtcatggccgccgggtcacgtgactccggcttggcgccgtcctggttttccgtcaccctggttctgtagtctcggttctccgactccctctttttctcgcttgtggactccgatatattgcccttcttcccttagaagaactgctgaaccgactctgagaaatttgaaaacatctggagaaaatgacccattggtttcataggaacccattaaaagccacagctcctgtgtcttttaattactatggtgtagtcactggcccttctgcttcaaaaatatgcaatgacttgaggtcatccagggcacgactccttgaactgttcactgatttgagctgtaatccagaaatgatgaagaatgcagcagattcatatttctcacttttacaaggtttcataaattctttggatgaatctacccaagaaagcaagttacgatatattcaaaatttcaagtggactgatacattgcaaggacaggttccaagtgcccagcaggatgctgtttttgaattaatttccatgggatttaatgtagctttatggtataccaaatatgcttcaagactggctggaaaagaaaatataacagaagatgaagcaaaagaagttcatcgaagcctaaagattgcagctgggatttttaaacatttaaaggaaagtcatctcccaaaactcattacacctgcggaaaaaggaagagatttagagtcacgactcatagaagcatacgttattcaatgtcaggctgaagctcaagaagtaacaattgctcgagcaattgaactaaaacatgctcctggactaattgctgcactggcgtatgaaacaagccaatttctatcaaaaagctgatcatactttatccagtttggagcctgcatattctgccaaatggagaaaatatcttcacttgaagatgtgtttctacacagcttatgcttactgttaccatggtgagactttattggctagtgataaatgcggtgaagcaatcaggtctctccaagaagcagaaaaattgtatgcaaaggcagaagcactgtgtaaagaatatggagaaaccaaaggacctggaccaacagtcaaaccttcaggacatctgttctttaggaaacttggaaaccttgtgaagaacaccctagaaaaatgtcagagagaaaatggatttatttactttcaaaaaattccaacagaagccccacaatgtatt

SEQ ID NO: 63014 - DNA, 849 bp, Homo sapiens
ccaccgcgtgggctcccgagatagtggctgggcggggaactctttcctcatcctctcgtcagcgccgcttctcctgggttctcttgcagatgctgctgctaggggtggggggagcagccgtgggacgcgtggccgggagcgggggtgacagcctgggattccgggggcttctcttccttgtcctcctcctctcctctctattcccagtgtggccgtggctgacactaaagactttgtagccatcaacccgagtgcagtttcgatggaaaatgaaggttgcacgttttcaaaaaatacctaatggtgaaaatgagacaatgattcctgtattgacatcaaaaaaagcaagtgaattaccagtcagtgaagttgcaagcattctccaagctgatcttcagaatggtctaaacaaatgtgaagttagtcataggcgagcctttcatggctggaatgagtttgatattactgaagatgagccactgtggaagaagtatatttctcagtttaaaaatccccttattatgctgcttctggcttctgcagtcatcagcgttccaatgcatcagtttgatgatgccgtcagtatcactgtggcaatacttatcgttgttacagtcgcctttgttcaggaatatcgttcagaaaaatctcttgaagaattgagtatacttgtgccaccagaatgccattgggtgcgcgaaggaaaattggagcatactcttgcccgagacttgtttccaggcgatacagttagcctttctgttggggatagaggccctgctgacttacgcttgtttgaggctgtggatctttccattgatgagatcagacttgacaggtgaaacaacg

SEQ ID NO: 63015 - DNA, 1973 bp, Homo sapiens
cagtggcgtgattctcctgcctcagcctcccaagtagctgggattataggcacctaccaccatgcccggctaatttttttgtatttttagtggagatggggtttcactatgttggccaggctggtcttgaactcctgacctcgtgattcatccgcctcagcctcccgaagtgttgggattgcaggcgtgagccactgcgcccggccactttgcgcattttgactgttgcctaatgttctgtcagatcactgtgccatgacatctgttttcctgagggtggacgttttggtgatttaaaaccgtatagatgtggttttaaatgttttaaatgttgcaccctgtgctgtgctccttcccagcagagaattgattcatttttcagcatatcccccttagcccctagctaagtttcttaaattggacttggtaaatgtgctttgcctgcccatggaagatgtctttctgttttaccgtacttgtttttgcagtatgggtttagggagtagctgccatttatcccttcccaagagagcagaggcactactatgctcacggaaggccacagttgtaagggatcttgtggctgtcaggatggcagaggagcaggagttcacccagctctgcaagttgcctgcacagccctcacacccacactgcgtgaacaacacctaccgcagcgcacagcactcccaggctctgctccgagggctgctggctctccgggacagcggaatcctcttcgatgttgtgctggtggtggagggcagacacatcgaggcccatcgcatcctgctggctgcgtcctgcgattacttcaaaggaatgtttgctgggggattgaaggagatggaacaggaagaggtcctgatccacggtgtgtcctacaatgctatgtgccaaatcctacatttcatatacacctccgagctggagctcagcctgagcaatgtacaagagacactggtggctgcctgccagcttcagatcccagaaattatccatttctgctgtgatttcctcatgtcctgggtggacgaagagaacattctcgatgtctaccggctggcagagctgtttgacttgagccgcctgactgagcaactggacacctatatcctcaaaaactttgtggccttctctcggactgacaagtaccgccagcttccattggagaaggtctactccctcctcagcagcaatcgcctggaggtctcctgcgagaccgaggtatatgagggggcccttctctaccattatagcctggagcaggtgcaggctgaccagatctcgctgcacgagcccccaaagctccttgagacagtgcggtttccgctgatggaagctgaggtcctgcagcggctgcatgacaagctggaccccagccctttgagggacacagtggccagcgccctcatgtaccaccggaacgagagcctacagcccagcctgcagagcccgcaaacggagctgcggtcggacttccagtgcgttgtgggcttcgggggcattcactccacgccgtccactgtcctcagcgaccaggcccaagtatctaaaccccttactgggagagtggaagcacttcactgcctccctggccccccgcatgtccaaccagggcatcgcggtgctcaacaacttcgtatacttgattggaggggacaacaatgtccaaggatttcgagcagagtcccgatgctggaggtatgacccacggcacaaccgctggttccagatccagtccctgcagcaggagcacgccgacctgtccgtgtgtgttgtaggcaggtacatatacgctgtggcgggccgtgactaccacaatgacctgaatgctgtggagcgctacgaccctgccaccaactcctgggcatacgtggccccactcaagagggaggtgtatgcccacgcaggcgcgacgctggaggggaagatgtatatcacctgcggccgcaaggggaggattacctgaa

SEQ ID NO: 63016 - DNA, 958 bp, Homo sapiens
  misc_feature (1)...(958): n = a,t,c or g
ggaggagtgaggtcaattgccctttagtcccaggactaaccggaagcttctgcaacaggaggacattgaaaataagatggaacccatccacataaggatttgcctcaaagggcactgcaaaaattgaacagaggaatcccaaggaagctgcctgaatttgcctgtatactctcgttctgcgacttataaaggaccagacaaatcaaattagtggttttggtttccgccagctgtggatgcctttgacattatgaccgcagaggattccaccgcagccatgagcagtgactcggccgccgggtcctcggccaaggtgcccgagggcgtggcgggcgcgcccaacgaggcagcactgctggcgctgatggagcgcacgggctacagcatggtgcaagagaacgggcagcgcaagttacggcggcccaccgcccggcttgggagggcccgcaaccccngcaagcgtggctggaaggtgttcttccgtgggcaagattcccgcgcgacgttgttacgaggacgagctggtgcccgtgttcgaggccgtgggccgcatctacgagctgcgcctcatgatggactttgacggcaagaaccgcggctacgccttcgtcatgtactgccacaagcacgaggccaagcgcgcagtgcgtgagctcaacaactacgagatccgcccgggccgcctgctcggcgtgtgctgcagcgtggacaactgccgcctcttcatcggcgggatccccaagatgaagaagcgcgaggaaatcctggaggagattgccaaggtcaccgagggcgtgctggacgtgatcgtctacgccagcgcggccgacaagatgaagaaccgcgggcttcgccttcgtggagtacgagagccaccgcgcggctgccattggctcggccgcaagctcattgcctggncggcatccagcttgtgggggccaccagatcgccgtggact

SEQ ID NO: 63017 - DNA, 1092 bp, Homo sapiens
ccttaaagaaagttggagaagaggagagagaagccagggccgagcgtgccagcaggcggatggatgggcggtctggtggaggaggagacgtagtggcctgggctgagctgggtgggccgggagaagcgggtgcctcagagtgggggtgggggcatgggaggggcaggcattctgctgctgctgctggctggggcgggggtggtggtggcctggagacccccaaagggaaagtgtcccctgcgctgctcctgctctaaagacagcgccctgtgtgagggctccccggacctgcccgtcagcttctctccgaccctgctgtcactctcactcgtcaggacgggagtcacccagctgaaggccggcagcttcctgagaattccgtctctgcacctgctcctcttcacctccaactccttctccgtgattgaggacgatgcatttgcgggcctgtcccacctgcagtacctcttcatcgaggacaatgagattggctccatctctaagaatgccctcagaggacttcgctcgcttacacacctaagcctggccaataaccatctggagaccctccccagattcctgttccgaggcctggacacccttactcacgtggacctcccgcgggaacccgttccagtgtgactgccgcgtcctctggctcctgcagtggatgcccaccgtgaatgccagcgtggggaccggcgcctgtgcgggccccgcctccctgagccacatgcagctccaccacctcgaccccaagactttcaagtgcagagccataggtggggggctttcccgatggggtgggaggcgggagatctgggggaaaggctgccaggggccaagaggctcgtctcactccctgcccctgccatttcccggagtgggaagaccctgagcaaagcagcactgccttcctgagccccagttttctcatctgtaaagtgggggtaataaacagtgatataggagtgccatgggaattcaatgatacatcttcacgtgttcggcatttggcgccgggcctgggacaggaggtccttataaacgttcacccttgttaacataaaagcaaccaatttaaaaattcaa

SEQ ID NO: 63018 - DNA, 739 bp, Homo sapiens
atcgatagcgtgtaggaccggcccggaattcccggttccacgggaggcaggaggggaagtcccaacggtgctagaatggtgctgcagtggcagaagacggctcacaagtgaagtctggaagaacaacagggaagacatccatcatttgctccaaagtgtgcaagtcaaatcctggggagaatcatgataaccctgatcactgagcagctacagaagcagactctggatgagctgaaatgcacacgcttcagcatcagtctgcctttgcctgatcatgcagacatctccaactgtgggaactctttccagcttgtgtctgaaggtgcttcctggaggggcctgccccactgttcctgtgctgagttccaggacagcctcaacttcagctaccatccctcaggcctgagcctgcacctcagaccacccagtcggggaaactcccccaaggagcagcccttctcccaagtcctaagacctgagcccccagatccagagaagcttcctgtgccccctgcccctccatccaagaggcactgccgctcactctcagtgcccgtggacctgtctcgctggcagccggtgtggcggcccgccccctccaagctgtggactcccataaagcaccggggcagtggtggagggggtgggccgcaggtgcctcaccagagccccccaaagcgggtctccagcctcaggttcctccaagctcccagtgcctcttctcaatgtgccccggcgc

SEQ ID NO: 63019 - DNA, 943 bp, Homo sapiens
gcggccgccgggagggcgcgcggcgccggagacatgttcaggcggaaacagagcaacccccggcagatcaagcgttccctcggagacatggaggccagagaggaggtgcagttggtgggtgccagccacatggagcaaaaggccacggcacctgaagccccgagccctcccagcgcagatgttaactcacccccaccgctgccgtcccccacatccccaggaggccccaaggagctggaaggacaggaaccagaacccaggcccacggaggaagagccgggcagtccctggagcgggccagacgagctggagccggtggtgcaggaggccggaggcgcatacgggcccgactcagcctcgccacgggcctgtcctggggcccgttccatgggagtgtccagaccagagcctcatcccccaggcaggcggagccgagcccagccctgaccctgctgctggtggacgaggcctgctggctgaggacgttgccccaggccctgactgaggccgaggccaacacagagatccacaggaaggatgacgcactctggtgcagggtcaccaagccggtgcctgcggggggactcctgagcgtgctcctcacgggcgagccccacagcacccccggccaccctgtgaagaaggagccagcagagcccacgtgcccggcccctgcacacgacctccagctcctgccccagcaggccgggatggcctccatccttgccaccgcagtgatcaacaaagacgtcttcccctgcaaggactgtggcatctggtaccgcagcgagcgcaacctgcaggcgcacctgctctactactgcgccagccgccagggcaccggctccccggccgcagccgccacagacgagaagcccaaagagacctaccccaacgagcgcgtctgcccctacccccagagccgcaagagctgccccggcgc

SEQ ID NO: 63020 - DNA, 836 bp, Homo sapiens
ctatgggaatttagccttaggggctgatctgatgattcttagttctctctatctcctgagaaggagttcgttctgttggtcttccctggcccagggatgctttgcatccttggctcccccagtctactccccatgatggattccaggtgcctgtgtcatgcaagagcttgagctgcccctctgtctggggaaggcaagccaggctggggtgctcctctgtaaatggcactttatctttcccacaggggtcagatctcagactattcatcaatggccagcgaccctggtgcagcctgtgggcagcccgctctctctggagtgcactgtggagggaacatcaaaccccaacctatactggtaccgacaggctgcaggcaggggcctccagctgctcttctactccgttggtattggccagatcagctctgaggtgccccagaatctctcagcctccagaccccaggaccggcagttcatcctgagttctaagaagctccttctcagtgactctggcttctatctctgtgcctggagtgcaggactagcgggagggccgggagagcagtacttcgggccgggcaccaggctcacggtcacagaggacctgaaaaacgtgttcccacccgaggtcgctgtgtttgaggccatcagaagcagagatctcccacacccaaaaggccacactggtgtgcctgcgcacaggcttctaccccgaccacgtggagctgagctggtgggtgaatgggaaggaggtgcacagtggggtcagcacagacccgcagcccctcaaggagcagcccgccctcaatgactccagatactgcctgagcagccgc

SEQ ID NO: 63021 - DNA, 1194 bp, Homo sapiens
  misc_feature (1)...(1194): n = a,t,c or g
catcaaggtgatcaagttcatcctcatcatctgctacaccgtctactacgtgcacaacatcaagttcgacgtggactgcaccgtggacattgagagcctgacgggctaccgcacctaccgctgtgcccaccccctggccacactcttcaagatcctggcgtccttctacatcagcctagtcatcttctacggcctcatctgcatgtatacactgtggtggatgctacggcgctccctcaagaagtactcgtttgagtcgatccgtgaggagagcagctacagcgacatccccgacgtcaagaacgacttcgccttcatgctgcacctcattgaccaatacgacccgctctactccaagcgcttcgccgtcttcctgtcggaggtgagtgagaacaagctgcggcagctgaacctcaacaacgagtggacgctggacaagctccggcagcggctcaccaagaacgcgcaggacaagctggagctgcacctgttcatgctcagtggcatccctgacactgtgtttgacctggtggagctggaggtcctcaagctggagctgatccccgacgtgaccatcccgcccagcattgcccagctcacgggcctcaaggagctgtggctctaccacacagcggccaagattgaagcgcccgcgctggccttcctgcgcgagaacctgcgggcgctgcacatcaagttcaccgacatcaaggagatcccgctgtggatctatagcctgaagacactggaggagctgcacctgacgggcaacctgagcgcggagaacaaccgctacatcgtcatcgacgggctgcgggagctcaaacgcctcaaggtgctgcggctcaagagcaacctaagcaagctgccacaggtggtcacaaatgtgggcgtgcacctgcagaagctgtccaccaatacgacccgctctacaccaagctcatcgtcctcaacagcctcaagaagatggcgaacctgactgagctggagctgatccgctgtgacctggagcgcatcccccactccatcttcagcctccacaacctgcaggagattgacctcaaggacaacaacctcaagaccatcgaggagatcatcagnttccagnacctgcaccgnctcacctgccttaagctgtggtacaaccacatcggctacatccccatccagatcgggaacctcancaacctggag

SEQ ID NO: 63022 - DNA, 1518 bp, Homo sapiens
cgcatcggaaacccggctcgacccacgcgtccggcaaggcctgcggggaggcgcatgatggacgcgtttgctgtcatgatgtaggacctcctgacctagaaccatgcccggcgcagggagaacaacgagcttatggaccgggtgcgggggctgctgtgcgagaaagcctacctgctggcccgggagcgttcgccggcccacctggtggctttccctggacgtttaacggcgactccgcccggcctcccgactttttgatgcaggcgttctcttacatgactttcttcgaggctagattctcgaaagacatcctgaaggtggctttcttaattagctgcctcaccggctggcggagcagttcgtagtcccctacatcgagagggagagccccgtcctggctcagtactggggcttcgtggacgcgctgtagcgggtcttcgccgtcgtgggtaggaaacagtcgggccggatccccggtgtctggggagcggctgccggccgggcccgcgcgagccgattcactcctacaagcccggctcactagttccaagctgctggactttgaccctcgctgggaagcttgatcgccgcctgttctcgccaatctctatgcctttgcactgcccagcaacccggtcactgcccaggacctgttaaaagttgaatggacctcccagaatcacgccgctgccaccgccgtttctagagacggcttttggccacctttgagaatcagggtcaaacttggaagggcctgcatttgtcacacttcctcggacactaatttggatagttcaggcccagagacggcttcccgggttagtgtgcctgacaacactgaagaaaaattgtgacattttccttccccagaattacttcgttttatacatttcacttctcttctgaaatcacagcaatgccagtttgcgccttttggtctgaggaacgcaggccctggccactaccaggaaaaaatcctttgcacatggcctgctatcaacaatcctctacaatgattctcagcatcacctagggagcttatgtaaaatctcaaattcctgggccctatccccagagtttcttatcaagtaagtctgcattgggatctgaggatttgcatctctaacaaaaattcctaggcgatgctcacactgttggtgtaaggtttccttgatggagaactatcaaagcagtcaaagctatcaaaataaaaaagaattctgattgggtgcagtggctcacacctgtcattccagcactttgagaggccaaggtgggcagatcacatgaggccaggagttcaagaccagcctggccaacatggcagaaaccccatctctactaaaaataccaaaattagccgggcatggtggaacacacctgcaatcccagctactcgggaggctgaggcaagagaatcgcttgaacctgggaggcagaagttgcagtgaaacaagttggtgccaatgcattccagcctggatgatggagcgagactctgtctcaagaaaaaaaaaa

SEQ ID NO: 63023 - DNA, 622 bp, Homo sapiens
cgatttcgtggagagcggtggcggcggctgcgccgggctgtgagtctctcgccgccggaggaagatgaggctgaagattggattcatcttacgcagtttgctggtggtgggaagcttcctggggctagtggtcctctggtcttccctgaccccgcggccggacgacccaagcccgctgagcaggatgagggaagacagagatgtcaatgaccccatgcccaaccgaggcggcaatggactagctcctggggaggacagattcaaacctgtggtaccatggcctcatgttgaaggagtagaagtggacttagagtctattagaagaataaacaaggccaaaaatgaacaagagcaccatgctggaggagattcccagaaagatatcatgcagaggcagtatctcacatttaagcctcagacattcacctaccatgatcctgtgcttcgcccagggatcctcggtaactttgaacccaaagaacctgagcctcctggagtggttggtggccctgggagagaaagccaagccattggttttggggcccagaatttaaacaagcaattcaagccagcatttaaagagtttgggtttaacatggtggcaagtgacatgttctcactg

SEQ ID NO: 63024 - DNA, 1243 bp, Homo sapiens
tttcgtggcggcggcggcggcggccggacccagactggtagtgaggcgttggaccccgagccgctgcaatgccgctggagctggagctgtgtcccgggcgctgggtgggcgggcaacacccgtgcttcatcattgccgagatcggccagaaccaccagggcgacctggatgtagccaagcgcatgatccgcatggccaaggagtgtggggctgattgtgccaagttccagaagagtgagctagaattcaagtttaatcggaaagccttggagaggccatacacctcgaagcattcctgggggaagacgtacggggagcacaaacgacatctggagttcagccatgaccagtacagggagctgcagaggtacgccgaggaggttgggatcttcttcactgcctctggcatggatgagatggcagttgaatttctgcatgaactgaatgttccatttttcaaagttggatctggagacactaataattttccttatctggaaaagacagccaaaaaaggggctggcacagtgttttaagagatgtctgtggagttcagttgaatgatgagaccagcagttgggatgtgttggggagagtcagaacctctaaagagaaagtgctgatggtgttggtgctggattactcaggtcgcccaatggtgatctccagtgggatgcagtcaatggacaccatgaagcaagtttatcagatcgtgaagcccctcaaccccaacttctgcttcttgcagtgtaccagcgcatacccgctccagcctgaggacgtcaacctgcgggtcatctcggaatatcagaagctctttcctgacattcccatagggtattctgggcatgaaacaggcatagcgatatctgtggccgcagtggctctgggggccaaggtgttggaacgtcacataactttggacaagacctggaaggggagtgaccactcggcctcgctggagcctggagaactggccgagctggtgcggtcagtgcgtcttgtggagcgtgccctgggctccccaaccaagcagctgctgccctgtgagatggcctgcaatgagaagctgggcaagtctgtggtggccaaagtgaaaattccggaaggcaccattctaacaatggacatgctcaccgtgaaggtgggtgagcccaaaggctatcctcctgaagacatctttaatctagtgggcaagaaggtcctggtcactgttgaagaggatgacaccatcatggaagaa

SEQ ID NO: 63025 - DNA, 715 bp, Homo sapiens
tttcgtggcgaagttgggcgactggcggatgcaggccttgcggcacgtcgtgtgcgccctgtccggcggcgtggacagcgccgtggccgcgctgctgctgaggcggagaggttaccaggtgacaggggtgtttatgaagaactgggactcactggatgaacatggggtctgtactgccgacaaagactgtgaagatgcttacagagtttgccagatcttagacatccctttccatcaagtgtcctacgtaaaggagtattggaatgatgtgttcaggggcagatgccattgccacaggtcactatgcaagaacttccctggaagatgaagaagtctttgagcagaagcacgttaagaagcccgaagggcttttcagaaatcggtttgaagttagaaatgccaggtttcccaggatgccctgaggagaaccatcttccctctggggggattaacgaaagagtttgtaaagaaaatcgctgctgagaatagacttcatcatgtgcttcagaagaaagaggtacgagtgagcagttgcctttgaatagtgcctgtttccctttcccgactgcatggcacggagcagctggacctgtgggtcccgcaccacttccccttctccaggaccttacatccaaggcgggccttgggcatagatggaggagtttgctgggcgcctacgtcgctcctaccccgttcaagcaccgtcctccgccgc

SEQ ID NO: 63026 - DNA, 1014 bp, Homo sapiens
tttttcctttccttttccctttctcctttccctctccatagtgaagctaatgtactttgcacagtgttagcaattatcacccattcatcaggtattaattcatttcgatcccaagggcataggcttgatgtacaataaggagttaaggactgtgagttctctgataaggtttggttatagtcatttctcacttctcaccctctccaggactacttccagcaacccagtctcctgccatgtccgaccccatcacgctgaacgtcggggggaagctctatacaacctcactggcgaccctgaccagcttccctgactccatgctaggcgccatgttcagcgggaagatgcccaccaagagggacagccagggcaactgcttcattgaccgtgacggcaaagtgttccgctatatcctcaacttcctgcggacctcccaccttgacctgcctgaggacttccaggagatggggctgctccgcagggaggccgacttctaccaggtgcagcccctgattgaggccctgcaggagaaggaagtggagctctccaaggccgagaagaatgccatgctcaacatcacactgaaccagcgtgtgcagacggtccacttcactgtgcgcgaggcaccccagatctacagcctctcctcttccagcatggaggtcttcaacgccaacatcttcagcacctcctgcctcttcctcaagctccttggctctaagctcttctactgctccaatggcaatctctcctccatcaccagccacttgcaggaccccaaccacctgactctggactgggtggccaatgtggagggcctgccagaggaggagtacaccaagcagaacctcaagaggctctgggtggtgcccgccaacaagcagatcaacagcttccaggtcttcgtggaagaggtactgaaaatcgctctgagcgatggcttctgcatcgattcttctcacccacatgctctggattttatgaacaataagattattcgattaatacggtaca

SEQ ID NO: 63027 - DNA, 1486 bp, Homo sapiens
attcgtgcgccgataatttggtggcggcgtccggagggtgctggtttgttctcggtgaacggcgcgcggggtctctcctgagtgcgagctacgggaccttcgccatgccggggatggtactcttcggccggcgctgggccatcgccagcgacgacttggtcttcccagggttcttcgagctggtcgtgcgagtgctgtggtggattggcattctgacgttgtatctcatgcacagaggaaagctggactgtgctggtggagccttgctcagcagttacttgatcgtcctcatgattctcctggcagttgtcatatgtactgtgtcagccatcatgtgtgtcagcatgagaggaacgatttgtaaccctggaccgcggaagtctatgtctaagctgctttacatccgcctggcgctgttttttccagagatggtctgggcctctctgggggctgcctgggtggcagatggtgttcagtgcgacaggacagttgtaaacggcatcatcgcaaccgtcgtggtcagttggatcatcatcgctgccacagtggtttccattatcattgtctttgaccctcttggggggaaaatggctccatattcctctgccggccccagccacctggatagtcatgattcaagccagttacttaatggcctcaagacagcagctacaagcgtgtgggaaaccagaatcaagctcttgtgctgttgcattgggaaagacgaccatactcgggttgctttttcgagtacggcagagcttttctcaacctacttttcagacacagatctggtgcccagcgacattgcggcgggcctcgccctgcttcatcagcaacaggacaatatcaggaacaaccaagagcctgcccaggtggtctgccatgccccagggagctcccaggaagctgatctggatgcagaattaaaaaactgccatcattacatgcagtttgcagcagcggcctatgggtggcccctctacatctacagaaaccccctcacggggctgtgcaggattggtggtgactgctgcagaagcaagaacccacagactatgacttggtcggaggcgatcagcttcaactgtcacttcggctcccatcctgcacacccacagggctgcagtacagggacttcatccacgtcagcttccatggacaaggtttacggagctgccgtttttagtggctctggatcacaggaaagagtctgttgtggtcgctgtgagggggaccatgtctctgcaggatgtccttacggacctgtcagcggagagtgaggtgctagacgtggagtgtgaggtgcaggaccgcctggcacacaagggtatttctcaagctgccagatacgtttaccaacgactcatcaacgacgggattttgagccaagccttcagcattgctcctgagtaccggctggtcatagtgggccacagcctcgggggaggggccggccgctctagagggttctacctcacgaacg

SEQ ID NO: 63028 - DNA, 481 bp, Homo sapiens
taattcccgggtcgacgatttcgtagctcgggaccgggagcagcggctctggcggtcgtggcggtcggagatccgagagctctgcttctctgaaaagcgtgtggctttctggacttggtctacacctgacagtcactggaatgctactccaggccttagaagaaagtgaaactaattttaaaggccccttattctttctgttacctgcctgctgaagtgaaaataaatctccctgctcctttattctaaactgattttactttcccatctcaaaaacgtgtgcagggagcaggagccctcctacccgagccccagctgtattggaaaccctcctaagtcagagtgatgggtcaggaatctaggcaagcctgtatggcccaatccaacaggagggtatcagtccaatacaggtaggaggtatggaagaaggcatgcttatgtcagtttcaggccacccacgagccacgcgggaaaggattgt

SEQ ID NO: 63029 - DNA, 781 bp, Homo sapiens
tttcgtagcgaacatgctgtgtgggctcagccgggagacccctggagaggcggacgatgggccctactccaaaggaggcaaggacgcaggaggggccgacgtttgcctggcgtgccgcagacagagcattccagaggagttccgagggatcactgtggtggagctgatcaagaaagaaggcagcacgctgggcctgactatctcaggtggcaccgacaaggatggaaagcccagggtctccaacctgagacctgggggacttgcagccaggagtgatctgctgaacattggtgactatattcggtctgtgaacgggatccacctgaccaggctccgccacgatgagatcatcaccctgctcaagaatgtgggcgagcgcgtggtgctggagctcctgagaataaccccaggatcatttcaaagacagtggacgtctccctctacaaggagggcaatagctttggctttgtccttagaggtcagtgaaagaattgcccttggtattggggcagcaagaaagaggctaatactaattccatgtgtgtgctgtttggatttgaatgtaatttatgtgtatctcagttctgactttgaagaacacagggccgttaaggtaagtattcagtgggaaaatctgccaagcaatgaagtaggcttggttggggagagtgagaggagaaagttgtaccggaaaatgatggtgaaagctgctaccgagactgagaacaaagtctggagcttcatagagatcagggaaaaggggaaataaggtgagtgtatt

SEQ ID NO: 63030 - DNA, 852 bp, Homo sapiens
ggcgggggccgggccggagcgggctccagagacatggggtcgaccgactccaagctgaacttccggaaggcggtgatccagctcaccaccaagacgcagcccgtggaagccaccgatgatgccttttgggaccagttctgggcagacacagccacctcggtgcaggatgtgtttgcactggtgccggcagcagagatccgggccgtgcgggaagagtcaccctccaacttggccaccctgtgctacaaggccgttgagaagctggtgcagggagctgagagtggctgccactcggagaaggagaagcagatcgtcctgaactgcagccggctgctcacccgcgtgctgccctacatctttgaggaccccgactggaggggcttcttctggtccacagtgcccggggcagggcgaggagggcagggagaagaggatgatgagcatgccaggcccctggccgagtccctgctcctggccattgctgacctgctcttctgcccggacttcacggttcagagccaccggaggagcactgtggactcggcagaggacgtccactccctggacagctgtgaatacatctgggaggctggtgtgggcttcgctcactccccccagcctaactacatccacgatatgaaccggatggagctgctgaaactgctgctgacatgcttctccgaggccatgtacctgcccccagctccggaaagttggcagcaccaacccattggttcagttcttttgtttcctcggagaacagacatgccctgcccctcttcacctccctcctcaacaccgtgtgtgcctatgaccctgtggaatacgggatcccctacaaccacctgtatt

SEQ ID NO: 63031 - DNA, 389 bp, Homo sapiens
tgcccagcagaacgcagtgctcagcagaagatggcctgctattcaacagcagagaagaatcccaaagcttgttgggtcagttttgggggactgcattttcatgaaccagagctgcatccagcaggttggggcctgtatgcaccctagccaggatggagtgggaaggaagtgcgcaattctgactccacaaacacctttgttgcagagctattttgctgcatgtgaggatgagatccctgccatccggaaccatgacaaggtcctacagcgtctgtactgcaagacctctcctctggctactgggtgctcgtggtgcattttactcggagagaggccatcaagcagatcgaggtgctgcagcacgtggccaccaacctggggcgcagccg

SEQ ID NO: 63032 - DNA, 852 bp, Homo sapiens
  misc_feature (1)...(852): n = a,t,c or g
tttcgttgaggagtcacagttgtgagcaagttcggtgccgcgggctggggtaggcggcagtggggtccctggctttggggcactgggaagatcgcgagtgggaaggtcctcccgcggtcctccgggtcatctttcctcctgaggagcagcatatttcgcatctgccggagattagaattacttgttattggtaaatagccactatggagactaaggaccagaagaaacaaagaaagaaaaatagtggacccaaagctgcaaagaaaaagaagcggcatctgcaggatctccagctaggagacgaagaagatgcctggaagagaaatcccaaagcttttgcatttcagtctgctgtgtggatggctcgatcctttcacaggactcaggatttgaagacaaaaaagcatcatattccagtggttgatcgaactccactagagcccccaccaatagtggtagtggtgatggggcctccaaagttggaaagagcactttgatacaatgcctcattcggaacttcacccggcagaagttgaccgagatcagaggccctgtgatgatcgtgtcaggtaaaaagctccgactcaccattattgattgtgggtgtgacattaacatgatgattgatcttggttgaagtagcagatcttggtaaagtgagcagggggagnctggggtgttgatggagacttacaggaattgtgataggttatttnccccccnnatgaggggatngggnnntnttgatttttttaanggatcaangncancnacaaggttcaatggntntgntgattctttggttnccgatnaccncnnnnnnnnnnnnnnnnnncntcncccnnnnnnccc

SEQ ID NO: 63033 - DNA, 2059 bp, Homo sapiens
ttttttttttttggcagtgaggactttattggggagggtgactttggcttccagaaaagagggaaggtggggacctagtaacaataaccatttattccaaggaggccctggccctgaacccggggttcccacaggaatcagggaggcacctgagtcccccaggaccagggcatcccaaggcatcatggcagctgcgttgttcaaaaggaagtttcattgagcttcatcttgggaggtgtgaggggagtgccgagaccgctggagggccacggggctggtgtgggtggccgtcggaggtctggcccactccgcaccagttcctggcagcgttccacaaagctgcccccaccacggcgccgggcctcagcctgcggggggcttgggctcccacggtggccagacaaggaggtgttgctggaggctgagtggaggctggtgagggagatgcggggtgaggggctggggagacagccccatgagggagctgaaggagccggcggggccagctcacagtgttccagctgttccatcagctcttgctccgtcaggccacctgcaggggcctggccgaggccgtccatggcggtggttaggtcccacatggccaagctgccgttggcctggccagtgagcaggtagcgccggggccgagagccgagccgccgggagccctcgcactccagcactgtgaaggctgtcgtgggtgagccgtccacggagcgcacggagcacacccgctgcccagtagatgagagacgcacgaagagctggctggcactgggcaccaccttctggatgaacacttgctggtcgtcccgctcaccgtaggggccaatgtcattgccagcactgcagccgccatgcccatctgccgactccagagccaggatcttaaaggaagcgagtggggtggagccgggctgggtggaaatcatgccgcggaagcgagtcacagaccatgtccgcacgtggttgttgtcggcacagactgagatgaggtgcttctccgacagcatgatcttggtgacagggctgcggtgcacagtgaaggtctggaagagctgaggccccgagcccacagtctccgggtgctgcacgatgacccgcacgccccctgagctggtgccataggcgatctcgatccagttcccactgtcacctatctcggagccaccgccttccgcctgcagagcccatagcaggatctcgctgccggtggctgctgccaccatcttgtcatgttcacccaaagccccaccatgcacccgggctgtgagcgccagtcgttcgatgggccagtccaggcgggggctggaaaacaccagctgccagccagaggcttccttcaacctgtagcagactagaaactgggtataggccacagcgatccaattatggtgtccacacaccaggcgcaccatccccggctcctcaggttgtcctgagggtgagggaggggttttctcatccagcattcggcccagcagccctgcattgccaaggttggggggcatcgtgttgctccgtcggacaggggctggccgtcctcctagctgctgaggccccactaggctgtgccggttccgccgcttcactgggaacactggtggcggcaggtaaccattgaagaggacgtttccacaagaagatcgatccaactcctctcgaagctgcaggcgacgaaccagaggagtgagcccatagaactgggcttcatggaggaggctggaaccgtggacacccctgggatccaactctttggtgcgcaggaagttgaggatgggggcgaagactgtagggtccctgtcgatgaagattgctccggtctcatctttcagcgtcgagatgcgtccgctcagaagactggagaagaaggagtctgggatccaggtgagagtctggcgagaggtactgaatctcttgcctcccacattcagatggatgacttccccgggaggcccccgactggggaccccctcggctgcagtagccgctgctgccatggcccccgggcgagccgaacgaaatcgtggacccgggaattccgaaccgttcgtca

SEQ ID NO: 63034 - DNA, 896 bp, Homo sapiens
  misc_feature (1)...(896): n = a,t,c or g
aatcgtggctggtctgagcggcgcgcagatccccgacggggagtttaccgcgctagtgtaccggctcatccgcgatgcccgctacgccgaggcggtgcagctgctgggccgagaactgcagcggagccccaggagccgtgccggcctgtcgctgctaggctactgctactaccgcctgcaggagttcgcgctggcggccgagtgctatgagcagctgggccagctgcacccggaactggagcagtaccgcctgtaccaggcccaggccctatacaaggcctgcctttatgcggaggccacccgggtcgccttccttctcctggataaccccgcctaccacagccgggtcctccacctgcaagctgctatcaagtacagcgagggcgatctgccagggtccaggagcctggtagagcagctgccgagtagggaagggggagaggaaagtgggggcgagaatgagaccgatggccagatcaacctgggttgtttgctctacaaggagggacagtatgaagctgcatgctccaagttttttgccgccctgcaggcctcgggctaccagcctggaccttttccttacaacctgggtttgggcttatttacagcagccgacagtatgcttcagcactgaagcatatcgctgagattattgagcgtggcatccgccagcaccctgagctaggtgtgggcatgaccactnagggcattgatgttcgcagtgttggcaacaccttagtcctccatcagactgctctggtggaagncttcaaccttaaggcagctatagantaccaactgngcaaactatgaggcagctcaanaagccctcactggacatgccacccaggggcagagggaaggagttggaccctgtggaccctaacacaaccagg

SEQ ID NO: 63035 - DNA, 1748 bp, Homo sapiens
ggaatcccatctggagactcgctaagcgtcccagccgcatccctcccgcagcgacggcggcccgggacccgcgggctgtgaaccatgaacacccgcaatagagtggtgaactccgggctcggcgcctcccctgcctcccgcccgacccgggatccccaggacccttctgggcggcaaggggagctgagccccgtggaagaccagagagagggtttggaggcagcccctaagggcccttcgcgggagagcgtcgtgcacgcgggccagaggcgcacaagtgcatacaccttgatagcaccaaatataaaccggagaaatgagatacaaagaattgcggagcaggagctggccaacctggagaagtggaaggagcagaacagagctaaaccggttcacctggtgcccagacggctaggtggaagccagtcagaaactgaagtcagacagaaacaacaactccagctgatgcaatctaaatacaagcaaaagctaaaaagagaagaatctgtaagaatcaagaaggaagctgaagaagctgaactccaaaaaatgaaggcaattcagagagagaagagcaataaactggaggagaaaaaaagacttcaagaaaaccttagaagagaagcatttagagagcatcagcaatacaaaaccgctgagttcttgagcaaactgaacacagaatcgccagacagaagtgcctgtcaaagtgctgtttgtggcccacaatcctcaacatgggccagaagctgggcttacagagattctctaaaggcagaagaaaacagaaaattgcaaaagatgaaggatgaacaacatcaaaagagtgaattactggaactgaaacggcagcagcaagagcaagaaagagccaaaatccaccagactgaacacaggagggtaaataatgcttttctggaccgactccaaggtaaaagtcaaccaggtggcctcgagcaatctggaggctgttggaatatgaatagcggtaacagctggggtatatgagaaaatattgactcctatctggccttcatcaactgacctcgaaaagcctcatgagatgctttttcttaatgtgattttgttcagcctcactgtttttaccttaatttcaactgcccacacacttgaccgtgcagtcaggagtgactggcttctccttgtcctcatttatgcatgtttggaggagctgattcctgacctgaactcatatttaaactctactgccagggaaatgctacattatttttctaattggaagtataattagagtgatgttggtagggtagaaaaagagggagtcacttgatgctttcaggttaatcagagctatgggtgctacaggcttgtctttctaagtgacatattcttatctaattctcagatcaggttttgaaaagctttgggggtctttttagattttaatccctactttctttatggtacaaatatgtacaaaagaaaaaggtcttatattcttttacacaaatttataaataaattttgaactccttctgtataaatgggtcatttttatttttaatgaaaagttattggggttttctctcttgaagggtctcattttaattcccttttccaggccgtatagatcaaatatagtactgtcattactgttggctcttgttttggtcttgacttactaatagtgttaccctgattttcagagggggacagtttatctccagaaaggccaatgtttgtatacacatcagctagactgtatt

SEQ ID NO: 63036 - DNA, 748 bp, Homo sapiens
tttcgtgcggcgactgcagcagcgaaggggaatgggggcggcggtggcagggccggggccggggacgccagcggcacgcggaagaagaagggcccggggcccctggccacggcgtacctggtcatctacaatgtggtgatgacagccgggtggctggttatagcggttggtctggtccgagcatacctggctaagggtagctaccatagcctttattattcaattgaaaagcctttgaaattctttcaaactggagccttattggagattttacattgtgctataggaattgttccatcttctgttgtcctgacttctttccaggtgatgtcaagagtttttctaatatgggcagtaacacatagcgtcaaagaggtacagagtgaagacagtgtccttgtttgttattgcatggacgatcacggaaatcatccgttactccttttatacattcagtctattaaaccatctgccttacctcatcaaaagggccaggtacacacttttcattgtgctgtacccaatgggagtgtcaggagaactgctcacaatatatgcagctctgccctttgtcagacaagctggcctatattccatcagtttacccaactctacaaaaaaaatttttttaattagccaggtatggtggcatatgcttgcagtctcagctgacgctaaggcggcagaaatgcctgctgtacttaagcctgggccatagagaaggaccttgtctctaaataaataaata

SEQ ID NO: 63037 - DNA, 784 bp, Homo sapiens
tcggctctgcaggaattcggcacgagttccttgtggctggagcgcttcccgtagcctcggggaaggagcaggatttataggaccactaagaggaccccatcctcgtgctggaggaacaggaacctctttcacgagctataaaagaaagggaggaatcatgtccacaattgcagctttctatggcggcaagtccattctcatcacggtggccacaggctttctgggcaaagagctgatggagaagctgtttcgcaccagcccagacctgaaagtcatttacatccttgtgaggcccaaggctggccagacactgcagcacagggttttccagatcctagacagtaagctatttgagaaagtcatagaagttcgtccaaatgtgcatgagaagatcagagctatttatgcagatctcaatcagaatgactttgccatcagcaaagaggacatgcaggagcttctctcctgtacaaacataatatttcactgtgcagccactgtacgctttgacgacactctcagacatgctgtgcaacttaacgtcactgccacccggcagctcttgcttatggctagtcagatgccaaagctggaagcctttatacatatctctactgcctattcaaattgtaacctgaagcacatcgatgaagttatctatccgtgccctgtggagccaaaaaaaatcattgattcccttgagtgggttagacgatgctattattgacgagattacacccaagctgatcagagattggcccaatatttatacctacaccaaggc

SEQ ID NO: 63038 - DNA, 597 bp, Homo sapiens
gggccggccgccatcgcgcactggggctccgggcggctgggaccggcctggggtagctgtgcagcaggtgggtcggtcccggggatgcagcgcgggggtcagagagcgaccccaacagggtagacggtctgtgggttctggcaccacctgagcccactgggcatctggtcatccctggcacctctcctttggagccaccttgtccctggctagacagtcacattttccagtgccgttttggaaagatgttgcctttggagaaggcgtttgcctcccccaggagctccccagccccgccggatctgcccacgccggggtcagcagccggagtccagcaggaagaacccgagaccatccctgagaggacccctgctgacctggagttctcccgcctgcgtttccgggaatttgtctacccaggaggctgccgggccccaccagaccctggcccggctgcatgagctgtgccgccagtggctgatgcctgaggcgcgctccaaggagcagatgctggaagcttgctggtgctggagcagttcctggcatcctgcctgataaggtccggccctgggtggtggcacagtaccctgagagctg

SEQ ID NO: 63039 - DNA, 994 bp, Homo sapiens
ggctggagtcacatggcagatttgcatttaaaataaggttactagaaagggggcaggcatgggcagagttctgtccggctctggagcaggagatggtgtcccgggctcgtgtgtggtggtgatggtcaggagccagggccagcagcaccccatgtggacccgagagggcagtatgacaagaggaggcacagggtttatttatcgtagtacaggaaatattttgtcagccggggcttattacatgaaggatgtgttgtactttctggtcaccttacattgattataaaaaatattacatataaaatataaagacttacagctaggtagcatgtgtatcatctgtgtcataaaactccttataagaaggtgctgtgtatataacatcctgtttccataaccgcacatacagcagcaaggagatctttgtgagtgatccatttaaacacgttcttgataattttgagttttttttctcattttagctaatgtatgtgttgtgaagttagaaggtaccccttatctttgtaaaactgatgaagtgggagaaatatgcgtcagttccagtgcaactggcacagcgtactatggattgcttggaatcacgaaaggatgtgtttgaggcagttccggtcaccacaggaggagcacccatctttgacaggccattcaccaggacaggcctgctgggcttcatcgggcctgacaacctggtcttcatcgtgggcaaactggacgggctgatggtcactggagttcgcagacacaatgcagatgacgttgtggccaccgcactggccgtggagcccatgaagtttgtctacagaggcaggtgatgcgctgcggacccccacgccgggagtagattccttcatttgcagctcgggaagtctttgtgcagtagatggaaagcccagcaaacttgaattcacaaagcctaaaaattgttgtacatcagaaaactcctaaagtaaaaggaaaatatttgcagcaaaaa

SEQ ID NO: 63040 - DNA, 1771 bp, Homo sapiens
cctccttgccttctgccatgattgtgaggcttccccagccacatggaactattattttcatgatgcactaggatgaagcacaccctttctcctagtcttgaggaaacgtcgatattcagaatatttaaacgcaggcactgaccaatcagaagagtttctggccaacgttccacacttgagggaaatgacattatctgagccctgaagaaaaacgttgtagatattctccagatcaaagcatcgacaggaagattttagatgttgaagttcgtaatatttcctaaagcaggttgtctgcattcaaaagagcattctattaaagctaccttaatttggcgcttatttttcttaatcatgtttctgacaatcatagtgtgtggaatggttgctgctttaagcgcaataagagctaactgccatcaagagccatcagtatgtcttcaagctgcatgcccagaaagctggattggttttcaaagaaagtgtttctatttttctgatgacaccaagaactggacatcaagtcagaggttttgtgactcacaagatgctgatcttgctcaggttgaaagcttccaggaactgaatttcctgttgagatataaaggcccatctgatcactggattgggctgagcagagaacaaggccaaccatggaaatggataaatggtactgaatggacaagacagttagtcatgaaagaagatggtgccaacttgtatgttgcaaaggtttcacaagttcctcgaatgaatccaagacctgtcatggtttcctatcctgggagcaggagagtgtgcctatttgaatgacaaaggtgccagtagtgccaggcactacacagagaggaagtggatttgttccaaatcagatatacatgtctagatgttacagcaaagccccaactaatctttagaagcatattggaactgataactccattttaaaatgagcaaagaatttatttcttataccaacaggtatatgaaaatatgctcaatatcactaataactgggaaaatacaaatcaaaatcatagtaaaatattacctgttttcatggtgctaatattacctgttctcccactgctaatgacatacccgagactgagtaatttataaataaaagagatttaattgactcatagttccacatggctggggaggtcttgcaatcatgacagaaggcaaatgggaagcaaagtcatgtcttatgtggtggcaggcagggggacttgtgcacaggaactcctatttatacaaccatcagatatcttgagacaagaacagtatggggctccctggtgtgattccgtcctgcgcggctgttctctggagcagcattcatttatcttcgtctgccttgtctcctacctaagtgtgtgtcgccacccgatggaagattcgatggacatggacatgagccccctgaggccccagaactatcttttcagttgtgaactaaaggccgacaaagatgatcactttaaggtggataatgatgaaaatgagaccagttatctttaagaacggtcagctcaggggctggtgcaaaggatgaactgcacattgttgaagcagaggccatgaatgacgaaggcagtccaattaaagtaacactggcaactttgaaaatgtctgtacagccaacggtttctcttgggggctttgaaataacaccaccagtggacttaaggttgaagtgtggttcagggccagtgcatattattggacagcacttagtagctgtgaaggaaggtgcagagtcaga

SEQ ID NO: 63041 - DNA, 687 bp, Homo sapiens
tttcgtcgtggagtgacggtcccacggcagcgcggcctggctctatcacccaggatggagtgcagcatgatctcttctaactgcagcctcgacctcctgggcttaagcgatcctcctacctcagcttcctgtgtagctgggaccacaggcgtgagccaccaagtcggacaagattgacttctaaagactcttggtatgtgaggaagaaacctggaagaggaagaggaaagcaaaggagtcagggatggctcttcctcagggtctattgacattcagggatgtggccatagaattctctcaggaggagtggaaatgcctggaccctgctcagaggactctatacagggacgtgatgctggagaattataggaacctggtctccctggagttgtcaggggagtgtccattggcagcacctgcctcctgagtgtctcccaggccatcaccatcagccccaggagctcaggtgggcagagcttaaagggaacgcccccaagcacgctggctcctgtgtgttcctcagctggctcctccctggtcaatatcattgttctcatgcacgtgaccggcaagtggagcaacaaaaataccacgaagacaaaagatctgggatactgttctgctgctgatcacgaggacaccagagagtcgctgacgcggcactgctgtccttccctgatgtgatct

SEQ ID NO: 63042 - DNA, 1794 bp, Homo sapiens
  misc_feature (1)...(1794): n = a,t,c or g
tttcgtccggtgtgctaggagatgatcggggaaagcatagtcccctgtctgtggcaccagacactcccgactgtgcgctgactctccccgcccagccagcagccttttccagagaggctgtggtccatagcctctgttcgttttcactgcaggaccaggcacgaaagttaaaacaaaatgaagattttttctgaatctcataaaacagtgtttgttgtggatcactgcccttatatggcagaatcttgcaggcagcatgtcgagtttgatatgctggtgaagaatagaacccaaggaatcattcctttggcccccatatctaaatcattgtggacttgctcagtagaatcttccatggaatattgtagaataatgtatgatatatttcctttcaaaaagctgatccggaaactgaggtgaattttattgtgagtgactctggagcacatgttttaaattcttggactcaagaagaccaaaatttacaggagctaatggcagcattagccgctgttgggcctcctaatcctcgggcagatccagagtgctgcagtattctgcatggccttgttgcagcagtggaaactctctgcaaaattactgaataccaacatgaggctcgtactctactcatggagaatgcagaacgtgttggaaatagaggacgaataatctgtattactaatgcaaaaagtgatagtcatgtgcgaatgcttgaagactgtgtccaggaaacgattcatgaacataacaagcttgctgcaaattcagatcatctcatgcagattcaaaaatgtgagttggtcttgatccacacctacccagttggtgaagacagccttgtatctgatcgttctaaaaaagagttgtccccggttttaaccagtgaagttcatagtgttcgtgcaggacggcatcttgctaccaaattgaatattttagtacagcaacattttgacttggcttcaactactattacaaatattccaatgaaggaagaacagcatgctaacacatctgccaattatgatgtggagctacttcatcacaaagatgcacatgtagatttcctgaaaagtggtgattcgcatctaggtggcggcagtcgagaaggctcgtttaaagaaacaataacattaaagtggtgtacaccaaggacaaataacattgaattacactattgtactggagcttatcggatttcacctgtagatgtaaatagtagaccttcctcctgccttactaattttcttctaaatggtcgttctgttttattggaacaaccacgaaagtcaggttctaaagtcattagtcatatgcttagtagccatggaggagagatttttttgcacgtccttagcagttctcgatccattctagaagatccaccttcaattagtgaaggatgtggaggaagagttacagactaccggattacagattttggtgaatttatgagggaaaacagattaactccttttctagaccccagatataaaatcgatggaagtcttgaggtccctttggaacgagcaaaagatcagttagaaaaacatacccgttactggcctatgatcatttcacaaaccaccatttttaacatgcaagcggtagttccattagccagtgttattgtgaaagattctctgacagaagaagatgtgttaaactgtcaaaaaacaatatacaacttagttgatatggaaagaaaaaatgatcctctacctatttccacagttggtacaagaggaaagggccctaaaagagatgancaataccgtatcangtggaatg

SEQ ID NO: 63043 - DNA, 1223 bp, Homo sapiens
tagcggttccctcgtggctctgcgcggaggtccgcctcctcccttccctcccccatcccgcgcgctgcctccgcctccttcttctgcctccaccctcaacccccatccccgcctgacgggagctagccctcagtccgcccgagctgtggttgtgggcgccggacaagtccaaggcgcctcctcccaatatggacagccgctacaacagcactgcgggcatcggggacttgaaccagctgagcgctgccatcccggccacgcgggtggaggtgtccgtgtcctgcagaaatcttcttgacagagacacattttctaaatctgatccaatttgtgtcttatatgtacaaggagttggaaataaagaatggagagagtttggaagaactgaagtaattgataatactttaaatcctgattttgtaagaaagtttattctggactacttttttgaagaaagagagaatcttcgttttgacttgtatgatgttgattcaaagagccccaacttatccaaacatgactttctgggacaagtgttttgtacattgggagagatcgttggttcacagggaagtcgcctggaaaaaccaatagtaggaattccagggaagaaatgtggtacaatcatacttacagcagaggaattaaactgttgcagggatgccgttttgatgcaattttgtgcgaacaaattggacaagaaggacttctttggaaaatcagatcctttccttgtattttatcgaagtaatgaagatggcagttttacaatttgtcacaagacagaagttgtcaaaaacactctaaatccagtatggcaagcattcaagatctcagtcagagcattatgtaatggagactatgacagaacaatcaaagtagaggtgtatgactgggaccgagatggaagtcatgatttcattggagaatttacaacaagctatagggaactttctagagggcagtcacaattcaacgtatatgagagtgcttgttcctcaaattatctggaagaattgcggaattcttcaaatctcaagatcaaacattacctttctcctccaaacaacctgctccatatttaatagaataaccattgaaccatctgaaaaatttgtgatcttgccagtgacgcccaacatccttactggtgcatgttttcctgtagaatttgttcaattagggctttctgaaatacacaataaataatacgtggaatgaaa

SEQ ID NO: 63044 - DNA, 1554 bp, Homo sapiens
ttttttttttttagaaatggtatagtaagagatattgtttcactttatttataatagtaagaaactggaaacaaatgtctaacaataggaaactggtttaaaaaaatcatagaaccataatttattttaagccctaaaatgaaattgtgaaccattaaaaatatgttgtaaaactatttaatgtcataaagagaactaactctggtttttatggtccatctaccaatgtcttccgagcagttctctctcctcaaacctcctctacctctttactcaccctcactcagcctaaccttgcttccgattttattaaggaaatccaatcaatcagaagaggtttctacaatttactatcacatttacccaccagccatcacctctgccatatatgctcctctcctattccaatggctggaatgtctcagggaagaccaagcccttcacttgtacattagatcccagctctctgtcccatccattatggaagctgcacatcaccccagtcacacaagagggcactctgaatgaggaatcttgtaaactactccaaatcaccagtcttgaacagtcttgaacacgcatgggcgttaaagtactctttatctgtacattgctacctttttatgtctattttatttacatgacttcttttcagtatccaaaactttagccaacaattcttgtgtttcaggagtcagtggagcatgagaaaacttgcagtattctccctgataacattttgttcctgtatggtaaaacttacaaggatattcattatgcaaatacagacagttttcacctctggtacaatatccttgtacataaaacttacacatttcctttttcttttctatctctgcatcatgatcaaatttacactggtctcccttaatacatttcctttcaagaaaatatttacaaatttgttttcccttgcgttccactgtatgttggttgatgaatgcctgactcaaatgctgctgcttctctttaggtttaccatcctcttcctgtgagccgctgttcctcagcaaagcatttgatcctttgtttccagggccaggcccattttcgcttcattttcttctgtttgccattcttgtgaccagctttaagatttttatttttttgtttagcagcctgtggggtatcttttactccttctttctttgtagattcttcaggttgagcagcatttgccatttctctggcttgtatgtactgttgaagctctttggcaaaattatcttctgattcctgactgcagatatcattatcactatatacatcatagtccttacttcttgattttctatgcagcgaactttttggtgatattgcagagtgtctaaattttttgggaatttgctcgcactccagtttaattttctcttcttgtgtttcttcaacttctgtatctatttcatcatcgattctttcgtcagagtccgtggccgttttgccgagggccgggttggggggttttgagaaaagattctcaaaatccatgacccagacaggtcctccctttcgcgagccgggaagctacagagt

SEQ ID NO: 63045 - DNA, 1016 bp, Homo sapiens
cgtagtttggatcctctacagcggccgcgggcgcggggtccagggacaccggagagccctaggcggcactaggggttctccgtccccaaagagccagccggggtggcgcgagcctagcgataaggcaccgggagcgaggaatgtgcccatcctcaggccgtgtcccagaagcttttgttgacaattccagtttccgaacaaaacatttcggcaatggtgagggcttcgatcccttctctgatttgctgtcagccatgaacggatggatgtgatgcctgctagccaaaaggcttccctctgtgtgttgcagtcctgtggcattatgcatgccccctcccagtgaccccaggctttttatggctgtgagacacgttaaaatttcaggggtaagacgtgaccttttgaggtgactataactgaagattgctttacagaagccaaaaaaggtttttgagtcatgatgcaagaatctgggactgagacaaaaagtaacggttcagccatccagaatgggtcgggcggcagcaaccacttactagagtgcggcggtctttcgggaggggcggtccaacggagagacgccggccgtggacatcggggcagctgacctcgcccacgcccagcagcagcagcaacaggcacttcaggtggcaagacagctccttcttcagcagcaacagcagcagcaagttagtggattaaaatctcccaagaggaatgacaaacaaccagctcttcaggttcccgtgtcagtggctatgatgacacctcaagttatcactccccagcaaatgcagcagatcctccagcaacaagtgctgagccctcagcagctccaggttctcctccagcagcagcaggccctcatgcttcaacagcagcagcttcaagagttttataaaaaacaacaggaacagttgcagcttcaacttttacaacaacaacatgctggaaaacagcctaaagagcaacagcaggtggctacccagcagttggcttttcagcagcagcttttg

SEQ ID NO: 63046 - DNA, 887 bp, Homo sapiens
gaggcgctggagctatgggtccgaaccgcggtgtctgaacccagaaggtcacctcatcctaacccgaatcctgaagcagcgagagagcggcgactgttcacaggtctgcagcccggacccggcgtcgggacactgaggcgttcgcgggagaggcatcatctggctgcaaagaagagaacacactgtgtttgagggaggaggaaggaggatcagagtttaaactcctgccataatgcagcagggcactgtggcatttgaagatgtggctgtgaacttttcccaggaggagtggagtctccttagtgaggttcagagatgcctttaccatgacgtgatgctggagaactgggtacttatatcctccctgggttgttggtgtggatcagaagatgaggaggcaccttctaagaagagcatttctatacaaagagtgtctcaggtcagcactcctggggcaggtgtgtctcccaagaaggctcactcttgtgaaatgtgtggcgcgatcttgggagacattttgcacttggcagatcatcaggggacacatcacaagcagaaactgcacaggtgtgaggcatgggggaataaattgtatgatagttcaaaccgtccgcaccagaatcagtaccttggagagaaaccctatagaagcagtgttgaggaagcattgtttgtgaagaggtgtaagttccatgtgtcagaggagtcatctatcttcattcagagtggaaaggactttttgcccagctcaggattactgctgcaggaggccactcacactggggagaagtcaaacagcaaacctgagtgtgagtctccctttcagtggggagatactcattacagctgtggagaatgcatgaaactttctagcacacgaaatcgtt

SEQ ID NO: 63047 - DNA, 415 bp, Homo sapiens
tttcgtaacaacagccgccaccacagcagcctgatgcccatcagcagcttccccccagcgcccccaactcgggggtggccctgccagcccttgtgcccgggctgccagggacagaggccagcgcgctgcaacacaagatcaagaactccatctgcaaaactgtacaatctaaagtggactgcattttgcaagaagttgagaagtttacagacctagagaaactctacctctaccttcagctgccttctggtctcagcaatggagagaaaagtgatcagaatgccatgtcatctagtcgggcacaacaaatgcatgccttttcctggattcggaataccctagaggaacatccggagacttcactgcccaaacaggaagtctatgatgagtacaagagctattgtgacaatcttgg

SEQ ID NO: 63048 - DNA, 724 bp, Homo sapiens
aggatctattttatgatgctgcgattatttgccttatttgaaagtcatatcaaaaatatcatctctgaatataagtcagcaatccagagtcagaagaggagaaggccacggtacagaaaacgtctaagaagcagcagcagttcattatctagtagtggagcacctagtccaaaagggaagcagaaacaaatgaagttgcagcctaaaaatgaccagaatacctcagtatctcatgccaggactagctctcctttctcatctcctgtttcagatgctgctgaagggctttcactatatctacttgatgatgagccagatgggccattttcttcatcgagcttcggtggatatagccgaagtggaaatagccatgacccagggaaagccaaatcatttcggaatagagttttgccagttaaacaagatcactcccttgatggaccccttacaaatggtgatggcagagagccccggacaggaatcaagagaaaactacttagtgcatcagaagaagatgaaaacatgggaggagaagataaagagaaaaaagaaacaaaagagaaatctcatttatccacctcagagagtggagagttaggatccagtttaagttctgaaagtacctgtggttctgactctgactctgaatcaacttccagaacacatcaagattacgtagatggagaccatgaatatagcaaattcatacaaaccagactgtatt

SEQ ID NO: 63049 - DNA, 1049 bp, Homo sapiens
ccagcgtggtggaattccagggaatgcaccaggtgtgatccttaaagtcgagggacttttcatctttcaaaatgcattcgttggccaggtgtggtggctcacgcctgtaatttcagcactttgggaggccgaagtgggcagatcacctgaggtgaggagttcaagaccagcctggctaacatggtgaaaccccatctctactaaacaaacaaaaattagccgggcatggtggtgcacacctgtaatcccaggtactcaggaggctgaggcaggagaatcacttgaacccgggaggcggaggttgcagtgagtcgagatcataccactgcactacagcctgggcgacagagcaagattccatctcaaaaaaaatgcattcttcttctcttatctttgtccatgacataagcaggacagcttaagttatagagggaggacgtgaagcccagagaaagatgggacttgcctgaggtcacacagcaggtcacagaactgtggtggggacctggctgtgctgcctccagcctctctgctgtagcacacctacccttcactgttccaaggagagctcgacctcaaaggtgttagtgctttggggtcaaggctgccttggggttcaatcctgtggctgtgccccctcagccttttttcttcccgtccccaggtgtgccacggaccacaatgtggacaacaccacagagatgctgcaggagtggctggcggctgtgggcgatgactatgctgctgtggtctggaggcctgagggcgagcccaggttctacccagatgaagagggtcccaagcactggaccaaagaaaggcaccagtttctgatggagctgaagcaggaagccctcacctttgccaggaactggggggccgactatatcctggagccacgctgggtctctggcaggaccactcagtgaactccttggggggctgcagcccaggcagggctggagcctgtgacgtcccctcctcaaagtttgcagacacagacaacattctgaccaacaatcagactctgcggcttctcatggggcagg

SEQ ID NO: 63050 - DNA, 773 bp, Homo sapiens
cccagggacccctggcccagcctccccacctgccttccctgccaaggaccccgatccaccctactccgtggagaccccctatggctaccgcctggacctggacttcctcaagtacgtggatgacatcgagaagggccacacgctgcgacgcgtggcagtgcagcgccgcccccgcctgagctcgctgccccgtggccctggctcctggtggacgtccactgagtcgctgtgctccaatgccagtggggacagccgccactcagcctattcctactgcggccgtggcttctaccctcagtatggtgctctggagacccgcggtggcttcaatccgcgggtggagcgcacgctgctggatgcccgtcgccgtctcgaggaccaggcggtcacacccaccggcctgggctccctgacccccagtgcggccggctcgacagcctccctggtgggcgtggggttgccaccccctgacaccacggagttcaagactgtccacaccggtgcctcccagtgccgggcacctggctcacgtgcgggagcagatggcgggtgccctgcggaagctgcggcagctggaggagcaggtgaagctgatccctgtgctccaggtgaagctctcggtgctccaggaggaaaagcggcagctcacagtacaacttaagagccagaagttcctgggccaccccacagcgggccggggtcgcagcgagctctgcctggacctccccgatcccccagaggacccagtggcactggagacctcgaggtgtggc

SEQ ID NO: 63051 - DNA, 977 bp, Homo sapiens
aatgttttttttttttgggcagtgaatgaaccagtgctttaataatgaagaacaaggcagctgtcggcattgcctggagacctgtgactcccacttactgggcagttaaacggggcagagcagggaaagagggtgtcagcaccgcagggagtgctactggacctcagagaagcagaaatggggtgctgggcaaagtgcagccccaggacctcagggcagcagtccccgaagaaggaggctggcaagggccaagaggtagagggaagctttggagcccacgttgtgggaagtggttggtgcagacgtgggggttaagctgtttacatttgcacactcaaactttcgaaagatgactcctccaagagtcttgttttcaccagacaggaactgacaggtggcgttactgacgttggaacagcctttcagcacgagactcttagactcaatgtcattcttaagttctgcaactagaaagacacactgttcttcttcatagcatttccagggcttcccacgacaggaagttccattagattcataacaagcagggcactctgcgttgctggacacgttcttcaggggagggtccagggcatcgctggtgttgctgcattcctttccttcgcagcactggcttacaaaatgaaagtgttcttcagcagacacgtggacagtgaaggctgtaatgtgtgtctcctcactgcagttctccgctgagcagaacatattctggtataatctgactggtgtctctagagaggagctggctgaggagctgatacagctggtgttggcatgtgagggacattcagaggcaatgctgttgacacaggatttttcccatgaattacactgcacgcagctcagagattctgaggagacaagacatccaacaccagtcaacattcagtagacatttatagagcatactctactctaggaaaagcactgctcccgtctgtctgtcgacgcggccg

SEQ ID NO: 63052 - DNA, 641 bp, Homo sapiens
tttcgtctgagacccagaagggcctgcgctcagctgctctggcaccccgctgcagggatggcctcctgggctaagggcaggagctacctggcgcctggtttgctgcagggccaagtggccatcgtcaccggcggggccacgggcatcggaaaagccatcgtgaaggagctcctggagctggggagtaatgtggtcattgcatcccgtaagttggagagattgaagtctgcggcagatgaactgcaggccaacctacctcccacaaagcaggcacgagtcattcccatacaatgcaacatccggaatgaggaggaggtgaataatttggtcaaatctaccttagatacttttggtaagatcaatttcttggtgaacaatggaggaggccagtttctttcccctgctgaacacatcagttctaagggatggcacgctgtgcttgagaccaacctgacgggtaccttctacatgtgcaaagcagtttacagctcctggatgaaaaagcatggaggatctatcgtcaatatcattgtccctactaaagctggatttccattagctgtgcattctggagctgcaagagcaggtggttacaacctcaccaaatctttacttttgaatgggcctgcaaaggatacggg

SEQ ID NO: 63053 - DNA, 806 bp, Homo sapiens
  misc_feature (1)...(806): n = a,t,c or g
tttcgtgccgattcccagaacacgaaggggggaaaaaacgcttctaatgatccctcagaacttgcatattttcatacgcttttctggggggaggcactaattggggcgcttttcctttgcgaacttacttatcttaaagtcggagcggaaaataaagcacgcacgcaacccaatttccggagaaccgagattgcgacgaacaaccaggaagcggctgggttgagagctgtccccggttctccgttctgctctcgggggcaccttccggggttcctaagccgcggggcccctcgctgcccctcgaggccctttccctgacctaggctttggcctgggctactcgttccggagccgccatgtcgtccgacttcgaaggttacgagcaggacttcgcggtgctcactgcagagatcaccagcaagattgcgagggtcccacgactcccgcctgatgaaaagaaacagatggttgcaaatgtggagaaacagcttgaagaagcgaaagaactgcttgaacagatggatttggaagtccgagagataccaccccaaagtcgagggatgtacagcaacagaatgagaagctacaaacaagaaatgggaaaactcgaaacagattttaaaaggtcacggatcgcctacagtgacgaagtacggaatgagctcctgggggatgatgggaattcctcagagaaccagagggcacatctgctcgataacacagagaggctggaaaggtcatctcggagactagagctgataccaaatagcagtgaacgagcaattgtcagagatntgaaaccttag

SEQ ID NO: 63054 - DNA, 746 bp, Homo sapiens
tttcgtggcggaacggaggaggaggcggtggtgtcccggctgcggggtaggagtccgcggcagcctccgggtaagccaagcgccgcgcagtgctgagttcccgcacgccgcagagccatggagatcggcaccgagatcagccgcaagatccggagtgccattaaggggaaattacaagaattaggagcttatgttgatgaagaacttcctgattacattatggtgatggtggccaacaagaaaagtcaggaccaaatgacagaggatctgtccctgtttctagggaacaacacaattcgattcaccgtatggcttcatggtgtattagataaacttcgctctgttacaactgaaccctctagtctgaagtcttctgataccaacatctttgatagtaacgtgccttcaaacaagagcaatttcagtcggggagatgagaggaggcatgaagctgcagtgccaccacttggccattcctagcgcgagacctgaaaaaagagattccagagtttctacaagttcgcaggagtcaaaaaccacaaatgtcagacagacttacgatgatggagctgcaacccgactaatgtcaacagtgaacctttgagggagccagcaccctctgaagatgtgattgatattaagccagaaccagatgatctcattgacgaagacctcaactttgtgcaggagaaacccttatctcagaaaaaacctacagtgacacttacatatggttcttctcgccc

SEQ ID NO: 63055 - DNA, 665 bp, Homo sapiens
  misc_feature (1)...(665): n = a,t,c or g
tttcgtctcccactgcctttccttcttcccgcgagtcagaagcttcgcgagggcccagagaggcggtggggtgggcgaccctacgccagctccgggcgggagaaagcccaccctctcccgcgccccaggaaaccgccggcgttcggcgctgcgcagagccatggaattctcctggctggagacgcgctgggcgcggcccttttacctggcgttcgtgttctgcctggccctggggctgctgcaggccattaagctgtacctgcggaggcagcggctgctgcgggacctgcgccccttcccagcgccccccacccactggttccttgggcaccagaagtttattcaggatgataacatggagaagcttgaggaaattattgaaaaataccctcgtgccttccctttctggattgggccctttcaggcatttttctgtatctatgacccagactatgcaaagacacttctgagcagaacagatcccaagtcccagtacctgcagaaattctcacctccacttcttggaaaaggactagcggctctagacggacccaagtggttccagcatcgtcgnctacttaactcctggattccatttttaacatcctgaaaggcatacattgaggtgatggctcattctgtggaaatgatgctgggtaagtggg

SEQ ID NO: 63056 - DNA, 518 bp, Homo sapiens
tttcgttacagccagagctgggcggtggcgggcgctgctgaaggagtctcgctgagctcgaggaggtggcgcgatggagggactggaagagaatggaggtgttgtccaagttggagaattgttaccttgcaagatttgtggaagaacattctttccagtagcattaaaaaaacatggacccatttgccagaagactgcaactaaaaaacggaagacttttgattcaagcagacagagagctgaaggaactgatattccaacagtaaaacctctcaaaccgaggccagaaccaccaaagaaaccatctaattggagaaggaaacatgaagaattcattgctaccataagagcagctaaaggccttgatcaggccctcaaagagggtggcaaacttcctcctcctcctccaccttcttatgatcctgattatattcaatgtccatattggtcagaggaagattccaatggaaaatgcagctgatagacatataaatttctgtaaagaacaggcagcacgt

SEQ ID NO: 63057 - DNA, 833 bp, Homo sapiens
tttcgtaaaggatgggtttcaatgtaattaggctactgagcggatcagctgtagcactggttatagcccccactgtcttactgacaatgctttcttctgccgaacgaggatgccctaagggctgtaggtgtgaaggcaaaatggtatattgtgaatctcagaaattacaggagataccctcaagtatatctgctggttgcttaggtttgtcccttcgctataacagccttcaaaaacttaagtataatcaatttaaagggctcaaccagctcacctggctataccttgaccataaccatatcagcaatattgacgaaaatgcttttaatggaatacgcagactcaaagagctgattcttagttccaatagaatctcctattttcttaacaataccttcagacctgtgacaaatttacggaacttggatctgtcctataatcagctgcattctctgggatctgaacagtttcggggcttgcggaagctgctgagtttacatttacggtctaactccctgagaaccatccctgtgcgaatattccaagactgccgcaacctggaacttttggacctgggatataaccggatccgaagtttagccaggaatgtctttgctggcatgatcagactcaaagaacttcacctggagcacaatcaattttccaagctcaacctggccctttttccaaggttggtcagccttcagaacctttacttgcagtggaataaaatcagtgtcatagggacagaccatgtcctggacctggagctccttacaaaggcttgatttatcaggcaatgagatcgaagctttcagtggacccagtggttt

SEQ ID NO: 63058 - DNA, 559 bp, Homo sapiens
cctccctgctgtgggctggcctgggaggaagggggtggggtgcacttacatttgcaggtctttccagcccctggggcagcctgattaaccagcttctccagggccaagctgttgggggtgaggtgcagcccgaagcagccagaccagcccctgagcctcccgggtgctggcagctgtcatggggctaccctgggggcagcctcacctagggctgcagatgctcctcctggcgttgaactgtctccggcccagcctgagcctggagctggtgccctacacaccacagataacagcttgggacctggaagggaaggtcacagccaccaccttctccctggagcagccgcgctgtgtcttcgatgggcttgccagcgccagcgataccgtctggctcgtggtggccttcagcaatgcctccaggggcttccagaacccggagacactggctgacattccggcctccccacagctgctgaccgatggccactacatgacgctgcccctgtctccggaccagctgccctgtggcgaccccatggcgggcagcggaagcgcccca

SEQ ID NO: 63059 - DNA, 3556 bp, Homo sapiens
gtgacaagcaccagttcaagaatgagcaggtgatgtatcgcttccgctcggacgatggcacctacaaggcccaaagtgagctggaggacatcatgtccaagggttgtgaggctttactgccgtcttcacagcctctacaccccggtgatcaaagtccgtgattacctcctgaagacatacaagtcagtgcttcccgggagcaagctggtggactggctgctggctcagggagactgccagactcgggaggaggcagtggcgctcggcgtgggtctgtgcaacaatggcttcatgcaccacgtgctggagaagagcgagttcagggatgagtcccagtacttccgctttcatgctgacgaggagatggaggggaccagcagcaagaacaaacagcttcgcaacgacttcaagctggtggagaacattctggccaagcgcctgctgatcctgccccaggaggaggactatggctttgacatcgaggagaagaacaaggctgtggtggtgaagtccgtccagaggggctcgctggctgaggtggctggcctgcaggtggggaggaagatctactccatcaatgaggacctggtgttcctgcggccgttttcagaggtggagtccatcctcaaccagtccttctgctcccgccgccctctgcgcctcctggtggccacgaaggccaaagagatcatcaaaatccccgaccagccggacacactgtgcttccagattcgtggagctgccccaccgtacgtctatgctgtggggagaggctctgaggccatggctgcagggctctgtgctggtcagtgcattctgaaggtcaatggcagcaacgtgatgaacgatggtgcccctgaggtcctggagcacttccaggcattccggagtcggcgcgaagaggccctgggcctgtaccagtggatctaccacacccatgaggatgcccaggaagcacgagccagtcaggaggcctccactgaggaccccagtggcgagcaggcccaggaggaagcccaggctgattcagccttcccactgctgtccctgggtccccggctgagcctgtgtgaggacagccccatggtcaccctgactgtggacaacgtgcacctggaacacggcgtggtgtatgagtatgtgagcacggcaggcgtcaggtgccatgtgctggagaagatcgtggagccccgcggctgtttcggcctcaccgccaagatcctcgaggcctttgctgccaatgacagcgtcttcgtggagaactgcaggcggctcatggccctgagcagcgccatcgtgaccatgccccactttgagttccgcaacatctgtgacaccaagctggatagcattggccagaggattgcctgctaccaggagtttgcagcccaactgaagagcagggtcagcccacccttcaaacaagcccccctggagccccacccgctgtgtggcctggacttctgccccaccaattgccacatcaacctcatggaagtgtcctaccccaagaccaccccctcagtgggcaggtccttcagcatccgctttggacgcaaaccctccctcatcggccttgacccggagcaaggccacctgaaccccatgtcgtacacccagcactgcatcaccaccatggctgctccctcctggaagtgcttgcctgctgcagagggtgatccccaaggccagggtctccatgatggcagcttcgggccagccagtgggacccttggtcaggaagaccggggcctcagcttcctactcaagcaggaggaccgtgagatccaggatgcctacctgcagctcttcaccaagctggatgtggccctgaaggagatgaagcaatatgtcacccagatcaacaggctgctgtccaccatcacagagcccacctcgggtgggtcctgcgacgcatccttggctgaggaggcctcctccctgcccctggtcagtgaagagagcgagatggacaggagtgaccatgggggcatcaagaaggtgtgcttcaaggtggccgaggaggaccaggaggactcaggccacgacaccatgagttatcgcgactcctacagcgagtgtaacagcaatcgagactcggtcctgtcctacaccagcgtgagaagtaacagctcctacttgggcagcgacgagatggggtctggagatgagctgccctgtgacatgcggatcccatctgacaagcaggacaagcttcatggctgcctggagcacctctttaaccaggtggactccatcaatgctctcctcaaggggccagtcatgagccgggctttcgaagagaccaagcatttccctatgaaccacagcttacaagagtttaaacagaaagaagagtgtacaatccgtggccggagcctgatccagattagcatccaggaggacccctggaacctccccaactccatcaagaccctggtggacaacattcagagatatgtggaagatgggaagaaccagctgctcctggccttgctgaagtgcacagacacggagctgcagctgcgcagagacgcgatcttctgccaggccctggtggccgccgtgtgcaccttctccgagcagctgctggcggccctgggctaccgctacaacaacaatggcgagtacgaggagagcagccgcgacgccagccgcaagtggctggagcaggtggcggccacgggcgtcctgctgcactgccagtccctgctctcgccagccacagtgaaggaggaacggaccatgctggaggacatctgggtgacgctgtcagagctggacaatgtcaccttctcctttaagcagctggacgagaactatgtggccaacaccaacgtcttctaccacattgagggcagccggcaggcgctgaaggtcatcttctacctcgacagctaccacttctccaagctgccctcccgcctggagggtggggccagcctgaggctgcacacagcgctgttcacgaaagtgctggagaacgtggaggggctgccttctccaggcagccaggccgcggaggatttgcagcaggacatcaacgcgcagtccctggagaaagttcagcagtattaccgcaaactcagggcattttacctggagcggtctaacctgcccacggatgccagcaccacggcggtaaagatagaccagctgatccgccccatcaatgccctggatgagctctgccgcctcatgaagtcctttgtccacccaaagcctggtgctgctgggagtgtgggcgccggcctcatccccatctcctcggagctctgctaccgcctgggggcctgccagatggtcatgtgtggcacaggcatgcagaggagcaccctgagcgtgtccctggagcaggcggccatcttggcacggagccacgggttgctgcccaagtgcatcatgcaggccacggacatcatgcggaagcagggcccaagggtggagattctggccaaaaacctgcgagtcaaggaccagatgccccagggtgctccgcgcctctaccgcctctgccagccgaaaatgaatggggacctatgaacacccctgtatt

SEQ ID NO: 63060 - DNA, 545 bp, Homo sapiens
ccgggtcgagccacgcgtccggctggaggcagttgcttccctgtagagggtccggctgcggccagtattttgtgtcatgacttctcaagagaagacagaagagtatccttttgcagatatatttgatgaagatgaaactgaaaggaattttttgttgtccaaacctgtttgctttgttgtatttgggaaaccaggtgttgggaaaacaacattagcccgttacataacacaggcatggaaatgtattcgtgttgaagctttgccaattttagaagaacagattgctgctgaaaccgaatcaggagttatgttgcaatcaatgttgatcagcggtcaaagcattccagatgaacttgtcataaagctaatgttggagaagctcaactccccagaagtctgtcactttggttatattatcactgaaataccatcactttcacaggatgccatgactaccttacagcaaatagaattaattaaaaacttaaaacctgaaacctgatgttataatcaatataaaaggtgtccttgacttttaattgaat

SEQ ID NO: 63061 - DNA, 674 bp, Homo sapiens
ctgggccggggacaagcgtgtaggcttcaggtacagggcttcctaagtcaagggtttcaggtcgcactggagaatcattttgcaagcagatgtcataggtctcctcttagactggacggcacgcaaggtcagcgtcagcagatctgaccctaaaaataggcctctgttgccagtgggggtggctgggcgtgcggctgctacatgccccacggaccagaacctcccgacgcggccaggccccggcacacccagctgcagaaaggagagaaaatcccttggctctaaaatgacatctggagaagtgaagacaagcctcaagaatgcctactcatctgccaagaggctgtcgccgaagatggaggaggaaggggaggaggaggactactgcacccctggagcctttgagctggagcggctcttctggaagggcagtccccagtacacccacgtcaacgaggtctggcccaagctctacattggcgatgaggcgacggcgctggaccgctataggctgcagaaggcggggttcacgcacgtgctgaacgcggcccacggccgctggaacgtggacactgggcccgactactaccgcgacatggacatccagtaccacggcgtggaggccgacgacctgcccaccttcgacctcagtgtcttcttctacccggcggcag

SEQ ID NO: 63062 - DNA, 1293 bp, Homo sapiens
ctttgtcaagagacttggagagagggatgggcgaggtgttgggggacacaggggtgctctagaccctgtgagcactgactctgcccctctctcctcttagctggctccagtgcccagacccaagccccccactgctcaatggacacccccagcccagacccgttgccttcgcctttgcccggggaggaagagaaacctctggccttatctcctcctgttccccggggccgccgaggccgtcgtcctgggggagccacctcctcaaatcggacactcaaggcctccctccctcgcaagcggggccgcccccccaagtcagggcaggagcccccactggtgcaggtgcagggggtgacagccccagtaggcagcagtggcgggagcgacctcctcctgatcgatgatcagggtgtgccctatacggtctctgaaggttcagcggctgggcctgagggctctggccccaggaaggccccacacttctgcccggtgtgcctgcgggccttcccctacctctccgacctggagcgccacagcatctcgcactcagagctgaagccgcaccagtgcaaggtttgcggcaagaccttcaagcgctccagccacctgcggcggcactgcaacatccatgccggcctgcggcccttccgctgcccgctgtgcccccgccgcttccgcgaggcgggcgagctggcgcaccaccatcgcgtgcactcgggggagcgcccgtaccagtgccccatctgccggctgcgctttacagaggccaacacgctccggcgccatgcgaagcgcaagcacccggaggccatgggggtacccctgtgtgcaccagatccagggtctgaaccgccgtgggacgaggagggcatcccggccacagcaggggccgaggaagaggaggagacagaggggaaaggggagccggcctgacccacacccccggccatcgctccctgggccaggtttagagcagggagtttggctggtgctgggcctgagccagggggccgggacacccttgtttccggtggtcttcccgttgtgggagcaggtggagggtggagacctaaactttggggtccagctgccttcagcccccctcccccagactaacagacccttggaggcaggggctgtggaaataaatctctgcctgctggctgcctgtgtgtgttccgtgccgggatgccatcctctcctgccttcaaatgttcttcctcggctacaccgtcctgtcgggagtgcggggaattggggaggaccccacttgctgtgcctcatgagcgtggg

SEQ ID NO: 63063 - DNA, 467 bp, Homo sapiens
accggccggaatccgggcgacccacgcgtcgacactcactacacactcactcactcacacacctcccccagctcacctcctccccactccagcatggccgcctccaccatgtccatctgctccagcgcctgcaccgactcctggcaggtggacgactgcccagagagctgctgtgagctcccctgcggcacccccagctgctgtgccccagccccctgcctgaccctggtctgcaccccagtgagctgtgtgtccagcccctgctgccaggcggcctgtgagcccagcgcctgccaatcaggctgcaccagctcctgcacgccctcgtgctgccagcagtctagctgccagccggcttgctgcacctcctccccctgccagcaggcctgctgcgtgcccgtctgctgcaagactgtctgctgtgtgcccgtctgctgtgggccttcttcatgctgccagcaggctaa

SEQ ID NO: 63064 - DNA, 1800 bp, Homo sapiens
cggacctcccgcgcgccccgcacccgaccggctcagccgccggcagcgtaacacgccctacgctcgcttgctcgccggcctcagggcaggcaggcgggcgcgggagaccccgccggggccgagacttggggcgggcgacgaggaccaggttacggcctcctcgccatgtcctcggcctgcgacgcgggcgaccactaccccctgcacctcctagtctggaaaaacgactaccggcagctcgagaaggagctgcagggccagaatgtggaggctgtggacccacgaggtcgaacattattgcatcttgctgtttccttgggacatttggaatctgctcgagtcttactccgacataaagcagatgtgacaaaagaaaatcgccagggatggacagttttacatgaggctgttgagcactggcgatcctgagatggtgtacacagttctccaacatcgagactaccacaacacatccatggcccttgagggagttcctgagctgctccaaaaaattctcgaggctccggatttctatgtgcagatgaaatgggaattcaccagctgggtgcccttggtttctagaatatgcccaaatgatgtctgtcgcatctggaaaagtggtgccaaactgcgcgtcgatatcacattgctgggatttgaaaacatgagctggataagagggaggcgtagttttatatttaagggagaagacaactgggcggagttaatggaagtcaaccatgatgacaaagtggtcaccaccgaacgcttcgacctttcccaagaaatggagcgcctcactctggacttgatgaagccaaaaagcagggaagttgagcggcggctcacaagccctgtcattaacaccagcctcgatactaaaaatattgcttttgaaagaactaaatccggattctggggctggaggacagataaagcagaagttgttaatggttacgaagcaaaggtttacacagtaaacaatgtgaatgtgatcaccaaaatacgcacagaacatctgaccgaggaggaaaaaaagagatataaagcagacaggaacccgctggaatctttgctgggaactgtggaacaccaatttggtgcacaaggggacctcaccacggaatgtgctactgcaaacaaccccacagccatcacgcctgatgagtacttcaatgaagagtttgatctgaaagacagggacattggaaggccgaaagagctgacgattagaacacagaagtttaaagcaatgttgtggatgtgtgaagagtttcccctctctctggtggagcaggtcattcccatcattgacctaatggctcgaacgagtgctcattttgcaagactgagagatttcatcaaattggaattcccacctggatttcctgtcaaaatagaaattcccttgtttcatgtcttaaatgcacggattacatttggaaatgttaatggctgtagcactgccgaagaatctgtatctcaaaatgtggaagggacccaggctgattcagcttcccacatcacaaactttgaggttgatcaatctgtgtttgaaattcccgaatcttactatgttcaagacaatggcagaaatgtgcatttgcaagatgaagattacgagataatgcagtttgccatccagcaaagtctgctggagtccagcaggagccaggaactttcaggaccagcttcgaatggagggatcagccagacaaacacctatgacgcccagtatgagagggccatccaggagagcctcctcaccagcacagaaggcctgtgccccagcgccctgag

SEQ ID NO: 63065 - DNA, 696 bp, Homo sapiens
ctggaagcgttcaggggaggtttcaccaaaaggagagctcggggcttggaggggaaacagcggaagacctaagattatcgggagggcagcagaggcagagaacgaggacaggacccttggccgtcttcttccagggaacgagaggtcacagcctcgctctccgcttaggcttctggcgccccagcttaaagccgaggctgcggctgacaaagggctcgcgccggtgccgccgcccttctcatccgggcattcgggtccctgcggagagggagggggaagggcagagggggaggggaaggagccggaggggcgcacacttggagctgaagccctctccagggctccgggccggtgccccaacggacagaggtcgaggaggacccgcagaggtggcagcggccgggggcaggaggatggtgcagaaggagagtcaagcgacgttggaggagcgggagagcgagctcagctccaaccctgccgcctctgcgggggcatcgctggagccgccggcagctccggcacccggagaagacaaccccgccggggctggggggagcggcggtggccggggctgcaggaggggctcggcggttcctctgcggtgtggtggaaggattttatggaagaccttgggttatggaacagagaaaagaactctttagaaggctccagaaatgggaattaaatacatacttg

SEQ ID NO: 63066 - DNA, 1117 bp, Homo sapiens
ttttttttttttaatttaaaaaagttttacttaattgcttaaataaaaaataacattaaaataatttctacatatagttacaaagcatggtagagcttgaaaaagcctcttgtaattttgaacagatgaacatgatgtctccatgatgttctaacaatatggaaaagttaaaaccaaaagacttctaacccttggtaagaccagagggattaaaagaccccactatggacatattcactttagtcaaccacttttatggaatgaacacttgtgagagactgggtgtgagctgatctggttccaagtgatctggaagctgaggtactactttcaggatgaatggtccggggatattttgctgcagttgcttgaggaatggtttgcactgtgactggatgatgtttttccacaacaactgagctcatgggaggagaaactcccattatagctaaactgctgctaattctattttttgaagcaaaatcacatcttcctgtgatccgggctgtaatagttcttcctgctttctgttgtgcagaggttacaactcttggcacatacatttcttctgatgcagcagtagctgcagatcctgcaccaagagcagaaacaggaacgtgaacagaagatgcggaagcagccctggtagaagtcatcgaagcagctgagggaacggcagtcgcgctggctcctccgacggcggctggtggggatggcagcagtggtgatgtaactggtaagggcatcggaggagctgaaggatccaaatgagcagaatgttcttttccttgaacaccaggaccatactcttcctttttattatttgtggagtctatccctgcatcatttctgttttgaaatatagtcatggcttcaagatttaatgcacatacacccctcatgaaagcttttttcatggaatcttcaaagtgctctttttcatgttgcattctttgaatctcagcttttgcattttccaaagctccagataacatagcaactttggcttcataatcattggaaatctggatacaaacttcttcagctcttgcttgacaagctctttctaccacatctttccactgcttttgcgaattccaccgcactgtactaatgt

SEQ ID NO: 63067 - DNA, 1052 bp, Homo sapiens
gaattcggcccatgcctgtaatcccagcactttgggaggccaaggcgggtggatcgcctgaggtcgggagttcgagaccagcctggccaacatggtggaaccccatctctactagaaaaaaaatacaaaaaattagccaggcatgttgacgggcgcctgtaatcccagctactcgggaggctgaagcaggagaatcgcttgaacctgggaggtggaggttgcagtgagctgagatcacgcttttgcactccagcctgggtgacaagagtgaaactccatctcaaaaaacaaaaaaaagtagtcatttatctctggatactattattttgagcagtaataaacaagtttatttgtatatgtataattttagatatcccttggccagaaggtgaagaaaagttatctgataatgctcaaagtgcagtagaaatacttttaaccattgatgatacaaagagagctggaatgaaagagctaaaacgtcatcctctcttcagtgatgtggactgggaaaatctgcagcatcagactatgcctttcatcccccagccagatgatgaaacagatacctcctattttgaagccaggaatactgctcagcacctgaccgtatctggatttagtctgtagcacaaaaattttccttttagtctagcctcgtgttatagaatgaacttgcataattatatactccttaatactagattgatctaagggggaaagatcattatttaacctagttcgatgtgcttttaatgtacgttacagctttcacagagttaaaaggctgaaaggaatatagtcagtaatttatcttaacctcaaaactgtatataaatcttcaaagcttttttcatttatttattttgtttattgcactttatgaaaactgaagcatcaataaaattagaggacactattgagagtgagccactagcttgattttctttctcctctgatttcagttcactgttcagtttagcattaaaataataaaataatcatacagttccatttgattgtaatttacttgcatatgattaccttcaaaa

SEQ ID NO: 63068 - DNA, 599 bp, Homo sapiens
ttcgtgtggtggaattcgaggagcagcaggcctccgggcccggcgccgccgcccgcaggacatttctgatttatttgcatccttgaagagcatctgtagaagaggaagtaaaagatgggtgtgaaaacatttactcatagctcctcttcccacagccaggaaatgcttggaaagctaaatatgctgcgaaatgatggacatttttgtgatatcactattcgtgtccaggacaaaatcttccgggcacataaggtggtactagcagcttgcagtgatttctttcgcaccaaacttgtaggccaagccgaggatgagaacaagaatgtgttggatctgcatcatgttacagtgactggctttatacctcttttagaatatgcttacacagccactctatcaattaacacagaaaatattattgatgttctagcagcagccagctatatgcaaatgttcagtgttgccagcacctgctcagagttcatgaaatcaagcattttatggaatacacccaacagccaacctgaaaagggtctagatgctggacaagaaaataattctaactgcaattttacttctcgagatgggagcatttctcc

SEQ ID NO: 63069 - DNA, 1068 bp, Homo sapiens
tttttttttttttagttccaatgtatttattcttagaaaagcttccctagaaacatataaagtgtgacatggcttatgtgtataatccagcccttttggaggtcaggatggaagatcgcttgaacctgggagtttgaggttgcactgagtcatgatggcatcactggagggcagcctgggccacagggtgagaccctgactcaaaaggctgatgtggcggggcccggcgcttcgtccaatcaggggcgcctgggcggggcctgccgagtgtccatcggggagggcgaaggccctgctctcctcggttcccggctccaggcggcgagctgaggttgggagcctggctttcccctccgagagggttcaggtgcctctgccatagcttctgtcgcctgtgctgtgacccgcactggtcgtgggagtcacctgaaaggcaagaaatggattcagtggcctttgaggatgtggctgtgaccttcacccaagaggagtgggctttgctggatccttcccagaaaaatctctgtagagatgtgatgcaagaaaccttcaggaacctggcctctatagggaaaaaatggaaaccccagaacatatatgtagagtacgaaaatctaaggagaaacctaagaattgtgggagagagactctttgaaagtaaagaaggtcatcagcatggagaaattttgacccaggttccagatgacatgctgaagaaaacaactactggagtaaaatcatgcgaaagcagtgtgtatggagaagtaggcagtgctcattcatctcttaataggcacatcagagatgacactggacacaaggcatatgagtatcaagaatatggacagaaaccatataaatgtaaatactgtaaaaaacctttcaactgtctctcctctgttcagacacatgaaagggctcatagtggaaggaaactctatgtttgtgaggaatgcggaaaaacatttatttcccattcaaaccttcaaagacacaggataatgcaccgtggagatggaccttataagtgtaaattttgtgggaaagccttgatgtttctcagtttga

SEQ ID NO: 63070 - DNA, 486 bp, Homo sapiens
gcctggtattgccaggccgccgatttcgtagctcgggaccgggagcagcggctctggcggtcgtggcggtcggagatccgagagctctgcttctctgaaaagcgtgtggctttctggacttggtctacacctgacagtcactggaatgctactccaggccttagaagaaagtgaaactaattttaaaggccccttattctttctgttacctgcctgctgaagtgaaaataaatctccctgctcctttattctaaactgattttactttcccatctcaaaaacgtgtgcagggagcaggagccctcctacccgagccccagctgtattggaaaccctcctaagtcagagtgatgggtcaggaatctaggcaagcctgtatggcccaatccaacaggagggtatcagtccaatacaggtaggaggtatggaagaaggcatgcttatgtcagtttcaggccacccacgagccacgcgggaaaggattgt

SEQ ID NO: 63071 - DNA, 834 bp, Homo sapiens
tgggaaacgagagccccagctgctccatgttggggccgtgggggctccctaaggaggggacaccagggccccaatgtttcacagaggggcggggggcagcgaccctgggcagcatggcctcaggctgaagcccgatctggcatttccttgtgctcataatgagaatagttctccaattagccaagatgaacctcatggacatcaccaagatcttctccctcctgcagcccgacaaggaggaggaggacactgacacagaggagaagcaggctctcaatcaagcagtgtatgacaacgactcctatactttggaccagcttttgcgccaggagcgttacaaacgtttcatcaacagcaggagtggctggggtgttcctgggacacccttgcgcttggctgcttcttatggccacttgagctgtttgcaagtcctcttagcccatggtgctgatgttgacagcttggatgtcaaggcacagacgccacttttcactgctgtcagtcatggccatctggactgtgtacgtgtgcttttggaagctggtgcctctcctggtggtagcatctacaacaactgttctcccgtgctcacagctgcccgtgatggtgctgttgctatcctgcaggagctcctagaccatggtgcaagaaggccaacgtcaaaagctaaactaccaagtctgggcaatcaaacaataagcttcaatgttcctggccccctctaatttgggccgaagtctacgggcacctggaactgtttcccgcctgcttttgctccaacggggcaagaaccctgactacaaattgcactgaacaagggcctattggctcgtg

SEQ ID NO: 63072 - DNA, 3359 bp, Homo sapiens
agccgcctcgagccgacgacagcgagttccaggcgctgctggacatctggtttccggaggagaagccactgcccaccgccttcctggtggacacatcggaggaggcgctgctgcttcctgactggctgaagctgcgcatgatccgttctgaggtgctccgcctggtggacgccgccctgcaggacctggagccgcagcagctgctgctgttcgtgcagtcgtttggcatccccgtgtccagcatgagcaaactcctccagttcctggaccaggcagtggcccacgacccccagactctggagcagaacatcatggacaagaattacatggcccacctggtggaggtccagcatgagcgcggcgcctccggaggccagactttccactccttgctcacagcctccctgccgccccgccgagacagcacagaggcacccaaaccaaagagcagcccagagcagcccataggccagggccggattcgggtggggacccagctccgggtgctgggccctgaggacgacctggctggcatgttcctccagattttcccgctcagcccggaccctcggtggcagagctccagtccccgccccgtggccctcgccctgcagcaggccctgggccaggagctggcccgcgtcgtccagggcagccccgaggtgccgggcatcacggtgcgtgtcctgcaggccctcgccaccctgctcagctccccacacggcggtgccctggtgatgtccatgcaccgtagccacttcctggcctgcccgctgctgcgccagctctgccagtaccagcgctgtgtgccacaggacaccggcttctcctcgctcttcctgaaggtgctcctgcagatgctgcagtggctggacagccctggcgtggagggcgggcccctgcgggcacagctcaggatgcttgccagccaggcctcagccgggcgcaggctcagtgatgtgcgaggggggctcctgcgcctggccgaggccctggccttccgtcaggacctggaggtggtcagctccaccgtccgtgccgtcatcgccaccctgaggtctggggagcagtgcagcgtggagccggacctgatcagcaaagtcctccaggggctgatcgaggtgaggtccccccacctggaggagctgctgactgcattcttctctgccactgcggatgctgcctccccgtttccagcctgtaagcccgttgtggtggtgagctccctgctgctgcaggaggaggagcccctggctggggggaagccgggtgcggacggtggcagcctggaggccgtgcggctggggccctcgtcaggcctcctagtggactggctggaaatgctggaccccgaggtggtcagcagctgccccgacctgcagctcaggctgctcttctcccggaggaagggcaaaggtcaggcccaggtgccctcgttccgtccctacctcctgaccctcttcacgcatcagtccagctggcccacactgcaccagtgcatccgagtcctgctgggcaagagccgggaacagaggttcgacccctctgcctctctggacttcctctgggcctgcatccatgttcctcgcatctggcaggggcgggaccagcgcaccccgcagaagcggcgggaggagctggtgctgcgggtccagggcccggagctcatcagcctggtggagctgatcctggccgaggcggagacgcggagccaggacggggacacagccgcctgcagcctcatccaggcccggctgcccctgctgctcagctgctgctgtggggacgatgagagtgtcaggaaggtgacggagcacctgtcaggctgcatccagcagtggggagacagcgtgctgggcaggcgctgccgagaccttctcctgcagctctacctacagcggccggagctgcgggtgcccgtgcctgaggtcctactgcacagcgaaggggctgccagcagcagcgtctgcaagctggacggactcatccaccgcttcatcacgctccttgcggacaccagcgactcccgggcgttggagaaccgaggggcggatgccagcatggcctgccggaagctggcggtggcgcacccgctgctgctgctcaggcacctgcccatgatcgcggcgctcctgcacggccgcacccacctcaacttccaggagttccggcagcagaaccacctgagctgcttcctgcacgtgctgggcctgctggagctgctgcagccgcacgtgttccgcagcgagcaccagggggcgctgtgggactgccttctgtccttcatccgcctgctgctgaattacaggaagtcctcccgccatctggctgccttcatcaacaagtttgtgcagttcatccataagtacattacctacaatgccccagcagccatctccttcctgcagaagcacgccgacccgctccacgacctgtccttcgacaacagtgacctggtgatgctgaaatccctccttgcagggctcagcctgcccagcagggacgacaggaccgaccgaggcctggacgaagagggcgaggaggagagctcagccggctccttgcccctggtcagcgtctccctgttcacccctctgaccgcggccgagatggccccctacatgaaacggctttcccggggccaaacggtggaggatctgctggaggttctgagtgacatagacgagatgtcccggcggagacccgagatcctgagcttcttctcgaccaacctgcagcggctgatgagctcggccgaggagtgttgccgcaacctcgccttcagcctggccctgcgctccatgcagaacagccccagcattgcagccgctttcctgcccacgttcatgtactgcctgggcagccaggactttgaggtggtgcagacggccctccggaacctgcctgagtacgctctcctgtgccaagagcacgcggctgtgctgctccaccgggccttcctggtgggcatgtacggccagatggaccccagcgcgcagatctcccgaggccctgaggaytcctgcatatggaggccgctgatgtgcacgctgtggcagccgacccccctccaaagccccggcccgtcccgtccccggggatcctcgaggcaaagcccaggaagcgtgggcgttgctggtctgtccgaggaggtgagggcgccgagccctgaggccaggcaggcccaggagcaatactccgagccctggggtggctccgggccggccgctggcatcaggggccgtccagcaagccctcattcaccttctgggccacagccctgccgcggagcggcggatccccccgggcatggcctgggctggttttgaatgaaacgacctgaactgtcaaaaaaaaaa

SEQ ID NO: 63073 - DNA, 538 bp, Homo sapiens
ctgggaaggacttgggggactagaggcgaggggagagagcttgtggaaggtgcggcagagaagggcccaggagaaaggaggaagggaaggagctggaggggcgggagaacaggagacagaacaggacagagacagctgcccgggaggatgggagaacagaaagagggaggaaacgccgagcactgacctgggggaggggagtaaagagaagtgaagggggattggaagggaactggagaatgagagaagcaacaggcggggtgcgtgtaggagggcgggagagccaatgacaagacagaaaaggcagagaaagcaaagcaagaccagactcctcatccggtaacactgtgtcaggtcattgccctcccaccccgcccccaaccccataactgaaaacaagtaggaacctggataaaatagtcttaacaattttttttttgagacggagtcttgctgtgttgcccaggctggagtgcagtggcgcgatctcggctcactgcaggctccgcctcccgggtttaagcggttctcctgccta

SEQ ID NO: 63074 - DNA, 815 bp, Homo sapiens
acgcgcgtcgcgagctaacggactcggcggcggcggcggcggcggcctgcgccccacccgcaccccatctggaccgcatcgctgaatgtgcccggacctgcgccttctgggtctctgaaagaagatgaatttggctgagatttgtgataacgcaaagaaaggaagagaatatgcccttcttggaaattacgactcatcaatggtatattaccagggggtgatgcagcagattcagagacattgccagtcagtcagagatccagctatcaaaggcaaatggcaacaggttcggcaggaattattggaggaatatgaacaagttaaaagtattgtcggcactttagaaagttttaaaattgacaagcctccagatttccctgtgtcctgtcaagatgaaccatttagagatcctgctgtttggccaccccctgttcctgcagaacacagagctccacctcagatcaggcgtcccaatcgagaagtaagacctctgaggaaagaaatggcaggagtaggagcccggggacctgtaggccgagcacatcctatatcaaagagtgaaaagccttctacaagtagggacaaggactatagagcaagagggagagatgacaagggaaggaagaatatgcaagatggtgcaagtgatggtgaaatgccaaaatttgatggtgctggttatgataaggatctggtggaagcccttgaaagagacattgtatccaggaatcctagcattcattgggatgacatagcagatctggaagaagctaagaagttgctaagggaagctggtgttcttccaatgtggatgg

SEQ ID NO: 63075 - DNA, 530 bp, Homo sapiens
tttcgtgcattcctgccgtcacctttgtcgctgcgagggcggcggttgggatctggcctttccagccccgagagggacctagtgcctctacccagatttctgtcgctctgtcacctgcgctatgccctgctttactcacaggagctgtagagaggaccccggtacatctgaaagccgggaaatggacccagtggcttttaaggatgtggctgtgaacttcacccaggaggagtgggctttgctggatatttcccagaggaaactctacaaggaagtgatgctggaaactttcaggaacctgacctctgtaggaaaaagttggaaagaccagaacattgaatatgagtaccaaaaccccaggagaaacttcaggagtctcatagaagagaaagtcaatgaaattaaagatgacagtcattgtggagaaacttttacccaggttccagatgacaggctgaacttccagaagaagaaagcttctcctgaagtaaaatcatgtgacagctttgtgtggtgaagttgggctaggt

SEQ ID NO: 63076 - DNA, 1054 bp, Homo sapiens
  misc_feature (1)...(1054): n = a,t,c or g
ctttactgtagaactggggtcgtggtgagattcgttggtggctgcgcgattgtggcggagttgcaagcaaacngggtttcatcaccttaaatggttttgaaccaaagaagctgtattcccttaaaaagacggacaacccatcgtgtgaactatagagtttgtgaacaaatttatattgggttcatagtggcgtcatgcacgcagactcctgcgagttcccctaagttcttagaggactgctttgccttttgatctgagagttgcaaagttccctaaagaatggcccttgtggataagcgctaagtcaagagacagcgattggacagaatttgtgaggaattcgtccccagatcatgaaagtcaccctgaaccccgcctcgtggtggctctgctggatggacgggactgcactgtggacatgcccatcctgaaggacctggccacctggccttctgtgaggctcagtccatgcaggagatccacgagaaagttctaaacgaagtcgtgggcgccatgatgtaccacaccttctccctcaccagggaggacctggaaaatttcaaggccctgagagtgatcgtgcaggtggccagtggctacgacaacgtggccatcaaggctgctggcgagctcgaaattgctgttgcagcatcccgtctgcagccgtggaagagacagccgactccaccaccggccacatcctcaatctgtactgggggaacaggtcgctgtaccaggcactgagggaaggcacgcgagttcagagcatggagcagattggcgaggtggcctcagtaaaggcccgcattcgtggggagatattgggcctcatcggcttcggtcgcacgcagcaggaggttgcagttcgagccaaggcctttgcaggatgggatcgagcggtccctgggtgtgcatagggtctacacccagcaggatttgctgtatcagaacgactgcgtcttcttgcattgcaatctcaacgaacaaaactaccaccttatccatgactttaccataaagcagatgaggcagggagcattccttgtgaacgcag

SEQ ID NO: 63077 - DNA, 933 bp, Homo sapiens
gtcgacgatttcgtcgcaatacatcctcagcaagaagaaagtctgcaaagaacttctgcacttcaacttttgtaacatcaaatggaaaatttcttatatagatgcacagtttctggccagagttaccttcttgagagtatttttgtgaaacatgtccgggcctatctctctctagtgaccctgatctcttcttttcataacgtgcaatgaacttcagcatttgttttctagaaattggatcaatatgaactggacgatattgtaaaacagtcttatgtaaactcagagcggtattatagtctttcagagtcttgaacatcacaaaggcatatcttgttctattttcatctttatataaaaacctaatctgttcatcagtcagatcagtacctctaaagaaatttcttaaatctctttcgtcaatactgagggacagattttttaagtgaacataaaatccaagaggggaacgagaacgtgttcttctgggagattttgaatgagaccgttttcgaaaatgtctatcattaattcctcttggtggagaatgttcttcagatctcctaagaacgtcaccctccttaactgcattaccaccaaactcaatccactgttgttctgatccttgcattacttctataaatcttgaacccataaaacttctatgacatttaagacctcctgaagcatcaacacatgaagcaaattttactatggcatcaccattatttcggccatcatgatgttttaagaaaattactccatccacgcacaaaccagagaaaaagacacgtacatcatcttcatttactaggtaaggcaaacctcgtagaaacaagtaaggattctcggccttcaatggccttgtctttcttggccttaaattaccatgtcctgtaccattagtatgaaacccagcatcttgattaattg

SEQ ID NO: 63078 - DNA, 909 bp, Homo sapiens
tctcccatgtcctataaggtgtgaggaattactgaaggctttcccacattccttacatacatagtgtttgtctccattgtgagatcttatatgtaacttaagggatgactgattaagaaaagttctccaacagtctttgcattcacacaatttctcttgtgtgtgagttttattctgcctagtaagatttggaaactggttgaaggctttttcatgtttaacacacttaggcattttcccctcagcatgacttttcttgtaaaaactatgaggaaagttctttcttaaggcttttccactctgattatcctcagaagttttctctccaatgtgagttatcatgtgagtcataagaaatgggtgttcattgaagacttttccagaatggttagagtcatacagtttctctgcagtattgcttctctccctgcagaactcctgtcactcctgtcctcagctcttccatttgttccaatccagacatgagactacgtttgaataattcagaccctagtataatgagattcttgtagttctccaacatcacatctctgtagagatctctctgggcttgatccaacaaagtccactcctcctgggtaaagtccacagccacatcctcaaaggtcactaagtgctgagaagaatccatcagtaatccatcagtaacccagccactagccttggcttctcgatgttcctgtcatgaagacagaaagtgtcctggaaaaaatgacctgaagccgcacctggtcgcagaggctactgctggggaaaccgttgggccagcggcggctaaagggcaggaggcgccgctgtggccacgcgcacttctgattccgctccagggtttcagaaggaactgagggctctggacccggcctcggaggcctgaggagttgggagggg

SEQ ID NO: 63079 - DNA, 733 bp, Homo sapiens
gttcttctatgtggccctttgtctcctgtggacaggacacatggatggatgctggaatcacccagagcccaagacacaaggtcacagagacaggaacaccagtgactctgagatgtcaccagactgagaaccaccgctatatgtactggtatcgacaagacccggggcatgggctgaggctgatccattactcatatggtgttaaagatactgacaaaggagaagtctcagatggctatagtgtctctagatcaaagacagaggatttcctcctcactctggagtccgctaccagctcccagacatctgtgtacttctgtgccatcagtggtgacagggtttgttcacccctccactttgggaatgggaccaggctcactgtgacaggtatgggggctccactcttgactcgggggtgcctgggtttgactgcaatgatcagttgctgggaagggaattgagtgtaagaacggaggtcagggtcaccccttcttacctggagcactgtgccctctcctcccctccctggagctcttccagcttgttgctctgctgtgttgcctgcagttcctcagctgtagagctccttgcttagtcttcagggctgtgtgtttctttgctcttcttttcattgttttctgggactcttctcatctctactttcttagtggatgtattgttttactttcccttttttaaattgcatcttctccattttttccttcccacgaaa

SEQ ID NO: 63080 - DNA, 771 bp, Homo sapiens
tgaagaatccccgggtcgacgatttcgtatggctttttaagaaccaggcgcttactctgaaatagtctattgttaagtaaatgtcacaaggttaggtgaagttgtctccttgtaaaacctgctctcagatcattaatgatgataacttaaagtgatactacccccaagggtaatgtttcagtggttcaaagtctcaagcttcacaggaatctctggtggtggaatttcaggcattagctcgttgatgggaaaaaatttttttgatgtttctgtgggtatgccttcacaaactttcccaagtgttttccaaaaatcacgtctttctgttttttattttctatttttaaaatcccccttcaatagtgcatcaaaacctataactctgactggcatcttgtgaactataaatatgaagattactcaggagagtttcgacagcttccgaacaaagtggtcaagttggataaacttccagttcatgtctatgaagttgacgaggaggttgacaaagatgaggatgctgcctcccttggttcccagaagggtgggatcaccaagcatggctggctgtacaaaggcaacatgaacagtgccatcagcgtgaccatgaggtcatttaagagacgatttttccacctgattcaacttggcgatggatcctataatttgaatttttataaagatgaaaagatctccaaagaaccaaaaggatcaatatttctggattcctgtatggggtgtcgttcaggaccaacaaagtcaggcgttttt

SEQ ID NO: 63081 - DNA, 1268 bp, Homo sapiens
cacaaaatggcggcggcggcggcggcggctggtgctgcagggtcggcagctcccgcggcagcggccggcgccccgggatctgggggcgcaccctcagggtcgcagggggtgctgatcggggacaggctgtactccggggtgctcatcaccttggagaactgcctcctgcctgacgacaagctccgtttcacgccgtccatgtcgagcggcctcgacaccgacacagagaccgacctccgcgtggtgggctgcgagctcatccaggcggccggtatcctgctccgcctgccgcaggtggccatggctaccgggcaggtgttgttccagcggttcttttataccaagtccttcgtgaagcactccatggagcatgtgtcaatggcctgtgtccacctggcttccaagatagaagaggccccaagacgcatacgggacgtcatcaatgtgtttcaccgccttcgacagctgagagacaaaaaaccctgtgctttctctctggcaggaagcccgtgcctctactactggatcaagattatgttaatttaaagaaccaaattataaaggcggaaagacgagttctcaaagagttgggtttctgcgtccatgtgaagcatcctcataagataatcgttatgtaccttcaggtgttagagtgtgagcgtaaccaacacctggtccagacctcatgggtagcctctgagggtaagtgactaagacttctcctctgctgtccaagcgctttggtgcagggacagcggcatcttcagccaatccagtgcaggctctccaccgaaggctggctctagactggtggtacgcacatagcatagccatggccgactcctgctgtggttctctgacgattgtgcttcttgttaatcctctgtcgtgctttggtaatcgtattgattagagttggtaactgtcttgacttgaattttgtccctttaaaactgctgtacctgtatgataaagatgcagtacctttctcttaaaaaaaaatgctatggaaagctgtgagaattgaagagacaaattggctgtgtcagtgtggggttatgtcatgatttctagaagccctgaagttgctcttttgagcagctttgcatgacacgctttggtaaaaggtgtgcatctttaaattatttcatggatactttgaaaaatattgtatcacttcaaatacagcaataagtttatatgttctcaagatttcatttgtttttaagaattttaagttcgtggattaatatcactacttgaatact

SEQ ID NO: 63082 - DNA, 489 bp, Homo sapiens
tttcgtcagggcgcaatggagacagggggctccctgggtttggaacaaagaattcacaggcaggtcccctgaaactgggtcggcaggacggtggtggagcccgagagagggcacaggcaggatggccgatgctgacaggaaccagcggtgactctggggcccctggcagcagctctgtctcctgaagatgaagtggcccaggtgaagcccaggccagccccaatggccagctcggagactgagatccgctgggctgagcctggcctggggaagggcccccagcggcggcgctgggcctgggccgaggacaagagggatgtggatagaagtagttcacaaagctgggaagaagagagactctttcccaatgccaccagccccgagctcctagaggacttccgcctggcccagcagcacctgccgcccctggagtgggacccacacccgcagcccgatgggcatcaggattccgagtcaggagagacttcg

SEQ ID NO: 63083 - DNA, 956 bp, Homo sapiens
  misc_feature (1)...(956): n = a,t,c or g
aaaccgggagcttcctgctcgtgttcgctgttgagaagctacccgcggggttgtagacttcggacctcatggcagagataattcaggaacgcatagaagatcggctcccggaattggaacagctggagcgcattggactgttcagtcatgcggagattaaggctatcattaagaaggcttccgatctagagtacaaaatccagagaagaacccttttcaaggaagactttatcaattatgttcaatatgaaattaatctcttggagctgatccggagaagaagaacacgcattggatattcatttaagaaggatgagattgagaattctattgtacaccgggtacaaggtgttttccagcgtgcctcagcaaaatggaaagacgatgttcaactttggctctcctatgtggctttttgtaagaagtgggctactaaaactcgacttagcaaggtattctctgccatgttgngattcattccaacaaaccagctttgtggattatggcagccaaatgggaaatggaagatcgattgtcttcagaaagcgcaaggcaactatttcttccgcgcactncttttccatccagagtgcccaaaactttataaagaatactttaggatggagctgatgcatgctggaaaaactggaggaaggagaaggaagaatttgaaaaagccagtatggatgtggagaatcctgattattctgaagaaatccttaagggcgagttggcatggatcatctacaaaaattctgtaagcataattaaaggtgcagaatttcacgtgtcattgctttcgattgcacagctatttgactttgccaaagatctacaaaaagagatttatgatgaccttcaggctctacacacagatgatcctctcacttgggattatgtggcaaggcgagaattagagattgagtcacagacagaagagcagcctacaacgaaac

SEQ ID NO: 63084 - DNA, 791 bp, Homo sapiens
  misc_feature (1)...(791): n = a,t,c or g
gagccgccgcgacaccttcacgtgaccgcggacagcttaaggacaccgcatccagtgcgcctgcgctggagctcccggaagttgccggacccggaacgcaggcggagcgcaagtctgtcagccagtcagtccgccagtccgccagcccagtacctctctctcctcggccctcgtaagctgtccgcggtctgtttggcccgaacggcggcggaggcgctgatcatggcgacattcatctcggtgcagctgaaaaagacctcagaggtggacctggccaagccgctggtgaagttcatccagcagacttacccaagcggcggggaagagcaggcccagtactgccgcgcggcggaggagctcagcaagctgcgccgcgccgcagtcggtcgtccgctggacaagcacgagggcgcgctcgagacgctcctgagatattatgatcagatttgttctattgaacccaaattcccattttctgaaaatcagatctgcttgacatttacctggaaggatgctttcgataaaggttcactttttggaggctctgtaaaactggctcttgcaagcttaggatatgaaaagagctgtgtgttgttcaattgtgcagccttagctagccaaattgcagcagaacagaacctggataatgatgaaggattgaaaatcgctgctaaacattaccagtttgctagtggtgcctttttacatattaaagaggacgggttttatctgccttaagtcgagagcccgaccgtgggtcantatctcccagataacttttggggacccct

SEQ ID NO: 63085 - DNA, 735 bp, Homo sapiens
acgatttcgtccggccccggcgccccagcccctggccaagcctctgctgtcattttttctccctcctctcagtctgcagctgcgggacgggccgggctcctcagtttctgctgtgttgtgaccccacgaggcgctcagcacccagggaaggcgcgtgtgtccccgatgctggctcctccctgagccccgacggctctcgaggttctgagcctgtggcctgcacagggaacttcctctccgactgcatttatgcctctgtggatgtgaaggctatttctagaaatctcttcctttgcagaaacacccgaaaccctcctgccaggaagaccagggcctgggaagagggtcgctctccggccattctcccctcaccctcctcaccttcctcacatcctgtgccctgggggaccagcagctgcttccacccagaacaagcgggagcctgtgtcaggaaagcatgtcagagcagagctgccagatgtccgaactgcggctcctcctcctgggaaaatgccgctcgggaaaaagtgccacaggaaatgccattctgggcaaacatgtgttcaagtccaagttcagtgatcagacagtgatcaaaatgtgccagagagagagttgggtcctgagagaaaggaaggttgtggtaattgacacccctgaccttttctcctcaatagcttgtgctgaagacaagcaacgcaacatccaacacttgttggagctctctgctcccag

SEQ ID NO: 63086 - DNA, 741 bp, Homo sapiens
  misc_feature (1)...(741): n = a,t,c or g
ggacgtcccggatcgacgtttcgagcccgcagcgcgggtggagaggggcggagagggggtctgtggcacgagaagaacttgaaaccgtgtgaaggaatccggagcacatgagaagggaggaaaataaaagaaagtggagactgcagaacagactccgctgtggctgactgtgccggccgacgctccagctgaggggctgggttggannnnnnnnnnnctcccatcctctcgctctctcttttaaagcgacaccagctctctctcctcctctactatctcgggatcaccaaacccttgccggctcttatgggcatgaaacactcctcccgctgcctgctcctgaggaggaaaatggcggaaaacgcggccgagagcaccgaggtgaacagccccccctcccagcccccccagcccgtcgtccctgctaagcccgtgcaatggcgtccatcatgtgtccactcaacccagctgcccaggacggggcaagatgtccaagctgctgaacccagaggagatgacctcgagagattattacttcgactcctatgcccactttgggatccacgaggaaatgctgaaggatgaggtgcggactctcacttaccggaactccatgtaccacaacaagcacgtgttcaaggacaaagtggtactggatgtggggagtggtactgggatcctttccatgttcgctgcaaggcaggggccaagaaggtgttgggatcgatgctcagtattttc

SEQ ID NO: 63087 - DNA, 479 bp, Homo sapiens
gcagcgtccttcttcgaagcagctgcacctgcaactgggcagcctggaccctcgtgccctgttcccgggacctcgcgcagggggcgccccgggacaccccctgcgggccgggtggaggaggaagaggaggaggaggaagaagacgtggacaaggacccccatcctacccagaacacctgcctgcgctgccgccacttctctttaagggagaggaaaagagagcctaggagaaccatggggggctgcgaagtccgggaatttcttttgcaatttggtttcttcttgcctctgctgacagcgtggccaggcgactgcagtcacgtctccaacaaccaagttgtgttgcttgatacaacaactgtactgggagagctaggatggaaaacatatccattaaatgggatcctgcagtctcagatttccactctgttctgagaccaacactgttatgtgaaatgggtcaagtgtcatccgtcttt

SEQ ID NO: 63088 - DNA, 446 bp, Homo sapiens
tttcgtctctgggcaggacggcgggccgaggagcccggggagggacccggagctccaggttaccaccaaagaatatgattttggtctaggggctccagtttctgaagctgaaaactaccagaatactctccagctagaacaagaagtgagaaaccaagatagattcatctcgacactgaaattacaggttgcgtttagttacaacatattttcctgacttaatttggggtgggagcctattttgaaacaagaagatagagaataaataactactaatttagagctcatttaaatgttatgggtctaaaatcattcaatttttatcttaaccattttgataaacatagagtcagagtcagtgagtgcaaactacgtgtcaagtgttgtgtcagatgttttcaggtatacagtttttacttaatcatccccaacttgcgaaaaagtgg

SEQ ID NO: 63089 - DNA, 788 bp, Homo sapiens
tttcgtggcggggaggcgccgtctggctcaggctggggccggcgggagcgcgaacgagcgacggcggaacccgtgggcctgtggactgcagcctcggcggtcagcagagtgcttgtgatttcacgtatttttgctgaactcgtaaaagagacacttggatggtggattaaccagaacactaacattctgtgaaaagtttcaaattggagaatattgaattttcaccctagtccagcagctccgctgctcacttaaatacagatgaatgaagaccccattcggaaagacacctggccagcggtccagagctgatgcaggccatgctggagtatctgccaacatgatgaagaagaggacatcccacaaaaaacatcggagcagtgtgggtccgagcaaacctgtttcccagccccggcggaacatcgtaggctgcaggattcagcatgggtggaaagaggggaatggccctgttacccagtggaaaggaaccgttctggaccaggtgcctgtaaatccttctttgtatcttataaaatacgatggatttgactgtgtttatggactagaacttaataaagatgaaagagtttctgcgcttgaagtcctccctgatagagttggtaagttctttttataatttgtgcattatatactttaaaaatgatattgaactggatgctttttttattttacattattaatacttcacttttattggaacacaagcacccttcttgataaacattatattaaatcaccgaaaaccacaaactcgtgccgctcgtgcc

SEQ ID NO: 63090 - DNA, 651 bp, Homo sapiens
tttcgtctctcgctcccagcgccacggacgcccccgggccgagcggcggtgcgctcccgtgcagacccgtggacagacgcccctggccggtggactctcgagtctcgcttctgcaccctgcgtccccagacatgaatgtgaggagggtggaaagcatttcggctcagctggaggaggccagctctacaggcggtttcctgtacgctcagaacagcaccaagcgcagcattaaagagcggctcatgaagctcttgccctgctcagctgccaaaacgtcgtctcctgctattcaaaacagcgtggaagatgaactggagatggccaccgtcaggcatcggcctgaagcccttgagcttctggaagcccagagcaaatttaccaagaaagagcttcagatcctttacagaggatttaagaacgtaagaactttctttttgactttaccttcacacaattcccagaggagcattgagaaatgagaggaaaagggggaaaatatcccattctatgagagccccatcatatgtatatttcatactgatccttcccagataggaatataatcagtatctgtggactttgaatctctgtggcacacccatgctggcatactgtaattgcccattaaacaaagagtttttgagaaaaaaa

SEQ ID NO: 63091 - DNA, 1394 bp, Homo sapiens
ggtcgacgatttcgtagccgggcagctccctaaaccttagcaacagaaacaaaacacacgtacaaaaggcagtcctggaggggaagcgtggtcccggcccctcctccggtttgtactgtgtggattgacgcggacgttcaaacccgctcggacacctggcaacaaactcgaaagtgactgctgaaggcagtgcgcccggtgagacgttgttgcagttcccttggggactgggattggcatgctttagctatctgaacgaaacttccctttggggagttaagttttccagagactcagagccttggggcactgagggatgccagttctgcctgttcatctggaacctggatctaaggagggaagaggcgttgcccctgctggcatagtcaggtaccagcccagccaggtattgaacgggctgagcttttcatgatggttcctgctgacctggaaacatcttaaatggaaggttagcttctatgagtcactgatactctttttattgctatttctaaatttccttggcttgaaaattacttctgctttgcagaaattatctgcttgcagctgtggataatttataacaatctctggtgaaacctcagaaaagagatatgcttttgtcttagatggatgtcagcagctgctgcagaacccggtgaaaacaccccccgggtagcacgaggctctgcgagccgtaactccgacaaacgcagaacttcttgaggctttcttcttctaaggagtatgacacagttaaaaaggaaaaaagaaccacaagcaaaacagttgccagtgaaataggagagggagctctttaaacaaggctggctgcagctggcctccgccgctcatctgcagggcgtgagcgcttggtccatgcagtgaagctcttccaacctgggtcaacgaaaacggagaagaaatggcccaagaaatagatctgagtgctctcaaggagttagaacgcgaggccattctccaggtcctgtaccgagaccaggcggttcaaaacacagaggaggagaggacacggaaactgaaaacacacctgcagcatctccggtggaaaggagcgaagaacacggactgggagcacaaagagaagtgctgtgcgcgctgccagcaggtgctggggttcctgctgcaccggggcgccgtgtgccggggctgcagccaccgcgtgtgtgcccagtgccgagtgttcctgagggggacccatgcctggaagtgcacggtgtgcttcgaggacaggaatgtcaaaataaaaactggagaatggttctatgaggaacgagccaagaaatttccaactggagataactctgtgatgaacgtcttgtacaggcaaacatgagacagttggagggcagctcttgcaatcttatcagaag

SEQ ID NO: 63092 - DNA, 696 bp, Homo sapiens
gccggaattcctgggtcgactatttcgtcgcctcggagcccgccggggcagccgccggacaccaggaccgcgagccagacagctcccggaagccgcgccgccgccgccaggtgcctgactgacagaagttcttgcccccggggagctggtgtggacagaggaggggcgtgctggtcaccatgacaacagagacaggccccgactctgaggtgaagaaagctcaggaggaggccccgcagcagcccgaggctgctgccgctgtgaccacccctgtgacccctgcaggccacggccacccagaggccaactccaatgagaagcatccatcccagcaggacacgcggcctgctgaacagagcctagacatggaggagaaggactacagtgaggccgatggcctttcggagaggaccacgcccagcaaggcccagaaatcgccccagaagattgccaagaaatacaagagtgccatctgccgggtcactctgcttgatgcctcggagtatgagtgtgaggtggagaaacatggccggggccaggtgctgtttgacctggtctgtgaacacctcaacctcctagagaaggactacttctgcctgaccttctgtgatgctgacagccagaagaactggctggaccccttcaaggagatcaagaagcacatccggagtagcccctggaaatttgccttcacag

SEQ ID NO: 63093 - DNA, 978 bp, Homo sapiens
tttcgtggagacgactgtgagcgtgcaaagcgcagagtcctctgatgccctgagctggtccaggctgcccagggccctggcctccgtaggccctgaggaggcccgaagtggggcccccgtgggcggggggcgttggcagctctccgacagagtggagggagggtccccaacgctgggcttgcttgggggcagcccctcagcacagccggggaccgggaatgtggaggcgggaattccttctggcagaatgctggagcctttgccctgttgggacgctgcgaaagatctgaaagaacctcagtgccctcctggggacagggtgggtgtgcagcctgggaactccagggtttggcagggcaccatggagaaagccggtttggcttggacgcgtggcacaggggtgcaatcagaggggacttgggaaagccagcggcaggacagtgatgccctcccaagtccggagctgctaccccaagatcaggacaagcctttcctgaggaaggcctgcagccccagcaacatacctgctgtcatcattacagacatgggcacccaggaggatggggccttggaggagacgcagggaagccctcggggcaacctgcccctgaggaaactgtcctcttcctcggcctcctccacgggcttctcctcatcctacgaagactcagaggaggacatctccagtgaccctgagcgcaccctggaccccaactcagccttcctgcataccctggaccagcagaaacctagagtggtggagtctcgctctgtcacccaggctggagtgcagtggcatgatatcggctcactgcaacctctgcctcccggattcaagcaattctcccgcctcagccttccgaatagctgggactacaggcgcatgccaccatgcccggataatttttggatttttagtagagaggggatttcaccatgttggccaggatggcctctatctcttgatcttgtgatacg

SEQ ID NO: 63094 - DNA, 1035 bp, Homo sapiens
ggcacgagccagcgcagccgggagacagatgcgaggcggcggtcagcaggtgccgaacccacggccaggcttccgtggccagcagccctagaggaatggccatcctgtccctgcgagcccctgggccctggcaggcgatgcaggtgggatgctatggaatatgatgagaagctggcccgtttccggcaggcccacctcaaccccttcaacaagcagtctgggccgagacagcatgagcagggccctggggaggaggtcccggacgtcactcctgaagaggccctgcctgagctgccccctggggagccggaattccgctgccctgaacgcgtgatggatctcggcctgtctgaggaccacttctcccgccctgtgggtctgttcctggcctctgacgtccagcagctgcggcaggcgatcgaggagtgcaagcaggtgattctggagctgcccgagcagtcggagaagcagaaggatgccgtggtgcgactcatccacctccggctgaagctccaggagctgaaggaccccaatgaggatgagccaaacatccgagtgctccttgagcaccgcttttacaaggagaagagcaagagcgtcaagcagacctgtgacaagtgtaacaccatcatctgggggctcattcagacctggtacacctgcacagggtgttattaccgctgtcacagtaagtgcttgaacctcatctccaagccctgtgtgagctccaaagtcagccaccaagctgaatacgaactgaacatctgccctgagacagggctggacagccaggattaccgctgtgccgagtgccgggcgcccatctctctgcggggtggtgcccagtgaggccaggcagtgcgactacaccggccagtactactgcagccactgccactggaacgacctggctgtgatccctgcacgcgttgtacataactgggactttgagcctcgaaaggtttctcgctgcagcatgcgctacctggcgctgatggtgtctcggcccgtactcaggctccgggagatcaaccc

SEQ ID NO: 63095 - DNA, 460 bp, Homo sapiens
tttcgtgagagaaagggtgacacacagagacggagagaggagtagctgaaaagagacagcaagacagagaaggcagagacaaataaggagagagcagcaggagagagacacatagaaaggggagcgaggagagagagacaaagggagagatgaaggagggagggagagatggggtgggggcaggaaccaagagacaaagagatgagaaggagcaggacagaccaagctggagaagggaaactgaagcagggggctttccacggggtgtgcatgtggaggaaagcccccaggaccgcctcgccctgcccctctgtcccagggcctctctgcgagcctggctgctgagctgctgctgcgggatgggcccatacgcactgcggccaccacggggcaccccagagtacgtcaagttcgcgaggcagctggtcggaggcctgcagtgcctcatgtgggttgccgc

SEQ ID NO: 63096 - DNA, 676 bp, Homo sapiens
tttcgtctgccgtgctgctcggcggcgctgaggccaaatagttgcatcacatgtatctaatccgagagtctcatgcttctggtagctcctcagtgaccagctcctgctcactgccctcagaaagcccaaccctcaggcaatggcggccttgttcctgtctgccccaccccaggccgaggtgaccttcgaggacgtggctgtgtacctctcccgggaggaatggggccgcctgggccctgctcagaggggcctctacagggacgtgatgctggagacctacgggaacctagtctcactgggagtaggacctgcaggccccaagcctggagtgatctcgcagttggagcgaggggatgagccctgggtcctggatgttcagggcacctctgggaaagagcacctgagagtcaacagcccagctcttgggaccagaactgagtacaaggagttgacttcacaggagacatttggtgaggaagatccccagggatctgagccagtagaagcctgtgaccacatcagtaagtcagaggggagcctggaaaagctagtggagcagagaggccccagggcagtcacactgaccaacggggagagcagcagggagtctgggggaaacctcaggttgctgtcaagacctgttcctgatcagagacctcacaaatgtgatatatgt

SEQ ID NO: 63097 - DNA, 2584 bp, Homo sapiens
  misc_feature (1)...(2584): n = a,t,c or g
ttttttttttttggagttcattagaccttttttattattctaccttttctgcatatgtttgcagttttcccaccgactcctccataaacaaacattttcctagaaacccaaaatatgtagtggccccaaaggagctccttaagccaaagtacttggtacaaagagacccatattcctataaacatgttaagtttgttcctaagcattccagacttttagaataagaacttcatttccaacttttttatttattaacatggggctaaacttttaagaaacaaccctaggtcttctatttcccaggagctggttcaaagtcttaaatgacaatataacttcattatgaaaatatactgaaaaggtacaaggggctgatgtaaaaacggttaatcaagggttcccaggcatccatggggacttaagggtaacctgaaagaataacccccagcccaggctgcaaccagccaggccaggatgtgctggcttnacgtngatgaggtgctaaggcccatcgaatgcctcagaggaaagccggattcacgggggatcatctcaaccctgaggaaatcggttccttggggggtgatttcttgcccttttttttgtttttgtaaggaagagggttcccttcattccagtaactttagttttcccttaataaatattttcaaaaataaaaccaatcatcatccaaacaaacagggagccacttttgtagggtaagggtaaatcacaggataatgtattgggataactctgttttttttaaaataaaaaagccttacatggtcgagggattgatggagtggggatgacgaaatgcacatttcagactttcatcaccaatgaaaaaataaagcattttcatagacttaaaactgtcattagtgcattcggcttttggagaagggatgaaaatgtaaaatacttctacaacaataaaatgttaatataaatccgtcatgtgctgaggtcattttaagtgagctaccattgtttgtttaaatacaagaaaaagtaatttccttggtcccaatttaagtggaaatcctttaaaaaagattgcctttaaaagaaccattatttgaggacaatgtttttccaggccacatttctgatgatattcaaattcacttcataccaatcacagattaacccttttaattccacctttccttaaaaagctgtcagatttccatttcttcgggagacatttttcacccagtgtgttgttcgattcccacaggttaagctttcttcattattattaaggaacttcataccatattagagagattgccattcattgctttcctcgtctttttcggaaaagacacaggccagacttggctagactaaagctgacgtctttaaaggcatgcaacaagaatatccccacaatgattgtaaagaagccactcaaagtaccaatgacatcgtcaacaggcatatcttgccactccttaaaaagaatagctgaacaagttaaaactgatgttgtaaagaatacataatatattggagtcacaatggaagtgttgaatatatccagggccctatttaggtaattaatctgtgtgctcacacagacgatgaggctcagcagcagaatccaagccaggggatgccgcagcacaggcttccctgcaaacagctccttgatagcaatgcccaggcccttcacacaggagactgaaaacgcgccgattacagagcagattgttatgtacacaagaatgtttgtctgtccatggcgaggacccaccacgaagattaatatcaaggccacaatgaccacaagggttgcaaagaccacaaaacctggatcacctagcttgtgagacatttcatttaaagtctcaatctcctcttcctttggagcatgaatgaccataactgtagatcctagaatacttagcaaacacccaattttcccatgaagattaagtctttcattgagaaagtatgaagaaagaatggcacttactagcacgctgagagctcctagtggagtcactagagtggctggtgcaaacgcatacgcagcgaagttggccacctcaccagctcccattgacagcagtccagcccaccacaaccattccttaagatatgcatggccaccttgacctgctctcatagagcctttcctggcaagtcgaaggaggcccttttttttcaaaatgaaacttcctccaatgaaaatgctggagctcatagccaatcccagaccaatatagaagtcatattttccacgcccctggctcatttcgtttgttacttaaggagttcctgtgaatcacattgatcacagaacagagaaaccgctggtactagaggcagaatgaagcagtcttcaaaccctagtcggccgaccggccgcgcggcttcccctcgccggcgcagccttgggcaccgcggctcacacccccacacaggccgcccagtcctgcgctcgcacggccaccgccttcgtcgccgtccagtgggagatgcgagcattcggggctgaagccgttcgcaccgcctcctccatggagaagcgccgagaaaaacctgccaaggacaacctccggcaccgccg

SEQ ID NO: 63098 - DNA, 1727 bp, Homo sapiens
gatcgcgccgcacgatttcgtctggacagctccagccgtgtcctgaggagctggaccagccacatcccctggggctgcagttgaagcagaaccaagtggccatcccggcgttagaccgtaggttcctggtcccggagtggtcggagcccgccagtgggcaggcagctcttgctcacaggccgcggtgcccaggccgctggctctccgcagggcggaatggcgctgcaagtggagctggtacccaccggggagatcatccgcgtggttcatccccacaggccctgcaagcttgccctgggcagtgacggggttcgggtgaccatggagagtgcgctcaccgcccgtgaccgggtgggggtgcaggatttcgtgctgctggagaacttcaccagcgaggccgccttcatcgagaacctgcggcggcgatttcgggagaatctcatctacacctacattggccccgtcctggtctctgtcaatccctaccgggacctgcagatctacagccggcagcatatggagcgttaccgtggcgtcagcttctatgaagagccccctcacctgcttgccgtggcggacactgtgtaccgagcactgcgcacggagcgtcgggaccaggctgtgatgatctctgtggagagcggggcaggcaagaccgacgccaccaagaggctgctgcagctctatgcagagacctgcccagccccccaacgcggaggtgccgtgcgggaccggctgctacagagcaacccggtgctggaggcctttggaaatgccaagaccctccggaacgataactccagcaggttcgggaagtacatggatgtgcagtttgacttcaagggtgcccccgtgggtggccacatcctcagttacctcctggaaaagtcacgagtggtgcaccagaatcatggggagcggaacttccacatcttctaccagctgctggaggggggcgaggaagaaactcttcgcaggctgggcttggaacggaacccccagagctacctgtacctggtgaagggccagtgtgccaaagtctcctccatcaacgacaagagtgactggaaggtcgtcaggaaggctctgacagtcattgatttcaccgaggatgaagtggaggacctgctgagcatcgcggccagcgtccttcatttgggcaacatccactttgctgccaacgaggagagcaatgcccaggtcaccaccgagaaccagctcaagtatctgaccaggctcctcagcgtggaaggctcgacgctgcgagaagccctgacacacaggaagatcatcgccaagggggaggagctcctgagcccgctgaacctggagcaggccgcgtacgcacgagacgccctcgccaaggctgtgtacagccgcacttttacctggctcgtcgggaagatcaacaggtcgctggcctccaaggacgtggagagccccagctggcggagcaccacggttctcgggctcctggatatttatggctttgaagtgtttcagcataacagctttgagcagttctgcatcaattactgcaacgagaagctgcagcagctcttcatcgagctcacgctcaagtcggagcaggaggagtacgaggcagagggcatcgcgtgggagcccgtccagtatttcaacaacaaaatcatctgtgatctggtggaggagaagtttaagggcatcattctcgattttggatgaaggagtgtctgcgccccggggag

SEQ ID NO: 63099 - DNA, 525 bp, Homo sapiens
cgattcgcgccgagtgtcctggaggagctggctcgccaacgaaggggtaaacacctctgcctgttcatctggctctccatgaatgtcctgcttttctggaaaaccttcttgctgtataaccaagggccagagtatcactacctccaccagatgttgggggattgtgtctaagcagagcctcagcatctgttcttaacctcaactgcagccttatccttttacccatgtgccgaacactcttggcttacctccgaggatcacagaaggttccaagcaggagaaccaggagattgttggataaaagcagaacattccatattacctgtggtgctactatctgtattttctcaggcgtgcatgtggctgcccatctggtgaatgccctcaacttctcagtgaattacagtgaagactttgttgaactgaatgcagcaagataccgagatgaggatcctagaaaacttctcttcacaactgttcctggcctgacaggggtctgcatggaggtggtgctattcctcatga

SEQ ID NO: 63100 - DNA, 479 bp, Homo sapiens
ggggggcggaattccactccttcacccactgggcagctgcagcaatgctctctgtcttggtgatgtccatggtcaccgtctccagcctgtctgaagtctggcccctcagctgcttggtccccttctctgtcctacatgcagctcccgcaagcctgtgcattcagttgtctggccagtagcttcctgaagcgtgagtcacagctcatgatgaacacgtacttgtctctcaggtgactcaccacctgcctctcccagtaccagtgcagaaggtagtataggcccaggaggaccgccaggtagagccacatggctttgcagaggacagacccagacgggctggggtgaagtgagagtctggcctctgttcagacaggaggacttaagaacacagagggctgaggtaggcagggaagccctcaggcattttggcagaaagtcctcactttcctctctgatcactgtctttctgcaccattttc

SEQ ID NO: 63101 - DNA, 670 bp, Homo sapiens
gaagtgcggtggaattccagagtcgctaatgtatcccccacaatggcagttgatgacagcaatttatattccattatcgaagaacaaactaaattcatctcaaaatgattataaatcatcaagaaggagtagcctgccacctgaactactcataggaaatgacattagaggaagacttcaaagaaacattaagaacttggatcccattcacctgaggcacccgaagaagagaccatccatatttccaggacggaaacacaccctttccttaggcgtcctgcgtcccccgattcctgctccctggttgccgcgtccttggctggcgtcagaaaaatggctacaaactttctagtaggtgagaagatctggttccacaagttcaaatatggcgatgcagaaaggagattctacgaacagatgaacgggcctgtggccggcgcctccctccaggaggccagcatgatcctccatgatattgccagagccagagagaacatcccgaaatccctggccggaagcttaggcccaggggcgtctagcggccccagcggagaccacagcgagctcgtcgtccggatcgccagtctggaagtggacaaccagagagacctggctgaacgtgctggagaagagcttgcccggccactgggccacagccccgcagacccag

SEQ ID NO: 63102 - DNA, 1003 bp, Homo sapiens
ctccgccccacgagcacctgtttccgagcggagagcgcgggccgttttctttcctggtgtcccgtcgcggcttgggacccggcaagatgggcaagaagggcaagaaggagaagaagggccgcggcgcggagaagacggccgccaagatggagaagaaggtgtctaagcgctcgcggaaggaggaggaagacctggaagcgctcatagcccatttccagacactcgatgccaagaggactcagactgtggaacttccgtgccccccaccctcaccaaggttaaatgcctccctctcggttcatcctgagaaagatgagttaatcctttttggaggtgaatatttcaacggccaaaaaacttttttgtataacgagctctatgtctacaatatcagaaaggacacctggaccaaagttgacatccccagtccacctccgaggcgctgtgctcaccaggcggtggtagtgcctcaaggtggcggacagctgtgggtctttggaggggagtttgcctctcccaacggagagcagttctaccactacaaggatctctgggtcctgcatttggccaccaagacctgggaacaagtcaaatcaacaggcggtccttcgggtcggagtggacatcggatggtggcctggaagagacaattgatcctgtttggtggcttccatgaaagtacacgggattacatctactacaacgacgtgtatgcctttaatctggacaccttcacatggagcaagctgtccccgtcagggacggggcccacacccagatcaggctgccagatgtccgtcactccccagggcggcatcgtccgtctatgggggctactcgaaacagagagttaagaaagacgtggacaagggcacacggcactcagacatgttcctgctgaagccagaggacggaagagaagacaagtgggtttggactcggatgaacccttcgggggtcaagcccaccccacggtctggcttttccgtggccatggccccga

SEQ ID NO: 63103 - DNA, 2503 bp, Homo sapiens
gtaccggttcggaattcccgggcgcgccggggcacatttatctgtttttcattaacaattttaactaaatagaaatataattctgttagctcttctacaggtctacttaaactttgaaagatgagattgttcaaaaatgacacgagaaaatcacccatcaccactaagttaaagacttgaatatgtgagagttccagagcctcaaactcctactacagtcactgatccataacattttcctcttgcaatggactccacgccaaagtagctcagtcttgcggcatgtttgtgcaccaaaaagtaggtttcgaaagatccagcactagtcatcactgtcactgccagactcactcaactgcaagtcatttctgagggtgttcatgagctggttgcttccttgtggccggctggttccattggcaacggcaggcctactgttgtagggctgctggtgtgaaggctgcggaggagaggctgggccattgtcctcgcctccactgctggagctatcgtcatcacttcccgaagagctctcagagtctgaagagctgctcccactgctgctgctcatttgttcaataatgtcaacttcagccctcagctctcttttgatgtcatccaactgaggttcaggtgaggggttatctttcaagggagaagttttgggtccaactggaggcttcgttggagctctgaatggcataggtggtggaggtggtggtggctgtgacgtctgtggaggacgagtgggctgctgttccattcgggcctggattttactgctgccctcagctcttgttttcttcacctgaatgctgctactgagtttttccagcacatattcaccagtgtcatgattaataataagcacacagtctttctggtaaggccgtttgttccccttgaacacagtcatgggtggtgtggatccagggatatgtggcagtgtaattgtgacttcatctcctttgccaacttgaagctctccttcacaggaagtgtctatagatgctggtttaaaatcataacgaatagtgtggaaggaggcccgcggccgcttctcgaagctctccccgagcctcaggcaatgttcctcgcggtccagcagcgggtttgcggtcccattcatggccccgcacctgcctcgcacccagatcggcgctctcccggtgcagccgcgatccgagcttctggcgctggcgtctgggaggactgtgcttccgggccaccgctctggaagacaaggagagccgagccggcacccacccgggtccagaagcaagttctctcctctgcgtgggggtgagagaggaatctgaggaggcaaggccgtgggacttccggcgtcgggtaggaacttccgggttcctagcggaagtggcgggggcggtgccatggcaaaagaactcccggagaatccgaattcgtggtcctcagaattggtttagggttgtttcgcggttcttcccgtattctgcctccgaggcccagtggggctggctgtgggccccctgtgctgtttgaggcgtgaaactcacctcaggaaatgtatctgatccattagcgtggattcatattatttggtgatggagaatcttcagctgtgttaagtgttaccgtcagtttcagagatggcttctttgcaaaggaaagggctgcaggcaaggattctcacctctgaagaagaggagaaactgaaaagagaccaaactttggtgtctgattttaaacagcagaaattggaacaagaggctcagaaaaattgggatcttttttacaaaagaaatagcactaatttcttcaaagacagacactggaccaccagagagtttgaggagctaagatcatgtagagagtttgaagatcaaaagttaacaatgcttgaagctggctgtggggttggaaactgtttattcccacttttagaagaagatccgaatatctttgcctatgcctgtgatttttctccaagagccattgaatatgttaagcaaaatcctttatatgatacagaaagatgcaaggtattccagtgtgatctgactaaagatgatcttctggatcatgtaccgccagagtctgtggatgttgttatgttgatatttgtgctgtcagctgttcatcctgataagatgcaccttgtcttacaaaacatttacaagtgccatggctgctcttcagagcttcgccagccctgggacaaggatgattttgcagttacctgggatccatggagtcctgctataaggtattaaaaccaggcaaaagtgtcttgtttcgtgactacggactgtatgatcatgccatgcttaggtttaaagccagcagcaaacttggagaaaacttttatgttagacaagatgggaccagatcatatttttttactgatgacttcctggctcagctctttatggacacaggttatgaagaagtggtaaacgagtatgtgtttcgagagacggtgaataaaaaagaaggcctgtgtgtgccaagagttttcctt

SEQ ID NO: 63104 - DNA, 1732 bp, Homo sapiens
ttttttttttttagaggatttcatgaggctttaatcataacctaataatactgttaaaaacaacacatctgtcacttgcagagacccacagggacacacattctcttcctctcacatagactctgaggtaggaggtacactggctaaggaataaaaaatactcagtggctgtgcaaggctcagaccaggctcacaaggctcttggttgaaaagcagccccttgagagcaagagcagaggccaggccagcttcactgagatcccagaggttctgactggggctgcccagagttgggcatccctgacttccggcatttgagatctaacccgggactggttggtgcaagtaggggatgaagctaaggtggtagctggtcttgttccaggttgcaaggatagaatgatgttcctagcacataaactgctctcggtgaagatttgtttcacgaattgaatgaatggtgtgggggaggggaggaagaattctagaggacagtccctgtggccttctagcccaggataggggagctaaggggtggggaagcccctatgccaatcattttagaggtggccagggagggaggtgaaagttttggggcaccagctataccaatggcagggggaaaagaaaaggtagtcttctttcctcccaaagtgtcttgtacgtaattggggctcttgaccctgcagggcccagcccttctcatcttgttcactgtgaactccttgaaggcaggcctctgccccactcagcaccatccctggtgcacggcccagcagaggcatcccactcttgctgagtgcatggaggccacagcagcattgttagcttatcctcgcctgccttctgccagcagtcactctccatctctgctggctgggtctgatcctgcttcaaaggacgccgttcacctctcccttcactggcgaagcagcctcagccttacccttgggaaaaaagttctgtgctaactgggtctgaggcagctgatacccctctgaggaaagtagactctgggtcctgtccacctggtcagggttgggctcccagcagcagctagggtgcagccagcagtagcacacaagccacagagccaggcccagaaagaagcatccgcctcctacaggcagccacagctgcagtggaatcctgctgggcagccaggagctataagtcacccaggtggccaccaggagaatgctgtcactcaggaggaaagccaagtggatggtggcccggcctcgggtgtggccctcagccacgttgaaccaggagaaatagaggatactcggaactggggtccagcatgaagtctgtgccttgaagccaaacccagagcagcagtaccagccacaggcccaggaaatgcagggctacatactggggaagagggctgagaacagggccacagctaggactcggggccacagtagcagcaggttccacaggacgtagatcacagaggagcccaggcccaggaggggcttggaggggaggcaggtgtgcaaggcctggtggtaatcgagcagtgcccacgagatgcccaggaaggatgtgcagatgccaacccctctgtctggagtctcatcacacagtaattatctatttccttttctctgagctcctcgagggtagaaaacagactctgctcacttgggatcccccagcagcccagtaccttgttcaaacttgaaatcaatttaagaatactggttcatttcttttctctttt

SEQ ID NO: 63105 - DNA, 1988 bp, Homo sapiens
tttcgtcacccacgttggcctcccaaagctctgggattacagatgtgagccactgcgccctgctggagtattttcgatccaagagaacatcgtggacattatgtagcagcttccagccttctttctcatagaaacaaaggcagagaagcagcacccagactttgggaatgttccatttggctgctgcactcccatccaccctgtgtacacatcctccagaggcgatcacctcggctgttgggctctgaggcccgagtgccttcgcatagtgtcgagagcgccatggacctctacctctgtgggttttgtggctgtgggacctcagtgccttcctgtgcgtggcctggcactcttcgcgccctgttcgcgatgactcggtagtagagaagtccctcaagtccttgaaggacaagaacaagaagctggaggaaggcggcccggtgtacagcccccccgcagaggtggtggtgaagaagtccctggggcagcgggtgctggacgagctgaagcactactaccatggcttccgcctgctatggatcgacaccaagatcgcggcacgcatgctctggcgcatcctcaacggccacagcctgacccgccgggagcgcaggcagattctccggatctgcgctgacctcttccgcctggtgccgttccttgtgttcgtggtggtgccgttcatggagtttctgctgcctgttgctgtgaagctcttccccaacatgttgccatccacatttgagactcagtcactcaaggaggagaggctgaagaaggagcttcgggtcaagctggagctggccaagttcctccaggacaccatcgaggagatggccttgaagaacaaggcagccaagggcagcgccaccaaagacttctctgtgtttttccagaaggtgctgtgatacgtctgagtccctgtgacctcaccagggagccttccctgattttctgtttccctttcgctgtgctcagcagagtggagctcccccaggtgctggctggcgcttgaaagtttacccaggaggctcagtcgggggccagtggagtgtcaggagtctgcccccacgagctcccagtgagttaagctgtggtggctgcgcctcgtcagccttcagaattatgggcgtctgtgtctcatcaccctgcagctgtccaggagcagtagaatctgacccatgaggagcctgagaccctgatggtgtgaggtgtgggtggcttggccgggctcctctgctgggcattgccctctggctggagtcagtcaagaagatcccaggtcccaggggctggtcagaggcctggactgtgggagcagtgggggctggagaggaggagcggcccttgaggtttcctgcggtcatgtggtgagtgaggtgaggatggggagacggcagctggcacggaccgagatccctgaggactagatggggttcacgaggccggtgttgttggcttgagggacttgtgccactttggagtgagaaggatgtgtctgaagtgcacgaagagcttaaaccagggcctagaaactccagccatgcgtgtgcgttgtctgtggggttttcccgctgcagcacagaggcgagtggtttccatggctgcaaagccagaaatacttgctgtctggcccttgacagaaaagactgccaggctgaggcctaaccacggagaagcctctcgggaggaggcgacacagccatggggctgctgagccccccagggagtgggtggtggttccagcaagatgttttagggggagccatgctttgggagcctcacccaggacatcgtgccttgcagagcaggaggggcccgtcccaacctttcctgggccgcccagctgccaagaaggatgtgcttgcagtcacctgcacgggggtgtgctgcatagggcccccctcaggagcacacctgaaattgtgcttagagccggcatcctgcatggtacgatttgagttgggcaccaagtcagcctcgtcctc

SEQ ID NO: 63106 - DNA, 841 bp, Homo sapiens
ccgggtcgacccacgcgtccggtcatggcggcctgcaggtactgctgctcgtgcctccggctccggcccctgagcgatggtcctttccttctgccacggcgggatcgggcactcacccagttgcaagtgcgagcactatggagtagcgcagggtctcgagctgtggccgtggacttaggcaacaggaaattagaaatatcttctggaaagctggccagatttgcagatggctctgctgtagtacagtcaggtgacactgcagtaatggtcacagcggtcagtaaaacaaaaccttccccttcccagtttatgcctttggtggttgactacagacaaaaagctgctgcagcaggtagaattcccacaaactatctgagaagagagattggtacttctgataaagaaattctaacaagtcgaataatagatcgttcaattagaccgctctttccagctggctacttctatgatacacaggttctgtgtaatctgttagcagtaaatggtgtaaattgagcctgatgtcctaccaattaatggcgcttccgtagccctctcattatcatatattccttggaatggacctgttggggcagtacgaataggaataattgatggagaatatgttgttaacccaacaagaaaagaaatgtcttctagtactttaaatttagtggttgctggagcacctaaaagtcagattgtcatgttggaagcctctgcagagaacattttacagcaggacttttgccatgctatcaaagtgggagtgaaatatacccaacaaataattcagggcattcagcagttggtaaaagaaactggtgtaccaagaggacac

SEQ ID NO: 63107 - DNA, 591 bp, Homo sapiens
  misc_feature (1)...(591): n = a,t,c or g
ggacattacagttttgcatagacaaggtgaacatttctcaaaacaccatgtctctccaattttctaatggatccaggcatgtttgcttaaggtctggagctggatctgtcagacccctcaatggaggtgcaggctttgcaggcagcagtgcatgtggtggctctgttgctggaagtgaattttcctgtgccttgggagggggcttgggcagtgttcctggtgggagccatgctggtggtgcccttggaaatgctgcttgtattggctttgctggaagcgaagggggactcctctctggaaatgagaaggggaccatgcaaaatcttaatgaccgcttggcatcctacctggataatgtgcgagctctggaggaggcaaatgctgaattagagagaaaaatcaagggttggtatgaaaaatacggacctggatcttgccgtggacttgatcatgactatagcagatatcacctaacaattgaggatcttaagaataagattatctcctccactactactaatgctaatgtcattctgcagattgataatgccagactgntgctgatgatttcaggttaaagtatgaaaatga

SEQ ID NO: 63108 - DNA, 1672 bp, Homo sapiens
gagttagaagggagctggattgagagactgtgttaggggcgggggtatggaacgtagtggaaagggcagaaatttggatctcagttcgcgcccaccccgcaggcgcctcccgcgagccgggccctctgtgagtgagacaagctccccttcctttacgcgcctcacctggcgcgtggggagaggtcggcagccctccgccgcagaacctccggaagggatgtcctctgccctgcgcctctggccggggctgtggtccctccaggccgtcgaggggatgctgaggccggtccccagaggagcatgacttggctggtccggaggagctctgagggcatgggcaatcttggctcgctgcaacctcagcttccagagttcaagcgagtctcctgcttcagcctcatgagtagctgggactacagatgcgtgccactacgtccgtctgatgtttgtatttttagtagagacagggtttcaccatgttggtcaggctgctctcgaactccagatctcgtgatccgcccgcctgggcctactaaagtgctgggattacaggcgtgagctagatctgactttctagtgtcctagccttggcccgatggacatgtcatttctctcagctcgtttctgtcccctaaagtgagaatattacctgggaagattacattagacgatgtatatgcgaagacacttgatagctggtattgtcatgattctgattagttcactactgctactttccctgtggcctaggctttgcctatttccagtgggcgagctagctagatcctcctcccttaaataagccagtgtttttaagacagaatactacttgcatagtggacaataatatcttaaagaactgagcaggatgaaaagaatttgatagaaagcaggtttgaggagcacattggaggttggcaggtttcgaggctgcttgagaggacttgggccgatctgggctgggcttggacgtgaccctggcacccaggcaggtggatcccagctggggcttccattcacgactttctggtccctggcaggacagagcgggatgccaccagcttgtccaaagggaagttccaggagctcctggtgggcatcgttgtggagaatgacgctggccgcggcgagatcaacgagttgaagcaggtggaaggggaggcttcgtgcagcagccgcaaaggaaagctgattttcttctatgagtggaacatcaaactgggctggaaaggcatcgttaaagaatctggagtgaagcacaagggattgattgaaatacccaatctttctgaggaaaatgaagtagatgacactgagaatttacaacgggaatgattttaccaacgaaagctatggcaacccaggaattgactgtcaaaagaaaactgagtgggaataccctgcaggttcaggcctcatctccagtggcactgggtgtaaggattcccactgtggctcttcacatgatggaactgtttgacacaactgtagagcagctgtatagcatcttcactgtaaaggaggtaagtaactccctaagctagcatgttaagtgctgacattgggagaaaatacattacaaagaacaggagctggtttttggttttccttgtggctgtgtttttgattgaagggatgtgggatggtggtgacagaagtctgagcatagttg

SEQ ID NO: 63109 - DNA, 1215 bp, Homo sapiens
  misc_feature (1)...(1215): n = a,t,c or g
gagcctgtagcctgcctgcagagtagggcaccgtaggtctccctgagacaagggagaccccaggaagttgcttgggttgggggaggccctcccacctgccccagcccccctcacccacaaaggacacgaagctggtcttgtcaatgaggatccagatgccgaagcagaagatcaggctgccgaggacctggggagaggagatgcggatacgggggtgggccacaggggaagatgagggctgggttagcggcaggggctgggccccgtctgggtagccatgaggcaactcacgaagaagaagaggttgaaaacgaagaggaagtacttgatgaggctgaggcagctctcctgggctgacatcttcacctagtgggcttcccaaagttctgggattacaggcgtgagccaccgcacccggctgacaagtgtccttctaagaaacacacagaggagaagacacagaagaggagagcaccatgtgatggtagacacagaaattggagttctacagccacaagccaaggaactcctggagccaccaggagatggaagatgcaaagaactgattttctctcaaagcctctggagggagtgtggccctggtgacaccttgattttggacttctggcctacagaaccatgcacacaggaggacttcatttcccaggtctccttgcagtgaagttgaggccatgtgactggtcttgggccaatggaatgggtgcagaagggacacagcccatttctagactcagcctgaaatgtcctccataatccttactctttctcccttcactcactggctgcaggaagctgagaattatccttggacttacataaagcattttggactttatgtaagtaacaacctgttgtattaagctactaagattttacggttgtttgttaaatcagctaaccttaaacatcctaacaactacaaatagaatacctgttactgcatacactatatatatcaaaacattattatgggccaggtgaggtggctcatgcctgtaattccagcactttgggaggctgaggcgggaggatcacatgagcccaggagttcgagaccagcctgggcaacatagtgagaccctgtctacaaaaattaacaaaaaaattagctgggctttgtggtatgtacctacagtcccagctactcgggaggctgaggtgggaggactgcttgagcctgngagatcgaagttg

SEQ ID NO: 63110 - DNA, 4654 bp, Homo sapiens
ctcgacgatttcgttaacgtcttcccttggagatgggcgcgcaaaccaaccagtgggtctgggggcggcggtgatgggcgtggagctggcccaatgagggtaggggtgggtggggcagccccgagcagcagtgctaaaggagcccggcggaggcagcggtgggtttgggactgaggcgctggatctgtggtcgcggctggggacgtgcgcccgcgccaccatcttcggctgaagaggcaattgcttttggatcgttccatttacaatggcgcagagaactggactcgaggatccagagaggtatctctttgtggacagggctgtcatctacaaccctgccactcaagctgattggacagctaaaaagctagtgtggattccatcagaacgccatggttttgaggcagctagtatcaaagaagaacggggagatgaagttatggtggagttggcagagaatggaaagaaagcaatggtcaacaaagatgatattcagaagatgaacccacctaagttttccaaggtggaggatatggcagaattgacatgcttgaatgaagcttccgttttacataatctgaaggatcgctactattcaggactaatctatacttattctggactcttctgtgtagttataaacccttacaagaatcttccaatttactctgagaatattattgaaatgtacagagggaagaagcgtcatgagatgcctccacacatctatgctatatctgaatctgcttacagatgcatgcttcaagatcgtgaggaccagtcaattctttgcacgggtgagtcaggtgctgggaagacagaaaatacaaagaaagttattcagtaccttgcccatgttgcttcttcacataaaggaagaaaggaccataatattcctggggaaccttgaacggcagcttttgcaagcaaatccaattctggagtcatttggaaatgcgaggactgttcaaaatgataactcatctcgttttggcaaatttattcggatcaactttgatgtaactggctatatcgttggggccaacattgaaacataccttctggaaaagtctcgtgctgttcgtcaagcaaaagatgaacgtacttttcatatcttttaccagttgttatctgggagcaggagaacacctaaagtctgatttgcttcttgaagggtttaataactacaggtttctctccaatggctatattcctattccgggacagccaagacaaaggtaatttccggggggaccctggggaggcaatgcacataatgggcttctcccatgaagagattctgtcaatgcttaaagtagtatcttcagtgctacagtttggaaatatttctttcaaaaaggagagaaatactgatcaagcttccatgccagaaaatacagttgcgcagaagctctgccatcttcttgggatgaatgtgatggagtttactcgggccatcctgactccccggatcaaggtcggccgagactatgtgcaaaaagcccagaccaaagaacaggcagattttgcagtagaagcattggcaaaagctacctatgagcggctctttcgctggctcgttcatcgcatcaataaagctctggataggaccaaacgtcagggagcatctttcattggaatcctggatattgctggatttgaaatttttgagctgaactcctttgaacaactttgcatcaactacaccaatgagaagctgcagcagctgttcaaccacaccatgtttatcctagaacaagaggaataccagcgcgaaggcatcgagtggaacttcatcgatttcgggctggatctgcagccatgcatcgacctaatagagagacctgcgaaccctcctggtgtactggcccttttggatgaagaatgctggttccctaaagccacagataaaacctttgttgaaaaactggttcaagagcaaggttcccactccaagtttcagaaacctcgacaattaaaagacaaagctgatttttgcattatacattatgcagggaaggtggactataaggcagatgagtggctgatgaagaatatggaccccctgaatgacaacgtggccacccttttgcaccagtcatcagacagatttgtggcagagctttggaaagatgtggaccgtatcgtgggtctggatcaagtcactggtatgactgagacagcttttggctccgcatataaaaccaagaagggcatgtttcgtaccgttgggcaactctacaaagaatctctcaccaagctgatggcaactctccgaaacaccaaccctaactttgttcgttgtatcattccaaatcacgagaagagggctggaaaattggatccacacctagtcctagatcagcttcgctgtaatggtgtcctggaagggatccgaatctgtcgccagggcttccctaaccgaatagttttccaggaattcagacagagatatgagatcctaactccaaatgctattcctaaaggttttatggatggtaaacaggcctgtgaacgaatgatccgggctttagaattggacccaaacttgtacagaattggacagagcaagatatttttcagagctggagttctggcacacttagaggaagaaagagatttaaaaatcaccgatatcattatcttcttccaggccgtttgcagaggttacctggccagaaaggcctttgccaagaagcagcagcaactaagtgccttaaaggtcttgcagcggaactgtgccgcgtacctgaaattacggcactggcagtggtggcgagtcttcacaaaggtgaagccgcttctacaagtgactcgccaggaggaagaacttcaggccaaagatgaagagctgttgaaggtgaaggagaagcagacaaaggtggaaggagagctggaggagatggagcggaagcaccagcagcttttagaagagaagaatatccttgcagaacaactacaagcagagactgagctctttgctgaagcagaagagatgagggcaagacttgctgctaaaaagcaggaattagaagagattctacatgacttggagtctagggttgaagaagaagaagaaagaaaccaaatcctccaaaatgaaaagaaaaaaatgcaagcacatattcaggacctggaagaacagctagacgaggaggaaggggctcggcaaaagctgcagctggaaaaggtgacagcagaggccaagatcaagaagatggaagaggagattctgcttctcgaggaccaaaattccaagttcatcaaagaaaagaaactcatggaagatcgcattgctgagtgttcctctcagctggctgaagaggaagaaaaggcgaaaaacttggccaaaatcaggaataagcaagaagtgatgatctcagatttagaagaacgcttaaagaaggaagaaaagactcgtcaggaactggaaaaggccaaaagaaaactcgacggggagacgaccgacctgcaggaccagatcgcagagctgcaggcgcagattgatgagctcaagctgcagctggccaagaaggaggaggagctgcagggcgcactggccagaggtgatgatgaaacactccataagaacaatgcccttaaagttgtgcgagagctacaagcccaaattgctgaacttcaggaagactttgaatccgagaaggcttcacggaacaaggccgaaaagcagaaaagggacttgagtgaggaactggaagctctgaaaacagagctggaggacacgctggacaccacggcagcccagcaggaactacgtacaaaacgtgaacaagaagtggcagagctgaagaaagctcttgaggaggaaactaagaaccatgaagctcaaatccaggacatgagacaaagacacgcaacagccctggaggagctctcagagcagctggaacaggccaagcggttcaaagcaaatctagagaagaacaagcagggcctggagacagataacaaggagctggcgtgtgaggtgaaggtcctgcagcaggtcaaggctgagtctgagcacaagaggaagaagctcgacgcgcaggtccaggagctccatgccaaggtctctgaaggcgacaggctcagggtggagctggcggagaaagcaagtaagctgcagaatgagctagataatgtctccacccttctggaagaagcagagaagaagggtattaaatttgctaaggatgcagctagtcttgagtctcaactacaggatacacaggagcttcttcaggaggagacacgccagaaactaaacctgagcagtcggatccggcagctggaagaggagaagaacagtcttcaggagcagcaggaggaggaggaggaggccaggaagaacctggagaagcaagtgctggccctgcagtcccagttggctgataccaagaagaaagtagatgacgacctgggaacaattgaaagtctggaagaagccaagaagaagcttctgaaggacgcggaggccctgagccagcgcctggaggagaaggcactggcgtatgacaaactggagaagaccaagaaccgcctgcagcaggagctggacgacctcacggtggacctggaccaccagcgccaggtcgcctccaacttggagaagaagcaagaagaagtttgaccagctgttagcagaagagaa

SEQ ID NO: 63111 - DNA, 768 bp, Homo sapiens
tacattgagacagagctaaagaagaggaaaggaaagatggacagttattttggtcctataaagcccaaaggtggggaagtgtcaagaaggaagatgagggcacaagagaatgtagggccacccaaaagctggctctcattgcaattacagaaagaaaaaccaaaataaagaaagaaaggaaagaagctcccatttattgagcagctactctcaccagccattcacatgcaatacctcgtttaattctcgcagcggctctgaaaggtggatggtggtattgccatttgttaggtaggagacatgccgtccagaaaagcaaataattaaacattcaaagttgacctgggcccatttgaaaattccttttgctccctcattttaacccctaaagtaaagccgtttggtgaactttaatgagcttttaccaagcatctcctaaaaccaagaatggaggtgaaagattgtggagcccacaacctagagaaaggattgacaatttttttccataaagggcctagtagtatgtattttaggctgtgtggtccacatgagggcagattcttctttttgacttcctcctctgcatcttcttcatcttctctttcctcttcattttttttacaacttccgggacgaggagctgtcctgcaccgtggtggagctgaagtacacaggcaatgccagcgcactcctcatcctccccgatcaagacaagatggaggaagtggaagccatgctgctcccagagacctttgccctatgctgcct

SEQ ID NO: 63112 - DNA, 2396 bp, Homo sapiens
gccaggaatccctgggtcgtcccacgcgcccggcccgaccacgtgtactgtggagactgtcaaagtctcccggagcccaatttccggaagcggtgagttctgaaagaagttcctgcaccgtagtttcccaagtctgcgaatccccaatcatgagcgcctcgggcgtactgtcctttacccagcaaggatgggagcaggtgctggccaaagtgaaacgggctgtggtttacctggacgccgcctgcgccgagagcctgcactggggctgcggatccacccgtctcctggaggcggtggggggtcctgactgtcacctgcgagagttcgagcccgacgcaattggtggtggagccaagcagcccaaggcagtgtttgtgctgagctgcctgctgaaaggccggaccggtggagatcctacgggacatcatctgccgcagtcacttccagtattgtgtggtggtcacaaccgtgagccacgctgtccacctcacagctaatcatgtcccagcggcggcagcggccgagatggaggggcagcagccggtgttcgagcagctggaggagaagctgtgtgaatggatgggcaacatgaactacacggccgaggtgttccatgtcccgttattgcttgcccctgttgctccccactttgccttgactccagcttttgcatcccttttcccactgctaccccaggatgtgcacctccttaatagcgcccgaccggacaagaggaagctgggaagcctgggtgatgtggactccactacgctaaccccagagctgctgctgcagatcagatgcctagtgtcaggcctcagttctctgtgtgaacatttaggagtacgggaggagtgttttgctgtaggttccttaagtcaggtcatcgctgcggatctggccaattatgcccctgcaaagaacaggaagaagactgctgcaggcagggcatcagtggtttttgtggacagaaccctggatctcacaggagcagttggacatcatggagacaacttagtagagaagatcatttcagcacttccccagctcccaggccacacaaatgatgtgatggttaacatgatagcgctcactgcactccatactgaggaggaaaattataatgtggttgcaccaggctgtctttcacaatccagtgacaccacagccaaagccctatgggaagctttactgaacactaagcacaaagaggcagtgatggaagttcggagacatctagtggaagcggcaagcagagaaaacctgccaatcaagatgagtatggggagagtcacaccgggacagctcatgtcctatattcagctcttcaagaacaacctcaaagctctaatgaatcattgtggcctcctccagcttggactggccacagctcaaacgttgaaacacccacagactgccaagtgggacaactttctggcttttgaaaggctccttcttcagagcattggggagtcagcaatgtccgttgtgttaaatcagctgctgcccatgattaagcctgtaacccagagaaccaacgaggactacagccctgaggaactgctgatccttctcatatatatttattctgtcactggagagctcacggtagacaaagacctgtgtgaagcagaagaaaaagtcaagaaagcattggctcaggtcttctgtgaggaatctggatcgtcacctttgctgcaaaaaattacggactgggactcttcaattaatctgacatttcacaaatccaaaattgccgtggatgaactctttacttcacttcgggatattgctggagctcggagtctcctgaaacagtttaagtctgtatatgttcctggaaatcatacccaccaggcatcttataagccattgttgaagcaagttgtggaggaaatatttcatcccgagaggccagattccgttgatattgaacacatgtcttcaggcctcactgatctccttaaaactggatttagcatgttcatgaaggtgagccggcctcatcctagtgactaccccctcctgatcctctttgtggtaggtggggtcacagtctctgaagtgaaaatggtcaaagatcttgtggcatcgttgaagccaggaacccaggtaatcgtgctgtccacacgactcctgaagccacttaacattcctgagctgttatttgcaactgaccgactgcatccagaccttggcttctgagcatccgctaagaagataagacctactcaagctggaaatgccgatgcaattttctgccaccactccaaatactcctccacaaccagcgtccctgtcactaattgcgagaatgatggaattctgcctgaagggtcttgatacctactcagtgaggtactttgcttggattgctgtgattcttaaaaaaaaaa

SEQ ID NO: 63113 - DNA, 963 bp, Homo sapiens
  misc_feature (1)...(963): n = a,t,c or g
ctgctgggagagtctttttgatcgtttcccatgtgttgtcagatagctccatagaattcagtttctgagaaccagccagaagcatgcagtgacattgcacaatctgcctctgaagctggagatactagctgcagagctcaggggagctgctccacatcaccgacatgaagggaacaggcatcatggactgtgcgcccaaggcactcctggccagggcactttatgacaactgccctgactgctctgacgagctggctttcagcagaggggacatcctgaccattctggagcaacacgtgccagaaagcgagggttggtggaagtgtttgctccatgggaggcaaggcctggcccctgccaaccgcctccaaatcctcacggaggtcgctgcagacaggccgtgccccccattcctgagaggcctggaagaagctcctgccagctcagaggagacctatcaggtgcccactctaccccgccctcccactccaggccccgtttatgagcagatgaggagttgggcggaggggccccagccccctactgcccaagtctatgaattccccgaccctcccaccagtgccagaatcatctgtgaaaagactctcagctttccaaaacaggtacgcatacttccacctactagacatgggttgaggggtatggaaacacccagaggcctaactacctcttgaggcatgggtgtccttcagatcaaacacgcaaaacgggagcccagattgctggcaatcacgctcggggagcttgtgtgccaggttgggatggagaactcagcggcctccacccccttgtcgttgacacccttggcgccactgtgattccccagctcttccaagggtggggcacactctgtgggggaaatgggaatgcttagcttgagctgttgtgggaaggcactgagggatgttcgtngcaccctttttcaacaggatgaagggatca

SEQ ID NO: 63114 - DNA, 432 bp, Homo sapiens
ttttttttttttgaaacagtctgtttcccaggctggagtgtagggatccagtcacagttaattgtaccctcaaccttccaggctcaaaaaatgctcccaccacagcctcccaggtagggagtacctggaactacaggtgtgtgctgccacacccgactaatttttttgtaaaaacggggtttcgctgttcccaggctggtctcaaactcctgggctcaagtgaacctcccgcctcggcctcccaaagtgctgggattcctttctttatttctgtagaatctattttatggttggcattttgggggaagatttcgatgggttccacattcttgctttagttgttgtagagggatttgggtgtttctacccaaggcattggtctagcttttcctacaatgaacctatctttggaggttcaagctccccaccttc

SEQ ID NO: 63115 - DNA, 784 bp, Homo sapiens
cggacgcgagggcggacgcgtggacccctctccccaatagctcgaggctcggaccgcgctcctgcgactaggctgaagctgctcccctctccccgccgcctccgggcgtttcggccgtacacccacactgggactgggactgggactgggctgtgatcccgaggccgcagctccgctctcggcccgccacctcccccgggcccacctgctccctcagccacaggccatctcggggctctgggactggacgactgcagcctcttccctctgcccccgggaacggctccactccgtcccctgcagcgcctgcagccgcggccccctcagcagctgtgtctcctggcgcctcctcgccatacccagcagagcagttggagcagacagccaggctgcccggaggagtttttggtggggtttctgcactgaggtggaaacccagcagaacctgcccttcttccctcccctgctccgcaaggcagcccaccccgaccttgagatcccaggtttggagaatcctgctgagagcgaacagtaggaggattccccaaagcttccagcttgccacctggaagaaggtcactttcttttgagcaaaggagataacgggaggtaccctgccaaagttcactgagaggcgggggtgacatgggccacggttgctctgggagggttgtggcactcggggctgggtggctctccctaagcttgctctgacaaaagagttttgagttggtcttttggctgagcctgcccaggaaggcaggctcctgcaggagtcttggag

SEQ ID NO: 63116 - DNA, 1236 bp, Homo sapiens
aggacttcggcacgagcggtgacggtgtggcagagaggccccgaagcctgtgcctggcctgaggagcagggcttatctgcttgtgagcagggtccacaccaagtcgtgttcacagtggctaagttccgccccccaggccctcacctcctctggccttgccgcctgtcccctgctgccgcctgtctgcctgccatcctgctgcctggcctccctgggctctgcctcccgtgcctactgagctgaaacacagttggtttgtgtacactggctcagttcagcaggaacaggggtcaagcccccttggagcctgcagcccctgccttccctgggtgggctgatgcttggagcagagatgaggactcagaatcagacctgtgtctggaggagggatgtggtgggtggggttggctgggcccaaatgtgtgctgcaggccctgatccccaactctgcaactggggacccctgcatggccacagctcaggctgggctgtggtgccagcatggataggtgggtgagtgggtggcccttccattaaaagggaagccagctgtgtcctttccgggcctggaggcttggcccctcctctcccaagcctggcaggggcactggcccggcccgcaccttcctagcagccagttacccaagaggaagctgccttgggcctccagaccgttaaatgccaactcctggcttccggtatcaggctgggttgacctgacctggccccttcttgctgggccctgcagctttctaacttgccgggaggagcagtgacacccgccccacatgtggggcatggaacaagttccttgtggacccagaagggacacaagcaggtgtgcttagtcctgaggcgctgggaatagctgatcctccctgccttgagggggttctcagggcagggaagagttaggactctggttttttttttttggttttttttttttggaaaggggccccccccttgccccccggccgggggggaaagggttaattttggtttctttgaccccccccccccccagagaacaaaaatttttcggcctcacccccccagggtgtggggattagggggcccccccccccccccgggctatttttggtttttttggaaaaacccggttttcccctttgggcccgggggggtccaaaccttttgcccccgggggattcccccccccacccccccccagggggggggttaccggggtatgacccccgggccccgcccatt

SEQ ID NO: 63117 - DNA, 589 bp, Homo sapiens; identical to SEQ ID NO: 62904

SEQ ID NO: 63118 - DNA, 1577 bp, Homo sapiens
ttttttttttttagagtcatgaccttatttatttacaagcacaggataagtccctaacctcccccaaagactgagcaaccctacccagcccagttaaatactgcaactgggggggtaaaaaaggtcgggaggaggaattaagggaaatacaggaataggggaacatatcccacattaaatagttatatacacatcagttcctgtggttctgtacagagcagcggctgaccccacccccacaggacacaatgtggggagaggagactgagggtactgaggccagagccaacctctggtgaagtgcaatagcagcagcaaagtcctaatggtgcacaagagggaggggaacccccagggctacccacccccaccctgccctggaatgtgtaagggacaggaatggctctcagggagcacacaggaaggacaaggctggaaccgtcttcagggcccagttttaagggcaacgttttgcctacttcaccctagacacagcaacccttggaggaaagcagatggtcagcagtgctcttatctgcccctccaaacctaagtgagggcctggttccttcctacctctccccagggaaaaggaaggcagctgcttggcttccttctagaagccccgggagcctttaactaccccagctcccttcgtagtgtcactgtccccaccagggaggggccaggcacagtctgtgggtcatcaggctcaggagaagttctggacagggtggctgaccttcatacaggcccaataaagagcccggcccaaacacagcacagccaacaggatgacaaatgcccaggctgcatagatgcctccatatcgccgtgcatgcttccatgtgccaaaggcaaggccagtggcagtgactgccaaaagcaagccaagcaagaagcagcagatacatctcttacgtgggtatctgcgcccaatagatgacactttcctgcagtgaggacaacgtgccaaagtgcggtctgtgaactctgtccacagaaaagtattcttgcaatgtccacagataaccctgacacccatgggttggggttctggactcagaggtccgggatgcacaggccccaggttgatgattcttttgcagtagggccgagggcatgcaatccgttgggatgtcactttgcagataaggagacagttacaggggcatcgaacatattttttccctgggggtgcattcttgattggggtggcttcattgcagacaccacatttgactacatgctgatgcatcttgccttccacgttgatgagagattggcagactcggcaggtgatcataggggcactcccactgtccgggctagttaagggtgaataggggggtgggtcctccccaggcaacacggctggatgcccctcgggaaacgggggaaatgcggctccgtacggtggtgcggagggggtcaggcctcccccgggcccagccccactcccgccgggccccactaaaccgttgccgcccgcgccaccgtcgatgggctcagacagcagcggggaacgctctccatctgccgccatggccgccaccgccgcctcccgctcaggtcgg

SEQ ID NO: 63119 - DNA, 1266 bp, Homo sapiens
cggcacgagcgcccgcaaccggggcgaatcatggcggccgccaaggtggctttaaccaagagagcagatccagctgagcttagaacaatatttttgaagtatgcaagcattgagaaaaacggtgaatttttcatgtcccccaatgactttgtcactcgatacttgaacatttttggagaaagccagcctaatccaaagactgtggaacttttaagtggagtggtggatcagaccaaagatggattaatatcttttcaagaatttgttgcctttgaatctgtcctgtgtgcccctgatgctttgtttatggtagcctttcagctgtttgacaaagctggcaaaggagaagtaacttttgaggatgttaagcaagtttttgggacagaccacaattcatcaacatattccatttaaactgggattcagaatttggtgcaactacattttggaaaagaaagaaaaagacacctgacatatgcggaatttactcagtttttattggaaatacaactggagcacgcaaagcaagcctttgtgcaacgggacaatgctaggactgggagagtcacagccatcgacttccgagacatcatggtcaccatccgcccccatgtcttgactccttttgtagaagaatgtctagtagctgctgctggaggtaccacatcccatcaagttagtttctcctattttaatggatttaattcgctccttaacaacatggaactcattagaaagatctatagcactctggctggcaccaggaaagatgttgaagtgactaagggtgagtgagaatatatctgaattctagcctgcaagtattgtggtgtattattattagggtgaagaaggcaactagtactttattatttttctatcccattgacacatattaactatatgataacgtgtgtttttcatcctttgatcagacaaacaaaagcaaacaaaacaatcttcaccaagttttaaacaaactgggcccggcttggtgactcacacctgaaatcccagcagtttgggaggccgaggtgggtggatcacctgagatcaggagttcgagaccagcctggccaagagggtgaaaccctgtctctactaaaaatacaaacattagttgggtgtggtggtgggcacctgtaatcccagctacttgggaggctgaggcagaagaatcgcttgaacctgggaggcgaaggttgcagtgagccgagatcacgccactgcactccagcctgggcaacaagagcaaaatgccatctc

SEQ ID NO: 63120 - DNA, 979 bp, Homo sapiens
atgagctaacattaaacataaccataacattcaagtcatcaatcttttcgtagtcataatcctggtctatcagagaaatcaccacaatccatttaaatgaatttgataatcattctcgtttggcatagcatgaaacatagcaaaggctatgttttagaggcacaagatgacgaactatcgcgttgagagtagcagcggacgggcggcgcgcaagatgaggctcgcattaatgggacctgcgttcattgcggcgattggttatatcgatcccggtaactttgcgaccaatattcaggcgggtgctagcttcggctatcagctactgtgggttgtcgtttgggccaacctgatggcgatgctgattcagatcctctctgccaaactagggattgccaccggtaaaaatctggcggagcagattcgcgatcactatccgcgtcccgtagtgtggttctattgggttcaggcagaaattattgcgatggcaaccgacctggcggaatttattggtgcggcgatcggttttaaactcattcttggtgtttcgttgttgcagggcgcggtgctgacggggatcgcgactttcctgattttaatgctgcaacgtcgcgggcaaaaaccgctggagaaagtgattggcgggttactgttgtttgttgccgcggcttacattgtcgagttgattttctcccagcctaacctggcgcagctgggtaaaggaatggtgatcccgagtttacctacttcggaagcggtcttcctggcagcaggcgtgttaaggggcgacgattatgccgcatgtgattttatttggcactcctcgctcactcagcatttacatggcggttcgcgtcaacaacgttattccgccaccaaatgggatgtggctatcgccatgactattgccggttttgtcaatctggcgattatggctacagctgcgtcagagttaaacttttacggtcataccggtgttgcc

SEQ ID NO: 63121 - DNA, 403 bp, Homo sapiens
atgaggtccgtttcacacacggtgctgctacctcgtttgcttcgtgcgtgcgtgcgcagatgtgggccccgcgggagcagctactgggctgggctgcggaagctctgcctgccaaggattctgcctggccctgggaagagaagcctagatatctgggaccagtgactttcgaggatgtggctgtgcttttcactgaggcagagtggaagagactgagccttgagcagaggaacctatacaaagaagtgatgctggaaaatctcaggaatctggtctcattggttctggaactgggaaatccaagatcagggctcctgcccctggacctgaacctggatctttggctttgatgttggaccttgtgtgtggatatgaactttgaacctgcaccttggaactaaac

SEQ ID NO: 63122 - DNA, 603 bp, Homo sapiens
  misc_feature (1)...(603): n = a,t,c or g
aaatctgatccgggatgcggcggcccaatcggaaggtggaccgaaatcccgcgacagcaagaggcccgtagcgacccgcggtgctaaggaacacagtgctttcaaaagaattggcgtccgctgttcgcctctcctcccgggagtcttctgcctactcccagaagaggagggaagcacagtatgaagactttggagactcaaccgttagctccggactgctgtccttcagaccaggacccagctccagcccatccttctccccacgcttccccgatgaataaaaatgcggactctgaactgatgccaccgcctcccgaaaggggggatccgccccggttgtccccagatcctgtggctggctcagctgtgtcccaggagctacgggagggggacccagtttctctctccactcccctggaaacagagtttggttcccctagtgagttgagtcctcgaatcgaggagcaagaactttctgaaaatacaagccttcctgcagaagaagcaaacgggagcctttctgaagaagaagcgaacgggccagagttggggtctgggaaaagccatggaagatanctctgggggaacccgctgcagaggacg

SEQ ID NO: 63123 - DNA, 831 bp, Homo sapiens
cttttttttttttctacttatttcttgccctttttttcatattgctcatatttgagaattttctaagccattcacttctcatatgctttacttcaagattttctatatctattttagaagttgtattgctttttgtacatacaaccgtatgatgtttttaccttcttatttttcagacatgcagtcgaggtgtcagaccaagaagttattaccaaaaaatggcatttttgagagagaaatagcccaattggaaataatgagaatttgtaaaaaccacagccttgactgtttatgttttagaggtgactgggaaggcaacactcagtttcaaacacttcaagataatcaagaggaatgcttcaagcaggtgatacgcacctgtgaaaaaaggcccacttttaaccagcatacagtgtttaatctacaccagagacttaatacaggagacaaactgaatgaatttaaagaactggggaaagcctttatttctggttcagatcatactcaacatcagttaattcacacaagtgagaaattctgtggagataaagaatgtgggaatacctttcttcctgattcagaagttattcaatatcagacagttcacactgttaagaaaacatatgaatgtaaagaatgtgggaagtcttttagtttacgttcgagtcttactgggcataagagaattcataccggcgagaaaccttttaaatgtaaggattgtgggaaagcctttagatttcattcacaacttagtgtccataagcgaattcatactggtgagaaatcttatgaatgtaaggaatgtgggaaggcctttagttgtggctc

SEQ ID NO: 63124 - DNA, 469 bp, Homo sapiens
ctccccacgaggccttcctggcctcctgtctgaagtgggtccctttccttactggtccctctccaaagccctggctgcaagactcggggaccccagcatctgcacatctggcagagtggacctcctatgagaactgcctgagatctgaggagcccagagccggaggagcagtaccgttgtcatggccaccatgacgggctggtgcgggccaactgccaactcgccagagctggtaaacactctgttgttacccctaactatcaagagcgcgcgcgcccacaagatattacgtcaacggccgcatctattgggacgcgacgtaacagactgcgcaggcatcttttggctgttcccagcgaagacctgggaccttctggtcagaggccacgcagtatgggagcccgatctttaggagcacagcgcacatgaacaaaacatgtgacacgataacgtcggggtgcagcttacg

SEQ ID NO: 63125 - DNA, 1080 bp, Homo sapiens
ttttttttttttcaattataaattttatttaagaatactgacttaacacaggaaacagatttaattcatggaattgtgcatatggtcatccgttacattgtgacatgttaatttttttttatcatttattggcactgtcaacagattacttgtgaacaagatcactttgtacgcttaagtctgcgatgctacttagctatggttttctaccatgagcttatatatagataggtgtaggtatgtagatacattaatgctatacacaattttgcatggttactgagcgtcagtaaaaattatgaaaaaacacccatttataataaaagtgaggatgtactaagacttgctattactggaccttgttttctgtaaaagtgatgacacttgctggacggttactaaactctatggcactaatgtatgatggattcatttccagactgtcggccacggaagcacttcttcatggcctctgccctggacagcagcctgtcctccgggctccccatgtttttaccagcttctgctgagtttctacaatcttgagctctgctgagaattcttttccttgaaattcttctacctaaagccccagcccccaaaagagcatgtctcaggaactcattatgccctgagtcaacaagaacttgttgataaatggcttaaaagtttttacaagaagtaacttcccttggtaaggagtaaataatagctctggaattttccagataaaactatttcatttctctgtcagtgccccatggggagagaacgaaatattggagcccctctccctaccaaagagagccacttttctggttgtgccctggcttaaaaccctttggtctccgagaaccatactgaatatttgcacccaatgctaaagttttcaggagaaagcatacttaagccaataaatgaataatggtttggtttgcattttgcttgcttgttaaataaggccttattgaaccttgggatgctgcctgtggaaactggcttccccagtgaaagatgtgatgccatgaactgatatgcctttgcatatgctgttccctctctgcaacaccctctcgtgcc

SEQ ID NO: 63126 - DNA, 2361 bp, Homo sapiens
ggcacgagaattattaaaagcagtatggagaccccacaaggtggcagttatgcattgcagaggacaccagcgagcttccaccttggtgggtttagggaattcccgtgctgactcagaggctcgaaaagcaccatctgccccattccgggcatcagtcacagcccccctgctccctcaagcacctgatcttgtacctacttattctaaagaagaaaatgactttctccaggcaaagggaggacaagtgatggaggaaggatgaattcggttaccggatgggagagtagctgcagttgtactggctgtgcatgaaaccacccatcgaggtcaggaattacttgaaaagttgttaggctggtatttctacatctcacatttgtcaggccttgccaaaatggtgacgcagtggtgtgttacctgccgacagcataatgcgaggcaaggtccagccgttccacccggcatacaagcttatggagcagccccctttgaagatctccaggtggacttcacagagatgtcaaagtgtagaggtgatcgagtgtggatcaagaactggaacgtagcctctttgtgtccactgtggaaaggaccccagactgtcgttctgagcactcccaccgctgtgaaggtagaaggaatcccagcctggatccaccacagccatgtaaaacctgcagcgcctgaaacctgggaggcaagaccaagcccagacaacccctgcagagtgaccctgaagaagacgacaagccctgctccagtcacacccggaagctgactggtccacgcacggccgaagcctgaggaagctcatcatgagattcatttttcttaaattttggacttatacagtaagggcttcaactgaccttactcaaactggggactgttcccagtgtattcatcaggtcaccgaggtaggacagcaaactaaaacaatctttctgttctatagttattatgaatgtatgggaacattaaaagaaacttgtttgtataatgccactcagtacaaggtatgtagcccgagaaatgaccgacctgatgcgtgttataacccatctgagcccgctgcaaccaccgtttttgaaataagattaagaactggccttttgctaggtgatacaagtaaaataataactagaacagaagaaaaagaaatccccaagcaaataactttaagatttgatgcttgtgcagccattaatagtaaaaagctagaaataggatgtggttctcttaactgagaaaggagctaaagagtagaaaataaatatgtttgtcatgagtcaggggtttgtaaaaattgtgcctattggccatgtgttatttaggctacttaaaaaaagaacaaaaatgactcggtttatcttcagaagggagaagccaacccctcctgtgctgccggtcactgtaacccactagaactaataattaccaatcccctagatccccattggaaaaagggagaacgtgtaaccctggggatcaataggacagggttaaaacctcaagttgtcattttaattaaaggggaggtccacaagtgctctcccaaaccagtatttcaaaccttttatgaggagctgaatctgccagcaccagaacttctgaaaaagacaaaaaatttgtttctccaattagcagaaaatgtaattttcttacttaatgttacttcttgttatgtacgcggaggaaccactatcggagacagatggccttgggaagcctgagagttggtgcctactgatccagctcctgatataattccaatttagaaggccgaagctagcaacttctaggtcctaaaaacctcaattattagacaatactgtatagctagagaagggaaagactttatcatccctgtaggaaagcttaattgtataggacagaagttgtacaacatgcacaacaaagacaattacttagtagggcctaaaccacactgaaaagaatccatttaataaattttctaaattaaaaactgcctgggctcatccagaatctcatcaggactgggcagctcccgctggactatactggatatgtgggcacggagcctacattcggttacctaataaatggggcaggcagttgtgttattgggcactattaagccgtcctttttcttattacccataaaaacgggtgagctcctaggtttccctgtctatgcctcctgagaaaataaaggcatagttataggaaactggaaagataatgagtggccccctgaaaggatcattcagtattatgggcctgcccaggggcacaagatggctcatggggataccaacccccatctacatgctcacctggatcatacggttgcagtcacgttcctcaagcttccttgat

SEQ ID NO: 63127 - DNA, 628 bp, Homo sapiens
taaatgacagatgataccttgggttgggaggggtcctggaagtggactcttccacagtggcatcaggggtaggggtcacagtggtggttaggaccagagctgaggtcacagagctcctggaggcaagattaaggacaaagagtggctccccatcaccaagttgggccatctggtcaaggacatgaagatcaagtccctggaggagatctgcctcttctctgtgcatcaaggaccaggttcaaggcatttgtcaccattgaggactacaacggctatgttggtctgggtgttagtgctccaaggaggtagccagcaccatccatggggctataatcatggtcaagctctttatcctccctgtgtgaggagactactgggggaacaagattagcaagcctcacactcacactacctacccttgcaaggtgactggcagcctgcatctctgtgctggtggcctcatccctgcctccaggggcgttggtactgtcttggcccctgtgcccaggaacctgctgctgatggtggttacccaccactgctgcactttgactggggactgcgctgctaccctggccaattttgccaagggacctttgatgccatctccaagacctacagctatttc

SEQ ID NO: 63128 - DNA, 375 bp, Homo sapiens
actggatccagtagcatattaaaaggattatccaccactaccaagtgggctttagcctaagaatacaatggtggttcaacacatgaaaatcaatgtaatacaatgtaatcatattaatagaatgaaggggaaaaatcccagaatgatttcaattcatgcagaaaaagcatctgaaaaaatagtaataatcttttaagataaaaacactcaacaaatgaggaaaggaagggaacttcttcaaaatgataaaggacatatatgataaagcgcacagctaacatcttactcaacagtaaatgactgtttactgactgaaagttttcccgctacgatcatgcatgagacaagaatgctgctctcactacttccgttcag

SEQ ID NO: 63129 - DNA, 1293 bp, Homo sapiens
gtattttggaaaaatggtaaagaagtgcagagtcaagtcatagcgactaataatgggttattttcttaaattgtatgcttatgttaattctcacagtctttttgtttgggtctgtgacagatcttacaaaagatcttttagacctatgattcttaacaaaattaaagaattaagtcggaaccaatttcccacaatgtctcatctaagaaaggactcacaggccagcagcccaggagatgacgcaatggacaggagtgggctccctgaccttcaaggaagatttgagctatctgggaaaaacaagacagtatccactggatgcattggaaccccaaccccagcattggggatattaaggacattaaaaaagcagccaagtctatgctagacccagcacataaatctcatttccaccctgtgaccccaagtttagtattcttgtgtttcatatttgatgggttacaccaggcattactgagtgttggtgtgagcaagaggtctaatactgtggttgggaatgagaacgaggaaaggggtactccttatgctagcagattcaaagatatgcctaactttattgcccttgagaagtcatcagttctccgccactgctgtgaccttttgataggcgttgcggctggatcaagtgataagatttgcaccagcagtctccaagttcagagacgattcaaggcaatgatggcatctattggaagactttcacatggtgagagtgctgatctgctaatcagctgcaatgcagaatcagccataggttggatcagctcaagaccgtgggttggagaattaatgttcacatttctatttggagactttgaatcccctctacacaagctacgcaagtcaagttagttgccaagaaagcacagatgacaacctattaatgctgtgagaatgtttctagatcagtgcatggatggctccattgctctacgggccattgtgtctgagatcccagtctttgaggagaaaaaaaacaatggttaaaaaggcattggggaaatattttgagtttgggggtgtactttgccaccccattattggggagctgtcaccacgaatgttcccaaacttagcaacagcggcaaactactgggccaagatgagcaaccccacatttttgggatttaaagctcctgatgttataccaggatcaaccatcacactccctttgcttcgaatggcatctaccccgtaagatcttgaggggggagtgttgggtggaatcatagatccatgcactcctaacatgaactaattctcattatttaa

SEQ ID NO: 63130 - DNA, 383 bp, Homo sapiens
gaggaaggagaacagtggtggggctgggtgaaggaaggttccagaaaggaacagtgaggggactgagtgggacaaaggggcagattgaagggtgactgagactgatcaggtggttcctcagaaatggtggttgttgtagaaggctggcggtcccgggggttgtgtttctattcattctttgtttttaaggtaagttctcgctcttcttgctagttttagtgtgtttttgtgctttaatgtttgttttaatgttatgttttttattgggttgtgctcttctttttttctccggtatattattttgatgtgtttgtattgttttaggtgtatttgtgctactgttgtctgttacttctgtgtgttttttggttgctgtattctct

SEQ ID NO: 63131 - DNA, 1002 bp, Homo sapiens
tttcgtctgtaactgctcctcactgcgttacccagtaatgcgctgatcgggggagggggcgggggggccggggagcgagcgggagagcgagccgacttggaaatgtgaacgcaagaagcaggcttgatttttttttctccccccttctctctctctctctctctctctcttcctctctccctctttctcctctctcacccacactcacgcacacctccaaaccgcacacccagacgcacacgcataccccagcgcccggcagttatgtattctccgctctgtctcacccaggatgaatttcatcctttcatcgaagcacttctgccccacgtccgagcctttgcctacacatggttcaacctgcaggcccgaaaacgaaaatacttcaaaaaacatgaaaagcgtatgtcaaaagaagaagagagagccgtgaaggatgaattgctaagtgaaaaaccagaggtcaagcagaagtgggcatctcgacttctggcaaagttgcggaaagatatccgacccgaatatcgagaggattttgttcttacagttacagggaaaaaacctccatgttgtgttctttccaacccagaccagaaaggcaagatgcgaagaattgactgcctccgccaggcagataaagtctggaggttggaccttgttatggtgattttgtttaaaggtattccgctggaaagtactgatggcgagcgccttgtaaagtccccacaatgctctaatccagggctctgtgtccaaccccatcacataggggtttctgttaaggaactcgatttatatttggcatactttgtgcatgcagcagattcaagtcaatctgaaagtcccagccaggccaagtgacgctgacattaaggaccagccagaaaatgggacatttggggcttccagggacagttttgtcacattcaggtgttttttagtgtcacttgagcttagttaagagtgtcacagacccccatcgccgccggaccggccccaact

SEQ ID NO: 63132 - DNA, 3395 bp, Homo sapiens
agaattcagaaggcctgtcaggtgaagtcttcagcctcccacagcgcagggtcccagcatctccacgcgcgcccgtgggaggtgggtccggccggagaggcctcccgcggacgccgtctctccagaactccgcttccaagagggagcctttggctgctttctctccttaaacttagatcaaattttttggtttttaatcagttatcttgggaacttaacctggcccctcacctcttctgcaccccccgcccccgaaactgtctcgtaatgaatttctgctgtcctcctgggagtggacggccgggtcccgtcccccgggagcatcgctcggctcagcaccttggctcccagtgggggccccgtggagggcgcccgtagtgataagcacaccggcacgaacgtcaggtccattcctcgaagtcggagccctcactctgccctgtcctggggctggctgagggcgaacgccccacctcactttctagagccctgtctgtcctagctcctatctgaccttgtgtgtaaatacgtacatctgtttttaaagtggatgggcccctgagaactcagtgaaatgcagagttctccatgcacctaaagctcctttgtcgctctcatggctgtcagatcctggtccctccacactgggtgctggggagggaggaccctcggggctaccgcgcgcccccccatcccacagatcaggagccaaggagggagaacagggcagcctgtgggactctaggatgcttcagaagaagcgacggcaccgtcaaccctctgttttttaaaggtggttggagactgttaacactgagctcattgacttctagagattttatttttactggttgatctcttggtggttttcaacttcctgctggaaactagaggtggggcaccccccaccccccagcctcgcactgtgtccttggggagggcccgcccccatcctggccggtgtcactgtggcccggccacccctgagcgcccagctccctacctcctggacgtctctgagagtccaggcagagcagagggcagcgctcggccggtcatgctggctcccttggccttgcagcgagcccctggcccacgccgagcgagggatgcttctccctacagcatgtccactcccccggcatggccaggtggggcccctggggcaatggcagtggtagaacgctcaacttggttgcggtaccatcagcccacctgcatttggctttcgacttgcttgttctaagtcacagcgccctcatttttttagcaaggtaaaaaaaccaaaatgggtgttatctctgatatcttgaaaccagcgttctgaatagaggtaggttgagttttctaggggaaaacaaatggagaaaagaggcatgaagaaaagtaaaccgagaacataattaggcatcgggcctaagtgtcctggggagattggaggggacggcagcgttctgcatgatggaggcgctgccgggccccgggtctgtgggggccgtgctctcagggcgtgtgcgggacgccacctgtgcacacctgctcagagcacggctcctcgcaggggtgaaggggcagaccaacgaaaccagatgagaccaacgacaccatgcgagacacgcttgcagacactgttgttttggaaatgtgcttccctccatctgaaatctcatccctccacccgcccactcgggcagctgtgctgtgggcagggcatgcgctcccctggctgagcaccccagagattctcctgcaccttcctcatgccgcacgctgctcatccgtctccatgtgtgtttagatccatgccattcactgactcactaacacctgcaaaatctttaaggaaaaaagctgaagggtacgaccatgcacatatgtgacctggaaaatgcaaatttagatcttttatgatttaattgttatttggttttccccatagggaggtttcccttccctttggaaattaatatataatgtataaattctggcactgagccatggcggagctgggcagcccctaggttagagtggagacggaggcccaggcgcaggggtcacacctcatctggtttccttcccatctcacagcttagcttgtgcttctcaacaccaagtctttaagagcaataaaaactacaccatgaaatgtttgaattttttttttttgggggggggagggtggattttgcttttcatccagaaggaaaaggggaggagagctcctttacattttttaaattaaattcataaatcccagcttaggcccaggcaacagcagcgtacgcttttcaaagatcattgagttgtcttagaatttgaagctgtgtaatgacaatgtcacctggagttcgtctccatttcttaactttttgttgcacaagtatttggacagaagtcgaactgtgaatgagatactgaaatgcactaaattgtattacattaaactggagttacttgatacaatgaagaaatgcatctgatctacttgtatttattgtctcagaattgtacgttgtgacaatcaaatgttacttgcctaaatgccaggaaattcaactggccttttaatcagcaagatcgccagcaagtactgtaactgtaaaggaaaatctctctctctggagaacccacacaaaccattgacctgagtgcgcatgacagccactggcttctttttctatgattgaaaatctgccatcgctgactgttggccagtttcaaagggacccattgtatacagggtgcaaatgtattatacggatgtttccttttgtacacttcatttttacaagttttgctactcacaagctttatgtagtggaggatagaggtatttttggtctttagaagcttgtcggggtgagggctgctaacttacacttcagaggcctgtgtcccaaaggcctggctgcgtttgccgtgctgtgcgaggacctgtgtacacaggcaggtgtgcgcctgcccgagcgcgagtagctcttgtgtagtggtgaaatgctgcaggcatctgtttattaaaattgctgctgtgaaagacagggataaaatatccacaatataagagaaagcgactccgtgcctccttctgtttcttcgtttccagtctgcatagatgtctccaaggggaaaccagggccaccaggcactcctgtcccatggggccacccaccttcagagcccactcccacgggctctgtttccttggaggccatcctgccgatggcacttttcaaggccctcccttccctacgagttgctttctgggaggggaaattgaaaaggagagcggtcacctggcaaaaacacaggggaaatcagccagtccacaaaaatacgcaaaatgacctgatgatgtccaaaaaagggttttaaaagcgatcaaggacaaaagggtt

SEQ ID NO: 63133 - DNA, 1056 bp, Homo sapiens
ttttttttttttggagagaaggataagccatttattaaccccacgcccctagcaccagctgtcaccttggacttgttggagatgcaggggctagaaaggaaatgacagagtgtacaggccccttcgaccccgtgtcccataggtggtggcccccagacacaccctctctgctggcagtgcagaacatgcatcccaataccctagaggagaaacaccaccccagggagagccctttctgctccaacctcctgggcaggtcccaggttggggcagcagccatctgcaggtgtttgtcaggcctggccacacatgcggacagaggatacgactggggtaccctagggtgtggggagggtcggcctggggtcagggggcatgaaggctgtgttccagactcctcctgcccccaatcctctgtgcccctgctggagctctcctagcttctctgatctgtgctcctgtctttggggagctgcccggtctccaggaagagccagaggttgttgcatttctccgactccactctcgtcaccccgtagctgaccacagagcctgcaaccacggccactaggaggctccactgcaaagggtatggaaacttcctctgaatgaacatctgcaagccaaaggccatgccggtgcctgtgacgaaggtgaaaacgcccttcatgaaggcgtgtgactggcatgcggcatactccccgagtccctggggtggcagaggcgggtgaaggctcgatcccctgccctcttccttcaccgcctctcctgtccctcctctgggcacaccctggctgtggaggagtgagaccctgggcgcttggacacgtcccacctcccctatgcccacccggacgccctgagccccttagcaagagagtgcccccagcctccgccactcttccctgacgagggcacccccacgccccggccccccgcctcgctcaggtcagcttctggggtttgaggcccgcgtcccagaccggccttctcaccgggtgcttggcagccacggcgtcctccacccgggacagacccaagttcaccatggttggc

SEQ ID NO: 63134 - DNA, 407 bp, Homo sapiens
tcgtgagttggagccacttagggcggagaaggcctgggccgaggccgctcggcctgggcgggagagaccgggaccttggcggttaggcttggcatggggtcgaggaaaagacggtggtcaagagcagcatgatgctgcagcatattgattacaggatgatgtgcattctgcatgacggccgtatctttattggcacctttaaggcttttgacaagcacatgaatttgatcctctgtgactgcgatgagttcagaatgatcaagccctagaacttcaaacaagcataaagggaatgagaagcgagtcctcggtctggtgctgctgcgaggggtgaatctggtctcaatgacagtagagggaccttctcccaaagatactgggattgctcgagtttcacttgctggagc

SEQ ID NO: 63135 - DNA, 1869 bp, Homo sapiens
ttttttttttttatgacaaaagtgtttaatgctccataatgtgcagcttctaagtgaaaaaggcccgttaatcatccacgggccgtacattctcatgacagagcagccgccctcctcggccccccaagagggaggcataggcagggagtgggccctgtgaggcacggtcctgagtgtgcccgccaggaacgcacacgtgttagtgcccacatgaaacaggggtggggcgtgacatttacacaggagagaaccacagacacccatgtgaggagacacgaggggcacaggtgaccatgggccagggaacaccccagtccatgcatggctgaatccacgaggagcgcgagctggatggtgggagtcacgcggtaacgggctcaggtctcctaggagcagaacaggcccaggtcctcaggagacctcgtgcccagggcagcgggacagacctgagcctgcccatgagaacttgagtgtgcaaacctgcgcacaggtgtgagaacagactccagggagagtgtttaaggagaagacacagacacacataagacccacttagtggggaatttgggagaccccagggaaaggtggggaggcccagagcagcaagtagaggggagtgggcactctgtcccgggactcccataggctcggcagggccagagacagccttgggggtgagaggccagagccaagggccctgcatctgagagtccaagggtctaggaaggctcagggtgggagggcccagcttcaccatagacaccagggtccacgctggcttggggagaaggtgcaggtatcagatgagcctcaggcctcactgctgctggggcagcctctgctgctgccgcactccacccacacgaggcgggcctgctcctgcaggatgcggccgcgcaccaccttggccagctcctctgcgtgtccccactcatgggcgggcacctgcacccaggagcagggcagcccccagagcacctgctctgagccacggcactgccgcagcagctctgagtcccgccagcccggccggcccagcagacccctgacttcccggacattcttctcagtcacctccacgtggatgacgatggggtagatctcgttctgcaccagctcccgcacaccccgagcacccagctccagcaggcagtgcttctgcttcccaacagactcctggatggcccggatcctgctgcctagcccaggggtggcaggctgagcctttgggggctccaggcgctgaggatgggcacagttcctccccagagaggctttccgctgggcacacttggaagtccagccgggagctgggcaggtctagcaggttacggatgagccggggcgccaggcactcaggcaacagcaccacgggccgcagggcagacaccagtagcggccgcaccaaactgtagggtctgaggctccgctccggctctgcacagggctccagcagcagctgatccggggagtcccctgcaggcgcccccacgggcttgggcctcaccagccgcagctggtccagggctctcttcttcagattactgcgggggcctcggtgccggctggagggcaggcatttctcctgaacttctaggagctgctgggctctctgataattgggcacggtgccccggtccaggtcccgcagagtgagggggtcaacccgggtgcagaaccattcctgcctccgcttgtatgccgagtccaccagtcgaaggatctcttgggctttcacgcaaagggcatggggatctgccctctcaggcaaggtgaggttggcacgaatgtagaagggctcggcacctggtccctttgcccaggcttctagggcctcgtggaaggactggcaggccttcgagtccatca

SEQ ID NO: 63136 - DNA, 1245 bp, Homo sapiens
aattaatttttcaaaccatcaacattttatttaataaaagcaactgagacattttctaaagtatacggtatatttgatataaaaattcttcaaaatatgtactatagaaattcttcaaaatatgtactaaaaatacaaagtttgtgaatgtaaggtacagaaaacactttatacttcagtcacccaaaacaacagcttgtggtctcctccaattacacacagagggagagttcgatgccaggacagtccagatccaacggctacagaacccatgaggatgggctgagggtgtcctaaatgatgaatttgaaactggcttgccattttgccaggataaccagtggttgcaaacagattttcactaattgtggaccacctgaataagcaggctcgatccatgtgaacaggtctcttattttgaggataactggaccgagtaatatcccaaattaaccaatcatttcctgcaacggctccaactttgaaggtgttttttaagcaccagtgtgctgacattaatggcacttgttctgattcaagagataaaatagcctgttgggccaaaagatcataaaaccggattgttccattcttctctgcaaccattagcttaaaagtctcctcaggatgccagcacacactcatgccaggagaatgaagaacaaaatgagctgtttgcactccttccaagttccaaatcctgcaggtgtgatcgtcactcacacttgcaatttcttggccttctttgggatcaaacaccaaaccattaatgaaatcggtatggccctctaaaaccttatattcatttttatcctgaagatctgaagtaaataatctaattttcatatcagcagctgaagtacaaaatttgattactggaggcaatgaatcaagtctagtctctgggctccaagctatgccatcaaccctgactccatggtgaaatgttcgaagtgttttatactgaatgccttcaacgtctgcttcttcttcctgaaacgtacacgtgccaatgaccacataattattgccaccatatgcaattaggtttcctgaatccccattctcaaagggattaaattctaccacatgcacataatcttcacaatccacagtgtaggcagcatttcttgaggcatcttgcttcatcttgtatgtcaaaattcaagcagttgtgaaaattaaatagccttctactggacaaggtcacgaaacgcagagcgccaggaaccgaccagaggcagg

SEQ ID NO: 63137 - DNA, 384 bp, Homo sapiens
cacacatttgatcattcagaggataaaatgaacaatttcttgaaagacacaaaccaccaaaactcagtcatggagaaatgactgatgtgaacaggcttacatgtattaaataaattgaatcattaataacttcccagaatagaaaacatcaggatgagggtttcacactggtgaattctggcaaacatttacggacaaaacgatactagtattctaccatctcttccagaaaacaaacagtggggatacttcttaactcaatctttgaggccagcacttccccaataccaaaattaaataaagacatcataagaaaggaaaattacagactaatatgtctcatgaacatgaatacaaaaatcctcaacaaaacattatcaaatc

SEQ ID NO: 63138 - DNA, 359 bp, Homo sapiens
ctttgatatcagagtaatgctgccttcataaaacgagttgggaagtgtttcttcctcttctttttctggaagaatttgagaaggtttgatgctaattcttctttaaatgattggtggtattcaacagagaagccatctggttggacttttcttagttgggaaatttttgattcatggttcaatctctttacttgttataggtctggtgagaatgttaatttcttcttgagtcagtttaggtaatttcagtatttttaggaacttgttcatttcatctgagttatctgatttgttgtcacacaattgttaatatttttataatgcattttatttctctaaagtcaacagtaatgtaccca

SEQ ID NO: 63139 - DNA, 368 bp, Homo sapiens
atctgatgtaagcacagctactctggcttccttttagtttccatttgagtagactttttccattccctttactttcattctatatgtgtctttacaggtaaagtacatttcttgtagacagcaaatagttaagtcatttttttaattcattcagtgagtctatatctattaagtgaagagtttaattcatttatattctaggtggttattaatatataacattttgatgctgtcatatagtcaattgtttttggttcttttctatattttttgctcctttctcttttcttgattggcattgtgttttggtggttttctgtagttgtacctttctcctactcatttgtgcttaagttttaaacatttgc

SEQ ID NO: 63140 - DNA, 820 bp, Homo sapiens
accgctgaggacgcggacccgccatggcgcggaagaaggtgcgtccgcggctgatcgcggagctggcccgccgcgtgcgcgccctgcgggagcaactgaacaggccgcgcgactcccagctctacgcggtggactacgagaccttgacgcggccgttctctggacgccggctgccggtccgggcctgggccgacgtgcgccgcgagagccgcctcttgcagctgctcggccgcctcccgctcttcggcctgggccgcctggtcacgcgcaagtcctggctgtggcagcacgacgagccgtgctactggcgcctcacgcgggtgcggcccgactacacggcgcaagtgcgtgcaccccgtccgcaccccgaccctgcagccggctggtctccccgcctcccctcctccctgcaggtttgcgtggctgaggctcccacctcctgacctcgggggccgagagctttgcgagctgaccccgcttgcttatggctttgcacaacttggaccacgggaaggcctggggcatcctgaccttcaaagggaagactgagagcgaggcgcgggagatcgaacacgtcatgtaccatgactggcggctggtgcccaagcacgaggaggaggccttcaccgcgttcacgccggcgccggaagacagcctggcctccgtgccgtacccgcctctcctccgggccatgattatcgcagaacgacagaaaaatggagacacaagcaccgaggagcccatgctgaatgtgcagaggatacgcatggaaccctgggattaccctgcaaaacaggaagacaaaggaagggccaagggc

SEQ ID NO: 63141 - DNA, 2077 bp, Homo sapiens
tagacctgaacgcttccttgggttctgggaggatggttgaggtcttctgctgatctctgattttctgggtcttgtgtgcctcccagaacgtgtgggctgtgttggatctctacgggccagtccggtgttgtgtcaattgtcagttccacgagactggaggagtcagaaggcacccagcctccttcccccagttcagacaccggcagtgagggcgaggaggatgacgagggcgaggagcatggcctgggaggccagaatgaagtgggtattatacccaccaccctcgagttcctggagaaccatgggaagaatatccttttgtctaatgggaaccgtacggtcacacgggtggccagctacaatcagggcatcgttgtcatcaaccaacctctggtgccccagctgctggtgcaggtgcggatagatttcctaaaccgacagtggacatcttcccttgtcctgggagtcatcacctgcgcgcctgagaggctcaacttccctgcttctgcctgtgccctcaaacgggcagcctggctgctgcggggccgtggggtcttccacaacggtctcaagatctgcgagaagtttgggcccaatctggacacgtgccctgaaggcaccatcctgggactgcggctggacagctctggggggctgcatcttcatgttaatggggtggaccagggggtagctgtgccagatgtgccccagccctgccatgcgcttgtggacctctatgggcagtgtgagcaggtgacaatcgtgaaccctgagccaggggctgccagtgggaaaagtgctggaacccaaggggacatggagaaagcagacatggtggacggtatcaaagagagtgtgtgctggggtccaccacctgccgctagtcctctaaagagctgcgagtaccatgccctttgctctcgcttccaagaactcctgctgcttcccgaagattatttcatgcctccgccaaagcgaagcctgtgctactgtgagtcttgccggaagctgcgaggagacgaggcccacaggcgcagaggggagcctccccgggaatatgcactgccctttggctggtgcaggttcaacctcagagtgaatccccgcctggaggctgggacactaaccaagaagtggcacatggcatatcacgggagcaatgttgccgctgtacggagagtgctggaccgaggggagctgggagcaggtactgcctccatcctgagctgccgtcctttgaagggagaacctggggtagggttcgaggagcctggcgagaactgtgcacctcctcgggaggagcagccccctcctgtgctgctttccccctcccttcaatatgctggggcggagaccctggcctccaaagtgcaattccgggaccccaaatcccagcggacgcaccaggctcaggtggcgttccaggtgtgtgtgcgccctggctcctacaccccgggacccccttccgctgcccttggagaacctcctgaccctcacttcagtccagccgaacttgagtgggtcactaaggagaagggggccacactcctctgtgccctgctggtacgggtggaatgaggggtgagacaccactactacaagcacagtcgggccgcgggcccatggactctgagtggcgactgcctccacctcattcccgtgactcgtggcatgcgcaggtgctggagcttggcagccgcgcaggagcatgtaggcaggctctcagatgtaggtggcaagtggcacagctccatgtccggaggcccagcactccgtctgatgggaggagccgtgggagcccagctccaggccctggtacccctcttcatgcactgatttggggaacatgactcccttttactcccctaccccacatcacttaatttatttccgtttttgtttctggttactgtgaatcccagaggagtctctccctgtgcccacatgaagctgctttttccggggccaccgggcgggagtggggaagggtgggcgcacggaagatgggggcctctgtacagttgttactgactctgatttctaaggagccaataaacaccgtctcagaaaaaaaaaa

SEQ ID NO: 63142 - DNA, 2122 bp, Homo sapiens
  misc_feature (1)...(2122): n = a,t,c or g
ggttgtgcgcgcaaagccgcgcggggctgagggtcttgttctgccggcgcctgtccggacccgggcccctctccgctttcggccggcctcgggcaccgggcttctggagctcccggagccctgcctgttccctgaccatccaggccagcagctgaaggagcctcacctgcctcccttctctgagtagcacggatttgaggagaagcagcgaagatgtccagcgagcctccccctccttatcctgggggccccacagccccacttctggaagagaaaagtggagccccgcccaccccaggccgttcctccccagctgtgatgcagccccctccaggcatgccactgccccctgcggacattggccccccaccctatgagccgccgggtcacccaatgccccagcctggcttcatcccaccacacatgagtgcagatggcacctacatgcctccgggtttctaccctcctccaggcccccacccacccatgggctactaccccccagggccctacacgccagggccctaccctggccctgggggccacacagccacagtcctggtcccttcaggagctgccaccacggtgacagtgctgcagggagagatctttgagggagcgcctgtgcagacggtgtgtccccactgccagcaggccatcaccaccaagatctcctacgagattggcttgatgaatttcgtgctgggtttcttctgttgcttcatgggatgtgatctgggctgctgcctgnatcccctgacctcatcaatgaacttcaaggaatgtgaacgcacacatgccccagctgcaaagcctacatctacacgtacaagcgcctgtgctaacggagctgggactcgggactcccccgcctgtcagtctggccccctgtgctttgctccctgcgctcagtggtcactttcccgctcccacttggggctgggagccgtgccaccatcccctagaagtcctgtcctcttcaccctgccctacctgagccgctgactcttctggcaaaaattctgttgggatttaaggccaagggtcagtgggtggcagggggctggcaatgagcttgtgtgttgttggtctgcttggtgtgtgtgatcgggaagataagctgggaggggtctcctgctggggtcctgatgcctctgtttccaaacaaggtacaggttcagtccagactctttccccctgggaccaacagcagccagagcagttagccagttagtccccaggcctgtggccacaggcgtttctgacctgctgggccgagaatgggtaagttgtctggagtcaggtgggcccacgtaggacagggtcacaaagcctgggtttgtttctgggtactttgcgcctttggggtgctagaggtggggcatggtggctggaagtaaaactgccaactctggccctcagaactctcaggtatagaagcccaggatgtctaataccctgtcccagtgcccgagagctgcctggtgtcaggtagagaggacactgtacctgggtgaatgatcagaccctggtagctaagaaggaacttgtccctttgagtcagtgtgcagaccccctttcaggccatgcctctgtgaaccctgtattgctggggccggaaggagcccctgagcctagccccttcccgtctgccctgtgtcctcactgcgtgtgggtatgacctctgcctggtggctggtgtatcccaactgggcaagagatggcagagggtcccccttgtgggtgcgcttggatgtgcagagccttctccatggattttcttccctgtaagtgccgggcccctcaccccagctgacaggctgttgctgtgcctgctcacacctgctcctgcaggcacactgggctagggacgaggaaggagcagccacaagtggtagaactgccttggtggacaccagcctcgccctgtctttatttcctgaatggtttgtgaacttgctcacctggaccactgtatcctgccactgtccttcctggtctcgcactgccactgcatggcctcctgtcactgtgaatcgtggcccagtctcagtttgtagtttctcattaaattggccctttcactcccccgccctgggaaaaaaaaaaaacaaaaaaaaaa

SEQ ID NO: 63143 - DNA, 396 bp, Homo sapiens
actgagacgaataatgaacttaattatccataaagacattctgttagacattccagctaataagggtacgcatgatgaatggacaaggcccgaccccacgaggtatcgatgatgaaattacatgctgaagaatgcctagtggcccgtatatcatggacatagggcatgatgatatgggagactcagacacgaacactaagccttctccaaaatttgctgctctggacagaaagctatctcacggctactcagcacatcccttacagaactcatcacactcaaaatctccaatgaacactcacccaaactccagatccggagtcatatttacctgagggcagtgagtgaagcctccatcaaccggagcctggacagcctggaacctgcaggcttgct

SEQ ID NO: 63144 - DNA, 566 bp, Homo sapiens
  misc_feature (1)...(566): n = a,t,c or g
cccacgcgtccgcagcaaagctccatctgtcggcagaggagaagggggaggaggcacggccgaggcaaacgagcggacgcctcgtcgccgggtgccggtatcaccccgctgcaacgccttccagcaaaagccaccgcggcccgggttgcagcagccggacggatgccaaggccacacggcagccacgggggcagccgtcgcagtcgccgtcccacacgggctgcggacaccaagggttgctaatgaagtgattgagaagaaacagtgaacatcctcatttcacagataagacaacatggatcagccttttactgtgaattctctgaaaaagttagctgctatgcctgaccatacagatgtttccctaagcccagaagagcgagtccgtgccctaagcaagcttggttgtaatatcaccatcagtgaagacatcactccacgacgttactttaggtctggagtagagatggagaggatggcgtctgtgtatttggaagaaggaatttggaaatgctttgtctttataataattttacctttttgtgaaanttcctaccangagttcc

SEQ ID NO: 63145 - DNA, 392 bp, Homo sapiens
cccacgcgtccggagcagcgcgggccttctggcagcgggtccagctccagggcgccctagggcagcggcgtgcagtgttcgggtaataggacgcagacggtggggtcgccgggggcttcggggtggcctcggccccaggccatccagccctgtggaccgaatggagtcccacacgctgttgaggtagttgtgggttcccctggcctcgggctcggcgcagggtcagcgctcctgcaggcggcgcttgcggtacgggctggtgaaagtggagacggacggcaggatggattcacttggcgacatggcggggagctgggaagacggacaccggctgggaaagggtttcttctgtccataaaagctactccaatggctgtgggagacttaattct

SEQ ID NO: 63146 - DNA, 646 bp, Homo sapiens
atctaaaggaccttcataaagcatgtgggtgctatataaaaggatatgtctaggcccaagtaaatataagtacaacaaagcagctgttgatcaggtatggcttagtaatacttcccttcggaagtaccttgcattttaccagcattttatttcttttaggttgttggtatggagcaaaagacgagacaccttctaagcagaccctttctatacaacaggagtccccactcaggacacattggacaggtgtatgtaccaagaaggtccacctctggggaatgtgtggccctctcctgggagatatcttacaccagggaacacaacacaatcagaaattgaatgggtttggggcatatgaaaaaaaattggatgacgatgcaaaccatcatcaagaccagaagcagcacattggagagaaatcgtacagaagcaatgccaagggaacatcttttgtaaagaactgtaaattccatatgtcacatgagccatttatctttcatgaggttgggaaagactttttgtccagctctgagattactccaacaagaggacattcacaattaagggaagtcaaactttgaaactaagcatgggatgtattgcggccgctctagaggatcctaacttcgtcggggtcgctactcca

SEQ ID NO: 63147 - DNA, 215 bp, Homo sapiens
gcgtcaacttttttttatgttttttataaggggaaaccccttaaggaggtgggagttacaccatgccggagaaagtcgggtgtatgcgtggttctaaccatgccggggtccaggagcaggtcccggtcccagtcctcttctggctgcatgtaatcgttggtttgctgagaatcataatggtccatgatgattctcagcaaacgtcgactcggccg

SEQ ID NO: 63148 - DNA, 375 bp, Homo sapiens
ggaatatcttgtttaaagtaagacacaattttcctgccaccataaaggggaaagcacaaagcagggtggcctctttgcatcttgaaggcaacccatgtgacagttggacatgctgctacaatctatttagtgggttaaagtaaggcttttccatgacatgattgcctatgaagaaaattctgagaaataaacctccaaaatcctcttagaactaataagcaagtgtagtaaggtcaaaggatataagaccaacacacaataatcaattccatttctatatactaacaatgaacaggaaaacaaatattaaaaactcagtactatttacaatcactccaaagataatgaaatacttaggtacaggattgtatgatg

SEQ ID NO: 63149 - DNA, 845 bp, Homo sapiens
tttcgcggggcttcttcaggcggtggcggcagcagcgaaggtggcggcggcagcagcggcagcggctatggtgtggtcgctcgattctcccagtgcctggctgagtttcggacgtggttaagaaccaactggttgaggttcaatgcagacaagacggatgtgatgctgtagaaaatgtgcatcagatgtttatgtttaattggtttacagactgtctgtggactcttttcctgtcaaattaccagccatctgttgaatcttcaagtccaggaggttcagcaacatcagatgaccatgaatttgatccatcagctgacatgctggttcatgattttgatgatgaacgaacattagaagaggaagaaatgatggaaggagaaacaaacttcagctctgaaatagaagatcttgcaagggaaggcgacatgccaattcatgaacttctcagcctttatggttatggtagtactgttcgactacctgaagaagatgaggaagaggaagaagaggaagaagaaggtgaagatgatgaagatgctgataatgatgacaacagtggctgtagtggggaaaataaagaggagaatataaaggattcatcaggtcaggaggatgaaactcagtcttccaatgatgatccatcacaatctgttgcttctcaagatgcccaggaaataatccgcccacgtcgatgtaaatattttgatacaaatagtgaagtagaagaagaatctgaagaagatgaagattatattccaccataatctcctttttccagtcttctgatggaatataatcttcatcttcttcagaagactggaaaaaggagattatggtgggctcct

SEQ ID NO: 63150 - DNA, 394 bp, Homo sapiens
ggcacgagcgcgtagctgacgtcggaggttcgcggctctaacggagctttctacgagggatttatcctagatgctcatgaggactaccttacagaggtatttgatatttattgacatccacaacgcctggttacatttaatgaagttagatataccatctccatctgatatatatatagaaattactgacggatatgaagtagaggtatattctagagcatatgtccacgagccctgtggctggcgcgcggatacacgcacgctgacgcatggagatatatatgtcattgagtatgctgcttgctacgctacttacgatgacatactcacatttgatcgactttggcctgtcaatcaaaatatgactgtcagagaaaataccttctttaaatgc

SEQ ID NO: 63151 - DNA, 396 bp, Homo sapiens
ggcacgagcccagccgcccagagatgaccgagaccgaagccctcctgcgcgtcctcttgcatcctgctggctttcggacacagcacctatggggctgaatgcttaccggcctgcaacccccaaaatggattctgcgaggatgacaatggttgcaggtgccatgctggctgtgactgtccgctttgagacctctgcgtgacctctgacgactgccttgacggactctgtggagaacccctgcagagcacatgcaccaacgactttcactgtgaaatctgagaatcacaatgacattacgttaatgtctaagtctatgtctatcttatataattctcgacaatattctaaagaagagttctattgataacttcgtgtgcgttgtcgtgcctcgctcag

SEQ ID NO: 63152 - DNA, 1412 bp, Homo sapiens
ccgcaattgccggatcgacccacgcgtacggcactgcctgcacgcaggaaccctcagagtcctgagctgaaccaagatggaggagggggtcgggcctccgaggaaggcctagccgctgctgctgccaggaattccaggttggaggggcggcaacctcctgccagccttcaggccactctcctgtgcctgccagaagagacagagcttgaggagagcttgaggagagcaggaaagcagcctcccccgttgcccctctggatccactgcttaaatacggacgaggacagggccctgtctcctcagcttcaggcaccaccactgacctgggacagtgaatcgacaatgccgtcttctgtctcgtggggcatcctcctgctggcaggcctgtgctgcctggtccctgtctccctggctgaggatccccagggagatgctgcccagaagacagatacatcccaccatgatcaggatcacccaaccttcaacaagatcacccccaacctggctgagttcgccttcagcctataccgccagctggcacaccagtccaacagcaccaatatcttcttctccccagtgagcatcgctacagcctttgcaatgctctccctggggaccaaggctgacactcacgatgaaatcctggagggcctgaatttcaacctcacggagattccggaggctcagatccatgaaggcttccaggaactcctccgtaccctcaaccagccagacagccagctccagctgaccaccggcaatggcttgttcctcagcgagggcctgaagctagtggataagtttttggaggatgttaaaaagttgtaccactcagaagccttcactgtcaacttcggggacaccgaagaggccaagaaacagatcaacgattacgtggagaagggtactcaagggaaaattgtggatttggtcaaggagcttgacagagacacagtttttgctctggtgaattacatcttctttaaaggcaaatgggagagaccctttgaagtcaaggacaccgaggaagaggacttccacgtggaccaggcgaccaccgtgaaggtgcctatgatgaagcgtttaggcatgtttaacatccagcactgtaagaagctgtccagctgggtgctgctgatgaaatacctgggcaatgccaccggcaatcttcttcctagccctgatgaggggaaactacagtacctggggaaaatgaacttcacccacggattattcattcaccaagtttcctgggaaaattgaaggacaggaaggtcttgcccagctttacattttacccaaactgttccctttattgggaacctatggatcttgaaggagcgttcctgggttcaattggggcttcattaaggtctttcagcattggggttgacctttcccgggtcacagag

SEQ ID NO: 63153 - DNA, 335 bp, Homo sapiens
ggcacgagggattcaagcctcgtgaacgaagcggtggggagcaggcacaggactgggatgctctgccacccaagcggccccgactaggggcaggaaacaagatcggaggccgtaagcctattgcggtgctggatggggccaatttggagacaggccatgaaggaaatacaaactacctacgcgcccgtgaccagcacgctcatctaatgctgactgatcgcaaggaatcctgaatgagccataccagatacgagtgccgttagtcagatgacgctgtgaagatgaacatgaaccgatcagcgttgtactatggttacctatgtacctgctaccac

SEQ ID NO: 63154 - DNA, 363 bp, Homo sapiens
ggcacgagcatggatctcatgcgcaagatcatgaagcacctggggatcttcctcctgatggaggcggctcccagatggctcctgtcccagctgcagctgcaggagtccgtccccggactggtgaagccttcggagaccctgcccctcacctgcactgtctctggtggctccatctgcagcagtggttactactggggctggatccgccatcccccagggaaggggctgtagtggattgggagtatctattatacatgggagcacctactacaacgagtacctcacgagtccagtcacgcatatccgtacacacgtgcaacatccagttctccctgatgctgaactatgggaccgacgctgact

SEQ ID NO: 63155 - DNA, 353 bp, Homo sapiens
ggcacgagaagcagcagcattgtcgtaccccaaactcactgtgacattgctcacagaaccacgccgtgacgaccgccatcctgacccaccagggagatgtaggacagtgcttggctcaagctgcccacactcttgactccggtgccaggagtcctgcctttgtgctcagcttgtagggacctgcctagggagggcctgtctgcctgagtgtgggtagaggcctcgcacatggcaagaaagagctgacttccttggctagatgccgtagagcacctggatgatctcaagggcacctttgaccagctgactgaactgcactgtgactagctgcatgtgaatcctgataacttccg

SEQ ID NO: 63156 - DNA, 761 bp, Homo sapiens
ctccccgccgagaagcctcgctcggcgcccaacatggcgggtgggcgctgcggcccgcagctaacggcgctcctggccgcctggatcgcggctgtggcggcgacggcaggccccgaggaggccgcgctgccgccggagcagagccgggtccagcccatgaccgcctccaactggacgctggtgatggagggcgagtggatgctgaaattttacgccccatggtgtccatcctgccagcagactgattcagaatgggaggcttttgcaaagaatggtgaaatacttcagatcagtgtggggaaggtagatgtcattcaagaaccaggtttgagtggccgcttctttgtcaccactctcccagcattttttcatgcaaaggatgggatattccgccgttatcgtggcccaggaatcttcgaagacctgcagaattatatcttagagaagaaatggcaatcagtcgagcctctgactggctggaaatccccggcttctctaacgatgtctggaatggctggtctttttagcatctctggcaagatatggcatcttcacaactatttcacagtgactcttggaattcctgcttggtgttcttatgtctttttcgtcatagccaccttggtttttggcctttctatggatctggtcttgtaggtaatatcacagtgtaattgggatccaccctatcgccacgtatcatgaccccatctactaaccttggcgtccacacagcccacacctcggagcatctgcgcttg

SEQ ID NO: 63157 - DNA, 889 bp, Homo sapiens
ggcacgagggaatagtgggttttgctgcaaccggtttattttccttctgttttcacccattctggcacaatctggcgccatcgtccttcttgtgaggccaagcctgaaaatgcgaagcagagaggcaggaccaaaattgaggcgaatccaggaacctgccaatgggtctccgggtgcggtctctgaaactggaggatatcgggaggaaaggctctccgatgcggagataatggggaagctcttggcatggttggctgtaggtatgtgataccggaggagcaggagtcaaataggatacgccgacttttaattcaaggaacccttttctgaaacactttgccacaatgaaggaaataagattacagccgaagatacatattaaggaattgtactctcagagatgttgagaaaagatacatgggtcttggaagataattactcaaaatatgcagggaaggaataaaattgaagggtgtttttcttaaagaacatcatttgtcatatttatttgatcaagaagttgaagatttatataataaggatctagtttgaagcactaagaagaataagacatcagtttgaaaagaggctctatcagaacaacacgaattctgctaaaattgaagcaagaacaaacatcaaatatatgttgacacttgggtggaagaatggtgaactaattgatgctttatgaaaagttgatagggacagtgctccaaagaaatcagtttacaaatggataactcgttttaagaaggcataaggtaatgttgaagaagaagcccacagtggcagatcatccacatcagtttgtgagaaaaaagttagttcatggcgtaattgaagaaaaccaacaattaacagcagaaacaacagccaacaccataga

SEQ ID NO: 63158 - DNA, 356 bp, Homo sapiens
ggcacgagctcttacctatctatcctagactgtgagctccttgaaggcacagtcctggcctagagtaggcatgccataaatgattagaaagtagagggaagtggcagggcagccaagacagttttagagacttttaagtagttcaaacaaacaagccagcacatgttggaggtggagggatggttgaccccatcacccccacctacctcacccctgcaccaccacccccctcacccaccctcccgccttgcctacccgaccaatagccctcccccagtctcgttccaccgcctccacgcaccccaccctcctctaccactcctcccctctcgtctccccccctccctttccgcccc

SEQ ID NO: 63159 - DNA, 356 bp, Homo sapiens
ggcacgagggaacgtctgaggttatcaataagctcctagtccagacgccatggggcatttcacagaggaggacaaggctactatcacaagcctgtggggcaaggtgaatgtggaagatgctggaggagaaaccctgggaaggctactggttgtctacccatggaccaggaggatctttgacttgctctggataactgtcctcttggtttggcatgatgggcaactatacagtcaagggacatggcaagacggcgctgactttattgtgagatgccatatgacccttggttgagcctatgggctgctttgcctggctaactgagctgacatgtgacatgctgtattggaatccttgg

SEQ ID NO: 63160 - DNA, 357 bp, Homo sapiens
  misc_feature (1)...(357): n = a,t,c or g
ggcacgagggcggcggctgtagcggcgtgacaggagccccatggcacctgcccagccccacctcagcccatcttgacaaaatctaaggctccatggagccaccacggggcccccctggccatggggccgagccatcccgggcagtgggcaccgtcaaagtatacctgcccaacaagcaacgcacggtggngacagtgcccgaataggagaaggggtacaaaactctatacaagggcctgaaagtgcggggtctaaatcaggactgctgtggggggtaccgactcttctagggacaaaagacacggactgtgtggacacaagcattggttccctggatggccaggagctcattggcca

SEQ ID NO: 63161 - DNA, 478 bp, Homo sapiens
  misc_feature (1)...(478): n = a,t,c or g
gtcatgagactgaggttgcatatgttcgatgctgtaggaggcagtgaccttcaaggacgtggctgtggtcttcactgaggaagagctgaggctgctggaccttgcccagaggaaactgtaccgagaagtgatgctggagaacttcaggaacctgctctcagtgggtgaggacaggcaccctttgtaagggaacatcaggaccaggagtggctttgtatcctagagtgttcaagtttgagtatgcattgggaacctaagtttccagtaaattttacttagatttttttctaggatatattggcactaagcacatgacttttcacgttcacagggcatcaatcactccacagagatactttccacttcctaaaggaagaaaagttttggatgatggagacagcaacccanagagaagggaatttaggtaagaagcaagcaactctgtgtccttgtgcgtgactcttccatcggtttcact

SEQ ID NO: 63162 - DNA, 976 bp, Homo sapiens
ggcacgagaaaagagacgggctgtttctatgtagcaggatcggcccagcttcgggaaaatggagttttcagaggctcatcgaggccattttttcatctccagtcgggggaactttttctgcccatggaagtgcagcagaaaggcatagaggccactaggccttgaagtggctgccattttaaagagtcgagtcagatggcctattaactcagattaattgctgtgcttttggattccaggttgatgccggcccaggatggatcagacctgtgaactacccagaagaaattgtctgctgcccttttccaatccagtgaatttagatgcccctgaagacaaggacagccctttcggatgatccagattccagtaccagtacattaggaaacatgctagaattacctggaacttcatcatcatctacttcacaggaattgccatttagactggccttgtcatgttgcccaggctggcgtcgggactcctgggctcattcgatcctcctgcatcagctagaactacagtagtttcagattttgaagtgtgtatgtgtatgtgtgatatgtatatattccgtgtgtatagaaatggagagtatcttatttgagttgttgttttcagtaatgctgtcaagtattgttagagggtgataaatgataacatttgtttttatttgagcttatgaagaatttcttgactttctagctaaatgatcagttcacttctcttagcctcaattttattgcgtctaaattccaaaagttcttgattgctataagattccttcagctttaaatattaatatttgatattgattttgtttctgcccaaacacattgtttggtcaccgccggtaatgttagcaaagagaattttttttggccaacaaatgtctcataccacattcagtttttataagaaaaacttttatggtatgttgttattctgagttcattaaacattcgctttaccttat

SEQ ID NO: 63163 - DNA, 375 bp, Homo sapiens
ggcacgagggaacgtctgaggttatcaatgtgctactagtcctgacgccatggggcatttcacagaggaggacaaggctactattacaagcctgtggtgcaaggtgaatgtggaagatgctgtatgagaaaccctgagtaggctcctggatgactacccatggacccataaggtattagacagctttagcaacctgccctctgactctgccatcatagtcaaccttaaaggctaggcacatggcaagagtgggctgacttccttgggagaagccataaagcacctggatgagcttaagggcacctttgtccatctgagtgaactagcactgtgacaagctgcatgtggatcctgataactgtaagctgctgggag

SEQ ID NO: 63164 - DNA, 1097 bp, Homo sapiens
  misc_feature (1)...(1097): n = a,t,c or g
tttcgtggacagacagatagtgggacttctcagggcttggacaagccccaccccacgcttggggtggggtccaggactacagtgcccgcccagtttgcggacagtgaaaaaaaaaaagtaccgttccaaagcaggagcctaggcagccgagagggtgcccgaacctgagtctgagttgcggccacttcaggagctgagaggagcaggatggaactgcaggatccaaagatgaatggagccctcccttcggatgctgtgggctacaggcaagaacgtgagggcttcctgcccagtcgtggtcctgctcctgggagcaagccggtccagttcatggatttcgaggggaagacatcgtttggaatgtcagtgttcaacctcagcaacgccatcatgggcagcggcatcctggggctggcctatgccatggcccacacgggggtcatcttcttcctggccctgctgctgtgcattgcgcttctgtcgtcctactccatccacctcctgctgacctgtgctggtattgcaggcatccgagcctatgagcagctgggacagagggcattcgggcctgcggggaaggtagtggtggccacagtcatctgtctgcacaatgttggggccatgtccagttacctgttcatcatcaaatctgagctccccctggttatcggcaccttcctgtacatggaccccgagggggactggttcttgaagggaaacctcctcatcatcatcgtcagtgtgttaatcatcctgcccctcgccctcatgaaacacttgggctacctggggtacaccagtggtctctctctgacctgcatgctgtttttccttgtttcggtcatctacaagaagttccaacttggctgtgctataggccacaatgaaacagcaatggagagtgaagctctcgtggggactccccagccaaggactcaacagcagctgtgaaggcccagatgtttcacagttgactcacaggtgttcttacacagtggcccattatggcttttgcttttgtctgccaccctggaggtgctggcccatctattacggagctttgccgggcctttcaagcgcaggatgcagggncgtgg

SEQ ID NO: 63165 - DNA, 1518 bp, Homo sapiens
ggcacgagggaggtaggcagtggtatccatcctgatgaggcagcagaaaaggagatgacttgagttgtggcagagaatggcactggcttggtaggcagcttggagctggaagaagagcagccagaactgaagatgtgtggctacaatggctctgtcccttctgtggaatcgttacaccaagaggtctcagtcctggtccctgaccccacagtgagctgtttagatgatccttcacatcttcctgatcaactggaagacactccaatcctcagtgaagactctctggagcccttcaactctctggcaccagagccagtgagtggaggactatatggtattgatgacacggagctgatgggtgcagaggacaagctgcctcttgaggacagccctgtgatttctgcccttgattgcccttccctcaataatgctactgccttcagtctcctggcagatgatagtcaaacatcaacctctatctttgccagtcccacctctccacctgtcctaggggagtctgtcctgcaagataacagctttgacctgaataatggtagtgacgctgaacaggaagaaatggaaactcaatcttcagacttcccaccatccctgacccagccagctcctgatcagtcatccactattcagctacatccagcaacctcaccagcagtctcgccaacaacctccccagcagtctccctagtggtttctccagcagcctccccagaaatctctccagaagtttgtcccgcagcttctacagttgtctctccagcagtcttctcagtggtctctccagcttcctcagcagtcctcccagcagtctccttagaagtcccgttgacggcttcagtgacatccccaaaagcctctcccgtaacttccccagcagctgcctttccaacagcctccccagcaaataaggatgtcagcagctttctagaaaccactgctgacgtggaagagatcactggagaaggactcactgcttctggtagtggtgatgtcatgaggagacgtattgctaccccagaagaagttcgtcttcccctccaacatgggtggcggagagaggtgcgcatcaagaagggcagccaccgatggcagggggagacctggtattatggcccctgtgggaagaggatgaagcaatttccagaagtgatcaagtacctgagccgcaacgtggtacacagtgtccgccgagagcacttcagcttcagtccccgtatgcctgttggagatttctttgaagaaagagacacgccagaggtgcagacccaagggttaaatatgcttttgtccctgaggaagagttggtggacaagctgcagcttcctctcgtggggtttgaaggttctggggcattgaatggttccgagggcctcgtggcctgcactgattccttactactgtaacagtctcccttgctaccttagggcttgcagtgggtgcagctctcagcagaggagatcccgtcgaggattcaggcaattactggcaaacggggtcgat

SEQ ID NO: 63166 - DNA, 402 bp, Homo sapiens
ggcacgaggtttgttggggttggggggtatgcatctcctgctgtgttgctgaaggatttgctttagcaagttcctttagcttctataggtctgtatcctacattggagaactacattaaatgacttgaaactcttagtagaaagagtctatttattgtttttgagaccgagtctcgatctgtcgaccagccctttgggcaccaggcctatgacaccgccatcatgtccatccccaaaatcaaagcacatcgttctagagctctgacttccttgggagattccacttagcacctggaagatctcaagggcctctttagccaccttaatgaactgcactggacaagcctcttgagcaccctgataacataaactcttggaaatcggcctgtgaccgcttggcaa

SEQ ID NO: 63167 - DNA, 2012 bp, Homo sapiens
gaatgcccactggggccagggtgggcaaaggaggttggtgccaatgtggtgctggaagtagacccctcctgggtctggaacattctctgccccaggctctttccacctggggatgttgtgacaacatccagctgtggtgtctgggctatttgtgtggtgacaagacagacctggtcagggggtgggtggcaaacacctcacctggctgggcagaggccaccttgctgtttggcccaaggccaggtgaggcccctccctttccaccattgccctggccccgtggccattcattcttggggtttgtctgagtcttccacagagagcagcaaagagatatgggagttgggtgatcagtgtatttactttgcagatttttctggaaataacctctagctgctgctatttgcaaggctgggattggcctccctgtcttttccaacaatcaggaccccatcctgtctgttcctgttcttctcccagcctctgccctccttctgtctcctgggtggtctcccgcttcgctcctggcctttgcatgttccatctcttctctttctcccctcttcgccaccctagattatctctgtgtccctctacctaattctcttaccagttctttcctttctgcttagagccggagggagggaagctggaatctgttatggtgtattagggggaggagcctttctgttatttccccccagcttccatcacccttcccttaatgccaggagcgccgaggtttggaactgaggctaaaccgaagggctttctcctgcttctgtcaccctgtgctgtctcccggcatctcctcactatctgggtccaggcccgggtcctccctgcagactccctcccctccagcccacaaggactccagcctgctggctggtgaagaagcttggaatgaagcagtaagaaagttaacgccaggtcaagcctcgggccccaagggttccctgggcacaggctgacactaggagctgctctccttggccggggacagctccagcagctcaggctccagccctccagtgagccgcctctcctggagagtagcaaagaatggagaaaggcctggcttgagaggaaatggagaaaacattgcctggtagctgcagattcaaacccaccacacacaccacggggctagagtgactcacctgggctcacaccaacttctggccaatgcagggaccatgctctgcagacagcagtcctctagcatggccccagcattcagccagtcggtcacctgtgggccatccccatgtgtgaggaagcaggagtcagccaccaagtgtctccacatcggagcttgcgggtcagacctgtgggccaggggatgggagcagggctgagggtaggggctgaatgtgtggctctgtccctgtgttgccttccacagaggagcaaggcctcaggctgaggaaggaggggcacgctggaacagcctagtctcctccccgtggattcccccaaacccataacattcttccataggggctgagaacgcagtgccccgtccctgacagggatgaaaagtgaacccctcaggtcaggagaggcagagttgaggttctgccacttcctgtccctggggagccactcaagttaccagggctaccgggctgaaataaatctttttcccgggttagggttcaaagggcaagtggattttgccaaggcaactgatgtaggccagttgacgtgactcccaggtttgtccctggtactcagtgggtcccaatcacctggcattgatcacctggcattgatcagcacccaccccacccctgaaggcttgcccagcccccaggccctcagatccctgctcttcctgcctttcctgcccatgtgtcacccagcacccaaggttcagtgacacagggtggtttggagctggtcactgtcatagcagctgtgatttcacaaggaagggtgctgcagggggacctggttgatggggagtgggaaggggaaggaataaagagatcttcctcaggaaaaaa

SEQ ID NO: 63168 - DNA, 380 bp, Homo sapiens
atcgagcatggctgcccccacggatgacggcctgaccactgctgctcccacgctttatcgacattccctgccttctgtgctatcttacccaggtcaccccagacgacatgtacgccaaggcctttctgatcaagcccaacacggccatcaccgggactgacaggagaaagctctcgagctgatgagacaacagatttcccacacccttggaactgatcaaatctatgagttattacctggaaaggacgagctcaacatcgtgaaatcgaatgctcacaaacgggatgcatagactgcgtacgtgagtggagaaaaccacatactttctgaaccgtagaaaaacctgtatccagcagtgaacacgctgagctcctatccct

SEQ ID NO: 63169 - DNA, 380 bp, Homo sapiens
cgaaactggaataagccttcgaaaagaaattgtccttgaagcttgtatttgatatcagcactggattgtagaacttggtgctgattttgaccttgtattcaagttaactgttccccttggtattaacatgtcagggctgagtgttctggaatctctgtaactactgcgctgagcccggtttactacatgatctactgctacacctagctcatggagcttggtgcccatcatcccgctcaacatgaaggtgagcactatggaaatcctgcagcacgtcatttactacatcatggacctgcacatcgccctggactcgcattccactattggcagcctgctttatcagagacccgggcagaaccatgcgtccaggactccct

SEQ ID NO: 63170 - DNA, 1776 bp, Homo sapiens
agcggccgcgcagcggacaccgtgcgtaccggcctgcggcgcccggccaccggggcggaccgcggaacccgaggccatgtcccatgaaaagagttttttggtgtctggggacaactatcctccccccaaccctggatatcggggggggccccagccacccatgcccccctatgctcagcctccctaccctggggccccttacccacagccccctttccagccctccccctacggtcagccagggtacccccatggccccagcccctacccccaagggggctacccacagggtccctacccccaagggggctacccacagggcccctacccacaagagggctacccacagggcccctacccccaagggggctacccccaggggccatatccccagagccccttcccccccaacccctatggacagccacaggtcttcccaggacaagaccctgactcaccccagcatggaaactaccaggaggagggtcccccatcctactatgacaaccaggacttccctgccaccaactgggatgacaagagcatccgacaggccttcatccgcaaggtgttcctagtgctgaccttgcagctgtcggtgaccctgtccacggtgtctgtgttcacttttgttgcggaggtgaagggctttgtccgggagaatgtctggacctactatgtctcctatgctgtcttcttcatctctctcatcgtcctcagctgttgtggggacttccggcgaaagcacccctggaaccttgttgcactgtcggtcctgaccgccagcctgtcgtacatggtggggatgatcgccagcttctacaacaccgaggcagtcatcatggccgtgggcatcaccacagccgtctgcttcaccgtcgtcatcttctccatgcagacccgctacgacttcacctcatgcatgggcgtgctcctggtgagcatggtggtgctcttcatcttcgccattctctgcatcttcatccggaaccgcatcctggagatcgtgtacgcctcactgggcgctctgctcttcacctgcttcctcgcagtggacacccagctgctgctggggaacaagcagctgtccctgagcccagaagagtatgtgtttgctgcgctgaacctgtacacagacatcatcaacatcttcctgtacatcctcaccatcattggccgcgccaaggagtagccgagctccagctcgctgtgcccgctcaggtggcacggctggcctggaccctgcccctggcacggcagtgccagctgtacttcccctctctcttgtccccaggcacagcctagggaaaaggatgcctctctccaaccctcctgtatgtacactgcagatacttccatttggacccgctgtggccacagcatggcccctttagtcctcccgcccccgccaaggggcaccaaggccacgtttccgtgccacctcctgtctactcattgttgcatgagccctgtctgccagcccaccccagggactgggggcagcaccaggtcccggggagagggattgagccaagaggtgagggtgcacgtcttccctcctgtcccagctccccagcctggcgtagagcacccctcccctcccccccacccccctggagtgctgccctctggggacatgcggagtgggggtcttatccctgtgctgagccctgagggcagagaggatggcatgtttcaggggagggggaagccttcctctcaatttgttgtcagtgaaattccaataaatgggatttgctctctgcaaaaaaaaaa

SEQ ID NO: 63171 - DNA, 313 bp, Homo sapiens; identical to SEQ ID NO: 44751

SEQ ID NO: 63172 - DNA, 353 bp, Homo sapiens
atgagctcaaaatttgctttgagagctacagggaattgctattactcctgtaccttggctctatctacttaaactttattaccggaggctcttttcctactctctgtactatcgatggctcaactacggtccatagatactaatttactttcaacaccctgaattttcattctcattgtaagatgatattatacattctcttcctatcctttatcatcctcagtgattctggatatggagatgctcaatatgatttcattctagaatgatatttcctcataatattcatacataccctatcgtcacaaatcagtgaagcttggatctttacatgcttcttgataaagaacaag

SEQ ID NO: 63173 - DNA, 1578 bp, Homo sapiens
ggcacgagcccgtcctgttagggcagtactcttaaccaaactaaatgctaagattactttttctctgagatgattggacatccaggtgccttcagaccaagcatgtgctctgcaggccatattattacaactggagatccttgaaagtgcctgcacccctgaagagatactccaaaaggttagtccggaaacatgggcagatgggaggccagggaaaacaaaaactgcatctccagtacaagtcaagttttgtgcaggagtggcgctgccaaatctaaagcagcgtcctttgagagaaaaggcacagcaatgcatttagcctctgctaatggccttcctgcaatacaggaagaattccttgtttctcatgtaacatacctgtcttgccaggacaaaaacatggaactgaggattattggtttgtacaggatttgagggctactaggcaaattttcaaagccatttatctggtgatacctgatgcttatacattattcatgactttaaccagtgagttgtactggtgttcagtcttgaatctgaaggatgccttcatctgtattcccctgagtccagagtcccatgaagtgtttgcctttgaataggaagactctgacactaaagctaaatgatagtattgctggatgatgctccatcaaggcttcaaaaactcactaaccgtccgggggaaatacatgctaaggagttttgggacctccaattgaaaaatgagactttgcttatatatgttgatggcatattagaagccagcacaactatggcaaattgaccagaatattatactggctttacatttttttttttgtctggatggggatccaaagtatccaagaaaaaaatcacaaatattgaaaaactcaattatatattttaggtttgaattttctcaggagcagagtaatctgcttttcggactgggagagaagctcttgtcagggtggccagactcaggacatgggcagcagctggtgaggggtttttaggtatggctgaatgttgccatatttcattttcttattttgggcttatagcaaaatggtctctatgaagccctaagaccagacacttgacctcctagaatggaccaagggaatgtccaaaaggcctttctaaccattaaggtaaaaaattactaatggatctggcttactggagacccccctgaactaagaaagcccattggatttgttcataccatgagagagaagggatggggtttaggagtagtaaccccaaagaacttggggaatatcatgaggcctgtagcctacttttcaaaacagctggacattgttatgatgggttggacttcttatctctgaccactggcaccacttgtgatcttctccaggaggcagaagagttcactttgggttaacctagcactgtacacaccccacactgtgtatgctatttgttggaacagaagtggagctactgacttacctctagaagactgaatagatatcaggtcatcctcctggataatcctagtgttactttgagagctgtttctgctttaaatcctgctaaataaacctatacatgattgcatat

SEQ ID NO: 63174 - DNA, 879 bp, Homo sapiens
ttttttttttttctgagccatggcaaaagcagtttttttaagcttagtcaagttgaagcagcgggagtggaggaggatcagagaaacctctgtagttgtgattggttccttgtcgcctccactgcgtacccgctgagctgggctttgggcaggtgagcagcacagaggcttccctcctcgtccctccccacaccccaccatcgccacagctccctccgccgccggtggggcacccagatggggagaagctgaggaggccactgttcacccaaactggttggtccttcgggcaatgctgggaatagggtgggggctctgggcaagcccaggaggaggagggcctggctgagttccaggaacatctcacacccacaagggaggatctagctggtgccctccctgtactgtcaggaggccagagggcccttctccagctcatcagggagggaactgctctggcagggagtagggaaggctgtttgtggcatccctcaagaaagctcctgcctcagaagaggcccaggcaaaaagagcccacaacagtctacctgtggagcagggggagcccacagagcccagggggagcccacagagcccagtgagagctgggggtccttgctgccaactcagaccctcagatccaagccaatggctttggggcagggcagccaaagccatggtaagatagcctacaccacagagccccagaggcaggggctgccccgggctggcacatttggaaaggatgcacttgcaccctgtccacggaagagctgtcatcaggcctcaagcatctcagaatcctccccaggcactgcctccatggaggcagccggaggaacaggacagttctggggtccgaaccctctgttggggaat

SEQ ID NO: 63175 - DNA, 1679 bp, Homo sapiens
atttgacctagtgagcaagaagtaggaactacattagacttagtggaaagacatttgcatcagagggtaggaaataaatatgactacaattcaagggccttctaccttagtgaaattggtagggacccagtgacatggggcatgttaggatatttcttctacggtgaaggataagtacttgcatcttgctgctcttaaaaccaagaaagaggcacaatacttagtgggcctctttgggttttggaggcaacattttccaatttcattatgttacaccagcctgtttaccaattgactcaaaaagctgctagttttgagtagggcccagaacaagaaaagagtctgcaacaggtccaggctgctgtgcaagctgctctgccacttgggtcatatgatccagtggtgtttcagtggcagtggcagatagggatgctgtttgaagcttctggcaggtccctataggtgaatcttggtttaggattttagagcaaagccgtgccattaccaacaaataactagtctctttttgagaaacagctcttggcctgctactgggccttagtagagactgatacttaatgagtcaccaagttaccgtgcaacctgagcttcccatcatgaactggatgttatctgagccaccaacgcacaaagttggatatgcacagcaacactctgtcatcagatggaagtggtatacacatgattgggcctgagaggccctgaaggcacaaggaagttacatgaagaagtaggccaaatttccatagtccccacttctgctacctgccttctctcttccagcctgcatcggtggcttcatggggacttccctgtgatcagctgacagagaaagagaagacttaggcctggtttacagagggttctgtatgatatgcaggtaccaccctaaagtggatagctgcagcactacatctcacctctgggctaccttgaaggacagtggtgaagggaaatcctcctggtggacacaactttgagcagtccccctgttgactttgcttagaaggaaaaatagccagatattcaattatatgccaattcataggccgtggccagtggtttggctggatggtcagggagttcaatataactggaaaattggtgacaaagaaatttggagatgaagtatgtggatagacactgaatgggcaaaaagggtgaagatatttgtgccccatgtgaatgctcaccaaagggttagcaaaaaaggattttaataaagtggacaagataacctgttctgtggatactagtaggcctctttctccagccacacctgtcatcacccaattgtttcatgagcaaagtagccatggtgataagaatagaggttatgcatgggctcagcaacgtggacttctactcaccaaggctgacctggccaaggctatctctgagtgcccagtctgccagcaacagagaccaacactgagcccctgatatgacaccattccccagggtcatcagtcagttgcctagtggcaggttcattacattgatccacctctatcattgaagggatagtgttttatccttactgaaatagatcttactctggatacagattcactttcccttcgcgcagggtgtctgctaaaactaccatccgtggacttacagaatgtctcatctatgaccatggtattccacacagg

SEQ ID NO: 63176 - DNA, 1797 bp, Homo sapiens
  misc_feature (1)...(1797): n = a,t,c or g
tttcgtggggaggccgcgtgggctatggggcggcggtcgcggggtcggcggctccagcaacagcagcggccggaagacgcggaggatggcgccgagggtggtggaaagcgcggcgaggcgggctgggaaggaggctaccccgagatcgtcaaggagaacaagctgttcgagcactactaccaggagctcaagatcgtgcccgagggcgagtggggccagttcatggacgctctcagggagccgctcccggccactttaagaattactggttacaaaagccacgcaaaagagattctccattgcttaaagaacaaatattttaaggaattggaggacctggagatggacggtcagaaagttgaagttccacagccactgagttggtatcctgaagaacttgcctggcacacaaatttaagtcgaaaaatcttgagaaaatcgccacacttggaaaagtttcatcagtttctagttagtgaaacagaatctggaaatattagtcgtcaagaagctgttagcatgatcccaccactgctcctcaacgtgcggcctcatcataagatcttagatatgtgtgcagcacctggctcaaagaccacacagttaattgaaatgctacatgccgacatgaatgtcccctttccagagggatttgttattgcgaatgatgtggacaacaagcgctgctacctgctcgtccatcaagccaagaggctgagcagcccctgcatcatggtggtcaaccatgatgcctccagcatacccaggctccagatagatgtggacggcaggaaagagatcctcttctatgatcgaattttatgtgatgtcccttgcagtggagacggcactatgagaaaaaacattgatgtttggaaaaagtggaccaccttaaatagcttgcagctacatggcttacagctgcggattgcaacacgcggggctgaacagctgggctgaaggtggaaggatggtgtattccacgtgttcactaaaccctattgaggatgaagcagtcatagcatctttactggaaaaaagtgaaggtgctttggagcttgctgatgtgtctaatgaactgccagggctgaagtggatgcctggaatcacacagtggaaggtaatgacgaaagatgggcagtggtttacagactgggacgctgttcctcacagcagacacacccagatccgacctaccatgttccctccgaaggacccagaaaagctgcaggccatgcacctggagcgatgccttaggatattaccccatcatcagaatactggagggttttttgtggcagtattggtgaaaaaatcttcaatgccgtggaataaacgtcagccaaagcttcagggtaaatctgcagagaccagagaaagcacacagctgagccctgcagatctcacagaagggaaacccacagatccctctaagctggaaagtccgtcattcacaggaactggtgacacagaaatagctcatgcaactgaggatttagagaataatggcagtaagaaagatggcgtgtgtggtcctcctccatcaaagaaaatgaagttatttggatttaaagaagatccatttgtatttattcctgaagatgacccattatttccacctattgagaaattttatgctttggatccttcattcccaaggatgaatttgttaactcggactacagaagggaagaaaaggcagctctacatggtttctaaggagttgcggaatgtgctgctgaataacagtgagaagatgaaggttattaacacggngatcaaagtctggtgtagaaa

SEQ ID NO: 63177 - DNA, 800 bp, Homo sapiens
ctagtttgaggcactatgatatataagacttcattttgcaattattccctatcaaggcaaaatcaattctgctaaaatggtagcaaggacaaacatcaaattgatggtgaaagttgtgatgtggaagaatggtgaaatcattgatactttacaaatagtttatggggacaatgccccaaagaaatcagtagcagtttacaaatgcataactagtttaagacgaagcaaagttttagatgaagcctgcagcagcagaccagtcacatcgatttgcaagggaaaagttaatcttgtttatgccaacatctcaattggttcagcttacacaattttgatggaaaattaaatttgagcaaactttccactcattggatgccacaactgtacacccagatcagctgaagacaagagcaaagctttcaatggaaatttaaacaagtgtgatcaagaccctaaaggatttctttgaaaaattgtaacaagagatagaacatggctttactagtacacttttgaagacaaagcacagtcaaagcaatggctaccaagagggggaagtggtccagtcaaagcaaaagcaggctggtcaagagcaaaggtcaaggcaaaacaggtttttggaatgctcaaatcgttttgcttgttgactttctggagggccaaagaacgataacatctgcttatgagagtattttgttgaaaaaaattagccaaagctttagcagaaaaacgcctgagagagctttaccaaaacgtactctaccccaacaatgcaggcaaggtccttcatcaaactaggg

SEQ ID NO: 63178 - DNA, 1104 bp, Homo sapiens
taaattagtatggttttaagatagttttacagatagattagataatctatctagagatagatagggagagatatctatcaatacatatctctatctagatatagatagatggttttctatatagacctatctatctatatatgtatacatctatatatgtctacacatatctctatacacatatatatatttatatctccatctatatttctacatgtatataggtatgtatatatctacatgtatatatgtatatagatagatatatacataggtatctgtatatatgcatatacatgcctatctatctttatctacatgtattacatagatagggtaattactgataaatcctttggccttctttgtaaatctctgggctaaagacccctccagtattatacatgttctggtctagattgctcactcaccagttctcctcactatctagagaagatccacttagcaggcctccccttaaagaagggcaccttaactggactcactcctcccatagtagactgcacagtacacaagcagaagaggagagctcaataataaagtcagcataaaggataatttttaaatgaataaagaaatcagaaaatccagtattggctagcacatatggctatcagcaagctcaccctacaaaaaaatagtgagaaaacagttcgaatattggccgtttggggcacatattctacaaaaaggaaaagttttgaaatgtatatatatttaatttaactctttaaaatatttgtaggcaagcccagtggctcacacctataatttcagaactttgggaggccagggcaggaggattgcttgaggccaggagaccagcctgggcaacatggcaagaccccatatctacagatggttttaaaaaattagccaggtataacacagtgaaaccccgtctctactaaaaatacaaaaaattagccgggcgcggtggctcacgcctgtaatcccagctactttgggaggccgaggcaggagaatggcgtgaacccgggaggcggagcttgcagtgagccgagatcgcgccactgcactccagcctgggcgacagagcgagactccgtctcaaaaaaaaaa

SEQ ID NO: 63179 - DNA, 921 bp, Homo sapiens
gagggatactctagagcggccgccgccagctgcgcccccaccaggctgcccggcttggtggggtcaagtgccacgccgtgtggcaggaactggggcgggtagccggcgtaggccccggccaggctgcctgggtaggtcatacccgcgggaggcagagggaacactgtctggcccggcttgtagggtgacacgggagccaccagcccagagcccaacactgaggaggaggtgggcgcgctggggccggagccggagctggagcccgatgaaccgccgcagtccgagcccagagccttgcctcccgggcccccatccggatgctggttcacatccacattaatcccgccgccgcagctaatccggccgtgtgccagccccgtgggtcccccttcggccgaggcgcccccggtgcccttgccaccgccgcccacgtcggtgtctttcttgtcgtccttgccctccggggcacccccggccgaggacagcatacctcccggcgagcaggccgaggcgctggagctcgggctgcctgtcctgggcgtgaatggctggcaggtggcgctcggtacccggaatcccgacttctctgcagcaacacccccgccgccgcccccgccgccgccgcctccgccgccgcctcccggctccttcttatctgaaccgggtttggagtaaggcttgaaactcgacttgtcctccacgccgatgtcgctcagcttcaaggggcccgacttggcgtccttgtcgcccccagctccgttgcctgcaccacccgcgccgccgccgttggaggcgaccgaggagagtttggaagaaggcgaagggtccggcttccctatctgcgaacatgtttgagccagcagcgccagtgggctcttcttggcgtccagctcgatggggctgacgggcgtggaaggcagg

SEQ ID NO: 63180 - DNA, 592 bp, Homo sapiens
  misc_feature (1)...(592): n = a,t,c or g
acactgaactgaagactgtgtcatctgaatcattctattagtcactttaatgatttatattgtgaacttttttgggggaaactgtcattaaactgacttgaaaccctgatatttgaacataaaactattgtggagggaataaataacaattctttcagataatgaatggattataagcaactccaggagacaaaaaaagtgtctagaacaaatttcagcctactcttgctcggaaatatgttccttaaatgtttaaataattaacaaaaatgcatagcagtacagtaaatttttttatgagcttcctattgatacaggcatttaagtaacaacttttatctgtcaaaggctttcgcagaagaggttcttttttgatcagggcgatggaactgttcatctctgtggtcctatcaaccctctcagttttctaagttattgattgtctttgctctgctatttttggcagccctctgttgctattctttgacattcatgagatttgcctacaaggtacagcctcggaactgggcttctgtttgcatgcccacggcaacaaatggaagtaggcccagttcnccggggggaggggcgg

SEQ ID NO: 63181 - DNA, 2297 bp, Homo sapiens
cggggtaatgttggcttcatagaatgactcagaaagggttctgtttctcaactttttggaggagttcgagaaggattagtgttaattcatttctaaacgtttggtagaattcaccagcgaagtcatcagttcctgggcttttctttgttaggagagttttggttgctgattcaatcagaattgaatatcattactttttatagatctattcagatttattctttgttcttgagtcaactttgttggtttgtatgtttctaggaatttgtctgtttcatctaggttatccaattttttgacatatagctcttatacgaattctcttacaatcctttttattcctataaatcagtagtagtgtttttcatttctgattttagtaggtgagtattctttttccttaatctagataaagctttgtcaactttgttgatctcttcaaagaactaattttttgtttcattgattctattggttttctattctctatttcatttatttttgctctaatccttattatttccttcctctttatggcttcaaactcaattgaacataaagtattaagaaatttgacttttttctcaaatgtctaaaatgtaacaagaaatatgtctagagtcatcaaaaagcagcctgtttgtcagatttactgtttaatccatgtaaacagctttcatataattcatgatagaatattactatgtgctttggaagacactgaaggaaagacaaaaggtcattgggcagaaccaccctagattgactgttaaggccatcttctagtttgcaggacttgtggtagacagacagaataatatcctggacctcttgggtgtatacaggacaaactgaaataaactctcatttttagatcataatgtcatcatgaaacatatcaattcggtctatttctgaagaaaacaagcacaatgataaagtttgaatgtttgtctcctccaaatctcatgctgacatttgatccccaatgttggaggtggggcgcactgggaggtgttttggttacgggggcagatccctcatgaatggcttggtgctgtcttcatgggattatgttctcactcctacttcctgtgagatcttattgttaaaaagaatctgataccttcctcccctctcttgctctcttcctccctgatcatgtgacacacgggttcccctttgccttccaccacgatggaggcttcctgaggccctcaacagaagcagatgctggtgccatgcttctcgtacagcctgcagaattgtgtgagccaaataaacctcttttccttatatattacccagcctcaggtatttgtttatagcaataaaaacagactgagacacatgatgaagaccctttgatatcctataaatattgatttctctccctgagagaagagcatgaatctaagtgatgccattactctaatgtgaattccacaactcttctcaaagatgtggcccatatgttcctaataatggctttctaagaatctgttctgaaggggtaccttctctctgattttcatttgcatttcctgcttagcttacacacttcaccttgcctatccacctgtcctgaccccaataacctccatcatcagacatctcatcttacctacctactttctacttttcccagtccttcccgtgcttcataaaccatgatcatgagctagagacacaaggtcatagctaaggagttgggatcagaaaatcaccttctgtgattttccattattctcaatacgtaacttcaacaaaatcaagaaaatcatgaaaggacatcctaaggggtcaggtgaggttgcagtggggttagtcggtcaatagtttctttatgccaattaggatttctgcagaaaacaatgaaacactggtttaaacagtaaaaatattttaattccttacagaagcccatggaacatacactccaggtttaattcatcagctcaatagcatcatcaacgacttaggttctttccactttctgcttgtcatctgtgttggctttattttcaagctagctcctccctggttgcaagataattgcagcaggtttagttatcatattcggacatgctaacgcccaggctagtgatcccttccttacatttctttctcattttaagaacaaagtgtttaaaaaattatacttaaaattattggcatctctgtcaattgaaagatgtcaatctctttcatttttcctaatcactaataacatctactaaaaacaaaatgtctgtgtaaataatttatttgaataaaattaaagttgttgagtgaaa

SEQ ID NO: 63182 - DNA, 1380 bp, Homo sapiens
agccgcaaacccagcggagggcgggaagaaggaggaggcctctagggtggtcgggggactgggggccccgccggcagaggtccctcggcctcctgactgactgactgcggccgcctccggccaggacgctgggagctgcctgacgggaaggtgcggggagcggagccatggcctccggtgcgtataacccgtatatagagataattgaacaacccaggcagaggggaatgcgttttagatacaaatgtgaagggcgatcagcaggcagcattccaggggagcacagcacagacaacaaccgaacatacccttctatccagattatgaactattatggaaaaggaaaagttgagaattacattagtaacaaaagaatgacccatataaacctcatcctcatgatttagttggaaaagactgcagagaccggctactatgaagcagaatttggacaagaaccgcagaccttttgtttttccaaaattttgggtattcgatgtgtgaagaaaaaagaagtaaaagaggctgataattacaaggaataaaggcaggaatcaatccattcgatgtcccctgaaaacagctgaatgatattgaagattgtgacctcgatgtggtgagactgtggtttcgagtttttctccctgatggacatggtaatttgagcgactgctcttcctcctgtgtgtctcgagcccaatttatgacaaccgtgctccaaatactgcagaattaagggtctgtcgtgtaaacaagaattgtggaagtgtcagaggaggagatgaaatatttctactttgtgacaaagttcagaaagatgacatagaagttcgttttgtgttgaacgattgggaagcaaaaggcatcttttcacaagctgatgtacaccgtcaagtagccattgttttcaaaactccaccatattgcaaagctatcacagaacccgtaacagtaaaaatgcagttgcggagaccttctgaccaggaagttagtgaatctatggattttagatatctgccagatgaaaaagatacttacggcaataaagcaaagaaacaaaagacaactctgcttttccagaaactgtgccaggatcacgttaattttcctgagagaccaagacctggtctcctcggttcaattggagaaggaagatacttcaaaaaagaaccaaacttgttttctcatgatgcagttgtgagagaaatgcctacaggggtttcaagtcaagcagaatcctactatccctcacctgggcccatctcaagtggattgtcacatcatgcctcaatggcacctctgccttcttcaagctggtcatcagtggcccaccccacccacgaaatcgtcgacccgggaagtccggtcggaccgagtctt

SEQ ID NO: 63183 - DNA, 4887 bp, Homo sapiens
gtgtcatggcgctctccatctaaagtctgtgcagcttccggagagtggcgggttgattttctcactttggactggtttttacttcccgacttctggactcatctttcaagaggactttagactaattgcagataattaagagaatatgccttctgcatcctgtgatacactactggatgacatcgaagatatcgtgtctcaggaagcacagacaaggttgtgtttgacagagaaaggggctttcttggtgagataaaatagtctcttcctgtatttctctcctttctccttttttagttgctctgggaaaggaattctctctggtcatgcagatggtaccatcgttaggtatttctttgatgatgaaggctctggagagtcacaggagaagttggttaaccacccgtgtccaccctatgccttggcatgggcaaccaatagcatcgtggctgcaggctgtgatcggaaaattgtagcctatggaaaagaaggtcacatgctacaaacttttgattatagccgtgaccctcaggagcgggagttcaccacagctgtatcaagtcctgggggccagtctgttgtgctaggaagttatgacaggcttcgggtgttcaactggatccctcgaagaagcatctgggaagaggcaaagcccaaggagattaccaatttatacaccatcactgccttggcctggaagcgggatggctcacggctctgtgtgggcacactatgtggtggggtggaacagtttgactgctgcctccgaaggagtatttacaagaacaagtttgagttgacgtatgtgggacctagccaggtgattgtgaagaacctgtcatcaggaacccgagtggtgctcaagtcacactatggctatgaggtggaagaggtgaaaatcctaggaaaggaacgttacttggtggctcacacatcagaaacactgctgctgggggacctgaacactaatcggcttagtgagatagcctggcaaggatctggtggcaatgagaagtatttctttgaaaatgagaatgtatgcatgatcttcaatgccggagagctaaccctggtggaatatgggaataatgacaccctgggttctgtacgcactgaattcatgaacccccacctcatcagtgttcgtattaatgagaggtgtcagcgaggaacagaagataataagaaattggcttatcttattgatattaagactattgctatagtggatctgattggtggctacaacattggcaccgtcagccatgagagccgtgtggattggctggaacttaatgagactggacacaagctcctcttcagggaccggaaacttcgtttgcatctgtatgatattgaaagctgctctaagacaatgatcctcaacttctgctcctatatgcagtgggtcccaggaagtgacgtgctggtagctcagaaccgaaacagtctgtgtgtatggtacaacattgaggcacctgagagagtcaccatgttcactattaggggtgatgttataggtctggagcggggcgggggaaagaccgaggtgatggtgatggaaggtgtgactactgttgcctacacattggatgagggcctcatcgagtttggaacagccattgatgatggcaactacatccgggcaacagccttcttagagactctggaaatgaccccagaaacagaggcaatgtggaaaaccttgagtaaactggcactagaggcaaggcaactacacattgcggagaggtgcttttctgctttgggccaagtagcaaaagctcgattcctgcatgagaccaatgagattgcagatcaagtatcccgggaatatggcggagaaggaacagacttttatcaggtccgagcacgtctagccatgctggaaaagaactacaaactggctgaaatgatctttttggaacagaatgctgtggaggaggccatgggcatgtaccaggagctacaccgttgggatgagtgtatcgctgtggctgaagccaaggggcacccagccctggagaagctacgtcgtagttactaccagtggctgatggacacacagcaagaggagcgagcaggtgaactacaggagagccaaggggatgggctagcagccatcagcctctacctcaaagctgggctccctgccaaagctgctcggctggtgctgacccgagaggaactgctagccaacacagagctggtagaacacatcactgcagcccttatcaagggggaactctacgaaagggcaggtgatctctttgagaagattcacaatccacagaaggccctggagtgctaccgtaaaggcaacgcattcatgaaagcggtagagctggctcgattggccttcccagtggaggtggtgaaactagaggaggcatggggggaccacctggtgcagcagaagcagcttgatgcagccattaatcactacatcgaagccaggtgctccattaaggcaattgaggccgccctgggtgcccgccagtggaagaaggcaatttatatattagatctacaggaccggaacactgcatccaaatactatcctctcgtggcccaacactatgcatccctgcaggagtatgagattgctgaggagctctatactaagggagatcggacaaaagatgccatagacatgtacacccaggctggtcgttgggaacaagcccacaagctggcgatgaaatgcatgagaccagaagatgtgtcagtgctatacatcactcaggcccaggaaatggagaagcagggcaagtaccgtgaggctgaaaggctatatgtgacagtacaagagcctgatcttgccatcaccatgtacaaaaagcacaagttgtatgatgacatgatccgcctggtagggaagcaccatccagatctcctcagtgatacacacctacatctgggcaaggagctggaggctgaaggccgactacaggaggctgagtaccactacctcgaggcccaggaatggaaggcaacagtgaacatgtaccgggccagtgggctttgggaagaggcctacagggtggccagaactcaaggaggggctaatgcccacaaacacgtggcctatctgtgggcaaagagcctgggaggagaggctgcagttagactgcttaataagctgggactcctggaagctgctgttgaccacgctgcagacaattgctcctttgaatttgcgtttgaactctctcggctggccctcaagcacaaaacccccgaggttcatctcaaatatgctatgttcctggaggatgagggtaaattcgaagaggctgaagctgaattcatcagagctggtaaacccaaggaggcagtcctcatgtttgtccataaccaggattgggaggcagctcagcgtgtggctgaggctcacgaccctgacagtgtcgccgaggtgcttgtgggacaggcccggggggccttggaggagaaggactttcagaaagcagaagggctgctgctccgggcccagagaccaggcctggccctcaattattataaggaggctggattatggagtgacgctctgcgcatctgcaaggactatgtgcccagccagctggaggctctgcaggaagaatatgagcgggaagctactaagaagggggccaggggtgtggagggatttgtggaacaagctcgacactgggagcaggctggagagtacagccgtgccgtggactgctacctcaaagtgcgagactctggaaacagcggcctggcggagaagtgctggatgaaggcagctgaactctccatcaagtttctgcctccccaacgtaatatggaagtcgttctggctgtaggaccccagctgattggaattggaaagcacagtgcagctgcagagctctatctgaatctggaccttgtcaaggaagcaatcgatgctttcatcgagggtgaggagtggaacaaggcgaagcgtgtagctaaggagttagatcccaggtaagcttgtaaccccttcttactgcgaaattctcttttacttccttttgtaaagactgggagaaagtcttaccgggagggttggtattctggaacatgaagatggagctctctgaacatcttcacaggtatgaagactatgtggaccagcattataaagagttcctcaagaatcagggcaaagtggactcgctggtgggtgtggatgtgatagctgctttggacctgtatgtggagcagggccagtgggacaagtgcattgaaacagctaccaagcagaactacaagattctgcacaagtatgtggctttgtatgcaactcacttgatccgggagggtagctctgcccaggcattggccctgtatgtacagcacggagcccctgctaacccacagaacttcaatatctacaaaaggatcttcactgacatggtgagctctcctggaaccaactgtgccgaggcctatcatagctgggctgatcttcgagatgtcctcttcaacctgtgtgaaaacctggtgaagtccagtgaggcaaactctccagcccatgaggagttcaagacgatgctgctgatcgctcattactatgccacgcgctctgcagcccagagtgtcaaacagctggaaaccgtggctgccaggctttctgtttcactcttgcgtcacacccagctactacctgtagacaaagccttctatgaagcaggcattgctgccaaggcagttggctgggataacatggcattcatcttcctcaatcgctttttggacctgaccgatgcaatcgaggaagggactctagatggccttgaccactctgattttcaggatacagacattccctttgaggtgccactcccagctaagcagcatgtaccggaggctgagagagaagaggttcgagactgg

SEQ ID NO: 63184 - DNA, 513 bp, Homo sapiens
acagggcgatggcaggttcgccgggtgtgaggcttcacagcggtccggtgaccaagtcgaggatttttctggtggtctagtctcagagattacatctgtagtcagcacaatgattcccttccaagcccagtggtgcccagttgcctccaggtcccagacctttatgtggacaagaaaagcttacagaggaaatggtaattctccacttgcacactgaggtgtccagttgcagcccatggagatccagttcaattatgaatctcaggaacaccaccttctgtcagatggtgagaacaagaccaagattggaaagccagcttcagaggagggaattacagcaaaaattgaaccattgacagaatagtctagcagtctcataatgttctccaggattctgaaggcaaagaattctgtgaatttggggataaattaaatgaaaaagatcataacgtctttaaaaggagacctcataactgtgactaatatgggcaaagctatgttatgagtacacgc

SEQ ID NO: 63185 - DNA, 548 bp, Homo sapiens
  misc_feature (1)...(548): n = a,t,c or g
cgcaggtccatgtctaaactaatcagcaaaattcattccattggacacagtgattagcttgtggttgtgcacatgaaccaatttggatcaatgagaacctgaccctgacttttagtgtactgttggggtgaggtgtactgtctttcctacagaacacaaacttccagctgtagaaagtcatctcatagtgtcaagaagtgagtctgtcatcaacaaaatataggcaaaccaaatctgggaacatataaaaagataatacatcatgaagaagtgggatttattctaggaatgcaaggttggctcaacataagaaaagcaacaactgaaatataccatattaatagaataaggacaaaaaccacatgatcatcttaactgttaggaaaaagcatttgacaaaatctaacattatttcatattaaaaacactcgacaaactaggaatataagggaacttttttaatttgatgaaaaaaatccatgaatatcacacagccaacataaacttaatggtaaaagactgaaagccttccccctaacattnggaac

SEQ ID NO: 63186 - DNA, 1728 bp, Homo sapiens
gccctgcggggacgcccagcgcagcccagccccgcgcagcccagccctgccctgccctgccctgccctgccctgcgcccggggcgcgcccaccgcgccgcatccatgttcgacaccacaccccactctggccggagcacgccaagcagctccccatcgctccggaaacggctgcagctcctgcccccaagccggcccccacctgagccagaaccaggcaccatggtggagaagggatcagatagctcctcagagaagggtggggtgcctgggacccccagcacccagagcctaggcagccggaacttcatccgcaacagcaagaagatgcagagctggtacagtatgctgagccccacttataagcagcgtaatgaggacttccggaaactgttcagcaaactccccgaagcagaacgcctcattgtggattactcctgcgccctgcagcgtgagatcctgctccagggccgcctctacctctctgagaactggatctgcttctacagcaacatcttccgctgggagaccacgatctccatccagctgaaggaagtgacatgtctgaagaaggaaaagacggccaagctgatccccaacgccatccagatctgcacggagagcgagaagcatttcttcacttcctttggggcccgtgaccgctgcttcctcctcatcttccgcctctggcagaatgcactgcttgaaaagacgctgagtccccgcgagctctggcacctggtgcatcagtgctacggctcagagctgggcctcaccagtgaggatgaggactatgtctcccccttgcagctgaacggtctggggacccccaaggaagtgggagatgtgatcgccctgagcgacatcacctcctcgggggcagctgaccgcagccaggagccaagcccagtgggttcgcgccgtggccatgtcacgcccaacctttcccgagccagcagcgacgcagaccatggggcagaggaggacaaggaggagcaggtagacagccagccagacgcctcctccagccagacagtgaccccggtggctgaacccccgagcacagagcccacccagcctgacgggcccaccaccctgggccccttggatctgctgcccagtgaggagctattgacagacacaagtaactcctcttcatccactggggaggaagcggacttggctgccctgcttcccgacctctccggccgcctcctcatcaactctgtcttccatgtgggcgctgagcggctccagcagatgctcttctcggactcgcccttcctccagggcttcctacagcagtgcaagttcacagacgtgacgctgagcccctggagtggggacagcaagtgccaccagcgccgggtgctgacgtacaccatccccatcagcaacccactgggccccaagagcgcctccgtggtggagacacagacgctgttccggcgcggcccccaggccggcgggtgtgtggtggactccgaggtgctgacgcagggcatcccctaccaggactacttctacactgcccaccgctactgcatcctgggtctggcccggaacaaggcgcggctccggtgagtggtggctgggcccctccacccgatgccctggtggccccagggcctcctgtccactcctcatgtcagcagcagagccttggttcccaccctggtggaggaacagaagcgtggggttcctgaggcccttgtcctccgaatagtgg

SEQ ID NO: 63187 - DNA, 386 bp, Homo sapiens
gaacaaataagacagtaaatctagaaaacaagtagcaaaatagcaaatataaacccaccgtgtcaataaagtgaatatctaaacatgccaaaccaaaggcagattctgttaagctggatcttctgtgcgtgagagacacaccttaaattcaaaaacacaaacagattgaaagacaaaggatggaaaaggataaaccatactaacagtaaccacgaaagagctggagtggcaatattaaatatcagacaaaatggatattaagatagatttactaggatctgacacatgtttcatagtgatagtacaggggtagctgtaacagttacaaatgtatatgcactaataatgacctcaaaatataggaaacaaaactgaactgaattgaa

SEQ ID NO: 63188 - DNA, 447 bp, Homo sapiens
ttgagtttctcaccattacttatgatgttaactatatgttttgtttgtagatgttcctaagtttaggaagttttcttattttgtcaaattctttttctgcatttattgatatgatcatgtgatttttcttctttaggctatgggtgtgatggattacattaatttgttttctaatgttgaaccaaccccacataccttagctaaatctcacttggccatggtgtataattcttttcatacgttatcggattcaatttgctgatattttgttaaggatttctgcatgtctgtccatgagagattggtctatagggtttattttccttgtaatgtctgttttgttttagtattagggtaattctagcctcattgaatgagttaggaagtattccctctgcttttatattctgaaagagatttcagagaattggtataatttcttccttt

SEQ ID NO: 63189 - DNA, 1140 bp, Homo sapiens
ttttttttttttaaaaaatcaataaacatttatttgatacagtcattttaatacatacagtgatggcccgtccccacgccactcgggaccagggcgcggggcggggacgaggaccggggacagatggtcacaaggcgggcggggcccgaactcaccgttgaaacatctcgcaaataaacactttgtagatagaatatatatgtatatatatatggttacaagtgatagctggaacctctttcaaaatgcacttatgtactgagaactggcattaaaaaacccaaaccaagaaacccaaagcacgggacgcccggccgcgaggcaggggaaagcctggggccccagacccgggcctgggggagccgcctggggccccgccaaacgcggcacacggggacggcccctcccggggtcaggctcactggctccttcccttcagcgccaccaggcaggagggccaacggtcacacaggaggcaccctcacctgcctttgcaccagcaaataaagtgcatcccattttcgtgtgagcgtcggcccggtgagtcagcccttccgggccctttcctgttctcagggcagggggcgtgcgctgagccagaggtagatctgcagaaagggccccgactgggcctcgggcagggccggcgcccaccacactctgggggtcagctatgctggtccctctcactgagggctcctggaggcctatgtgggccagcgtagggagtgggcagaccctgctgagctccacccagggccccaccccttgggaggagggctctgcggaccagcatgtggcagagggagggcagaaaggagggggtcagacccaacagccacttctggcagtagcccccacgcctaccttaaagacaaagggggttaaagtgttaaacatcaaggtatccaggactcctcttcccacaccagggattatctgtgggctttgggagtgtcccggaaactcacccccagcaaaaaccagaccctcttctcttctccccaagggccaagtacctgagaggctggggcaggcaccacaccctgcaggtgttcaggtccaccctcctcccgccattggtggcaaggacaaagtgcacctaggcccacgcccagtgcctgctcccctcccctcccc

SEQ ID NO: 63190 - DNA, 530 bp, Homo sapiens
ttgaagtcctcagctattattatactgaagtctgtctctccctttagatttaataatatttgctttatacatctgagtgctctggtgtagggtgcagatgtatgtagaagtgttatagcctcttgatgaattaatccctttgttattatataatgactctctttgtcttttactgtttttgacttaaagtctgttttatctgatataggtatagctagtcctgcttgcttttggtttttatttgcatggaatatcttttttcatccctgtactttaagtctatatgtgtctgtacaggtgcgatgagcttcttgtacacagcatatagttgagtaatgtttttttaaatccattcagccagtctctgtctttccagtggaaagtttaattcatttacattcagggttgctattgatatgtgagggcttattcctgtcactttattaaataatttctggttttgtatatcctttgtttccttctttcttattgtttataattgtggtttggtgggactcaaacgttaccac

SEQ ID NO: 63191 - DNA, 3106 bp, Homo sapiens
ttttttttttttccttttcacctcctggagtcctggacttccccacatctcccctgcccctcccacgtttccatagtccaagggccagagtaaatgaaaatacagcagccgcccaagcaatggggcccatgctggggcttcagtcatcagcatcttcactggagtctgagttagctggcatcataggatcatcaatgagtgagaagtccctttctgagctatcatagccctgagataagtcatcatcatcttcttcatcctcatcgtcatcctcctcaggttgcagtggtggcaaccgcaaggtagtaccagaggcggtagtcactggtgaagaggggtagccaggggctctcaagcctggatggtgatggtggtgatggtgggggtgggggtggtggtggtggtgatgaagcatggtgctggagtctacatgaggggatgatggtgcaccacccatcacaaatggcataaaaggcaaagatgcagaagtggcactgctgtgacccaaagatgacacagactgtaggccactactgctgtgttggaacgtgttatgcagagatagagacccagtgcttccaccctgcatgagggccatcatcttagaaaggtctggtcgcatcctacgggcccgcttcttgctgctctctggtgcaataggccctggcaaaacccggttgaacaccgtttcagtgtgatgaccctttttcccatttctagagttagctgtctgtactggttccattcccaaacagttcaattctgccttattattttttttacatctttgccacttctgttttctgcgatcctccatatacgctagaaatcggggatcaacagcaaactctggatgaccctgtaaccacatctccagttcagcccggcgaggggcatcctcacccaccagcaaagtaccatccaccttattgatgacagggatccgggtctccaggtccacatcaaggtgattaggctcttccatgcactccacctccagctctactagcttctttctgttccccttcttcttatgaaacagtggatgtccatctcccattactccattcgccatcaacttgtgcttctggaatgttaacttcaatccttcctcatctttgatttgaactgtaaactccttttcatccatgcctcggcgaagtttggtgaactgggctgccgctgtgctgactgcagatgcttcctcctctgccatggaagctgcactactacttcgtggtgtggggactggagagtcaccatattctccaggagtcaatgagggactgtctaataaatggttgcctggggccaaaattcctcctgttaccatttcctggctcctacggctagaaggccacttccctgagagtacagcctggcagacgaggtcaatacggtttatcaggacacgatccttggccctgcagaacgtggggaccggcgaaggcggcgttgtgaagcagccttcaagctgaaagaaattgcacggcgggagaaacaacaacgatggacaaggcgtgaacaaactgatttttatcgagtggtgtctacgtttggtgtggaatatgaccctgacaccatgcagttccattgggatcgcttccgcacttttgctcgactagacaaaaagacagatgaaagccttaccaagtacttccatggctttgtggccatgtgccgccaagtatgccgccttcccccagcagctggagatgaaccccccgaccctaacctgttcattgagcccatcactgaggagagagcctcacggactctctaccgtatagaattgcttcggcgcttacgggaacaagttttatgccacccccttttggaagatcggctggcattgtgtcagcctcctggtcctgaattgcccaaatggtgggagcctgttcggcatgatggggagcttctaagaggggcagcccgccatggggtgagccaaacagactgcaacatcatgcaggacccagacttctcttttctggctgcccgtatgaattatatgcagaaccatcaagcaggagcaccagctccatccttgtcacgctgctctactccactgctgcaccagcagtatacctcacgcactgcctcaccactgcccctgcgcccagatgctcctgttgaaaagtcacccgaggagacagctacccaggtccccagtctggagagtctgactttaaagctagagcacgaggtggtggtcaggagccgaccaaccccacaagactatgagatgcgagtatccccctctgatactacccctctggtttcccggagtgttccaccagtcaaactggaggatgaggatgattcggactctgagctggacttgagcaagctgtcaccatcttcttcttcttcctcatcctcatccagctccagctccagcactgatgagagtgaggatgagaaggaagagaagctaactgaccagtcccgctcaaagctctatgatgaagagagtctcctgtccctcactatgtcccaagatggattcccaaatgaagatggagaacaaatgacccctgagcttctgctactgcagctgcagcctctatcttcatttgttctctcttgtagctgcgctgatacgctgttactagacgccgaagcctagctgttagggcagagcgaggccagaataaatggcctggctgttgggtcacctgggcttcatctccatcaatcactgagatctcctcatccatcatcatcaagggatcaccctcatcatcttggtcctttgggggaccttggagtggtttatattcaggatcttcacaatctttatcaaagtcaaccccttctactatgtcagagaagttatccaacactcgatgttctgctgcaattgctttgtcatctggtcggccagccttttctaggaaacataaggctgggtctgccctcatggtattatatttctcatagccatgtttaaagactccaatgagcagcgacttgtcagcctcactgtcccaccaagttgttggaacctccagttgatccactactgggaaccatatgtcaatctcactggcaatcgcaccccctaacaccttttctgcttggtctccaataacctcctgcctcc

SEQ ID NO: 63192 - DNA, 666 bp, Homo sapiens
  misc_feature (1)...(666): n = a,t,c or g
cggtggaattggcccaggatgacagctggtgaatggagtcagttttatccaagtatgaagatcagattactattttcactgactacctagaagaatatccagatacagatgagctggtatggatcttagggaagcagcatctccttaaaacagaaaaatctaagctgttgtctgatataagtgctcgtctatggtttacatacagaaggaaattttcaccaattggtggaacgggcccttcatcagatgctggttggggatgtatgctacgctgtggacagatgatgctggctcaagcccttatctgtagacacttgggaagggactggagctgggagaaacaaaaagaacaacccaaagaataccaacgcatcctacagtgcttcttagatagaaaagattgttgctactctatccatcaaatggcacaaatgggtgtaggagaagggaaatcaattggagaatgggttttgggaccaaatacagttggcacagggtgtttaaaaaaacctggcctttatttgacgaatgggaattcccttgggctggtttatgtttcaatgggataaccccagtgggtccattgnaagatttccaaaaaaattgtgccgtgtccttccccttgagtgctgacacagctgggttgacagggcctncccgattcct

SEQ ID NO: 63193 - DNA, 1433 bp, Homo sapiens
gcccctttcaggccccagcccctttgccatgggtagagcccaaactgggaacggtgaagagctgctcccttgattgatctgtcctcctctacatgggccccagctcctttcagaatatcagatgtccaacatttcccttctggctctttttagctcccaagtatctgcttccttaaaggccctgagtcacttcttctctctttgcttcagactggcccgggagcaagcgcgagtgtgcgaactgcagagtgggaaccagcagctggaggagcagcgggtggagctggtggaaagactgcaggccatgctgcaggcccactgggatgaggccaaccagctgctcagcaccactctcccgccgcccaaccctccagctcctcctgctggaccctccagccccgggcctcaggagcccgagaaggaggagaggagggtctggactatgcctcccatggccgtggccctgaagcctgtattgcagcagagccgggaagcaagggacgagctacctggagcgcctcctgttctttgcagttcctcctcagatcttagcctcctgttgggcccctcttttcagagccagcattctttccagcccctggagcccaaaccagacctcacttcatccacagctggggccttctctgcacttggggccttccatcccgatcatagggcagaaaggccattccctgaggaagatcctggacctgacggggagggcctcctaaagcaagggctgccgcctgctcagctggagggcctcaagaattttttgcaccagttgctggagacagtgccccagaacaatgagaacccttctgtcgacctgttgccccctaagtctggtcctctgactgtcccatcttgggaggaagcccctcaagtgccacgtattccaccgcctgtccacaaaaccaaagttcccttagccatggcatccagtcttttccgggtccctgagcctccctcctcccattcacaaggcagtggtcccagcagtggttccccagagagaggtggagatgggcttacattcccaaggcagctgatggaggtgtctcaactgttgcgactctaccaggctcggggctggggggctctgcctgctgaggatctcctgctctacctgaagaggctggaacacagcggcaggactgatggccgaggggataatgtccccagaaggaacacagactcccgcttgggtgagatcccccggaaagagattccctcccaggctgtccctcgccgccttgctacagcccccaagactgaaaaacctcccgcacggaagaaaagtgggcaccctgccccgagtagcatgaggagccgggggggagtctggagatgagcccccctaccctctctcctctttgttctctcattgttgttattttaataaatgctcagtagtctgaaaaaaaaaaaaa

SEQ ID NO: 63194 - DNA, 1406 bp, Homo sapiens
  misc_feature (1)...(1406): n = a,t,c or g
catgacatgcctacgccaagcttggcacgagggtcctaacgcgggaaacgtgcaccttgactaattcggttttctgtggctacgagagcaggcttggcgggcggaggcgccagcggatgtctcatgcaaggatcgtctctgtggctaagcctcactttccgctccgcccgggtgctctctagagcccggtttttcgagtggcagtctccagggctgccgaatacagcagcgatggagaacggcaccgggccctacggagaagaacgtccacgtgaagtccaggagacgacagtcaccgagggggctgccaaaatcgcctttcccagtgccaacgaggtcttttataacccggtgcaggaattcaatcgggacctgacatgtgctgtgatcaccgagtttgctcgcattcagcttggggccaaaggaatccagatcaaggttccaggagagaaggacacgcaaaaagtggtcgtggacttgtcagagcaagaggaggaaaaggttgaactgaaagagagtgaaaacctggcctcaggagaccaacctcgcacagcggccgtgggggagatctgtgaggaaggcctgcatgtgctggaaggcctggcagcttcaggcctacgttccattcgatttgccctagaggtgcctgggctcagatctgtggttgcaaacgatgcctccacccgggctgtggatctcatacgccggaatgtccagctcaatgacgtggcccacctggtacagccgagccaagcagatgcccggatgctgatgtaccagcaccagagggtgtcggagaggtttgacgtcatcgatctggacccctatgggcagcccagccaccttcctggatgcagctgtgcaggctgtgagtgaaggagggttgctgtgtgtgacctgcacagacatggcggtgttggcggggaacagcggggagacgtgctacagcaagtacggggccatggccctcaagagccgggcctgccacgagatggccctgagaatcgtcctgcacagcctggacctccgcgccaactgctaccagcgcttcgtggtgccgctgctcagcatcagcgctgacttctacgtgcgtgtttttgtccgtgtcttcaccggccaggccaaggtcaaggcctcagccaggtcagcccgggggcagagagcggtggtggattgagagaggagacaggaccttgccctgggggatctggggcttcttaagggacagagccagtctaagggaggagttggggtgtcgtggtcacgctgggaactcgtggccactggtaccccccacagcaagcaggcgctggtgttccagtgtgtgggctgcggagccttccaccttcagcgtctctgcaaaagcgtcaagagtccccagcggccggtgagccnagaagatggaa

SEQ ID NO: 63195 - DNA, 438 bp, Homo sapiens
  misc_feature (1)...(438): n = a,t,c or g
ctggagtttgactacatgtgccagtatgactatgttgaggttcgtgatggagacaaccgcgatggccagatcatcaagcgtgtctgtggcaacgagcggccagctcctatccagagcataggatcctcactccacgtcctcttccactccgatggctccaagaattttgacggtttccatgccatttatgaggagatcacagcatgctcctcatccccttgtttccatgacggcacgtgcgtccttgacaaggctggatcttacaagtgtgcctgcttggcaggctatactgggcagcgctgtgaaaatctccttgaagaaagaaactgctcagaccctgggggcccagtcaatgggtaccagaaaataacagggggccctgggcttatcaaccgacgccatgctaaattggcacccgggtggctttctttttgacan

SEQ ID NO: 63196 - DNA, 1094 bp, Homo sapiens
cccacgcgtccgcctttggcttctggcgaagggtgtctggaattcagcctgggtgcctggaatcctcaaagtacactcctggtttccatccactggctcctggttttggtgtatcttctggtggcgtttgagctcaaactggtcccggaagctcttcccacacacagagcatgaatggggccggtaacccagatggacgcggcggtgacaacttagtccagaagcatcacagtaggtcttgtcacagagcgtgcaacagaagggcctctccccaagatgcatgcgtctgtgatagctgagggacttggggctccgaaacaacttcccacactgactgcagctgttagtcagcttgggattgtgaacaaactggtggctatagaggtaggagcgcctgctgaaacatttgccacaggtgtagcaaaaaaaagggtggcccagcctgggatgcttgaagcacccgggtcctgtccatagtcccagctggggcagatagggggcactggccggcccctctgcatgcaaggaagaccttgtcatcactagtcccctcatctctcagactgggatgttgttctcgaagctctttcttcttgccttctgaaaggccttctgtgtttgggagatggacaaactctctccactgttcctcttcttgctcaagcttggtgattagctctggcttatgcagaaagattctggctggttctcaggagtgacttagtaaatatttgtttgatgaatggaaaaatttgcatattttgagaacactgtcatcatgttacaagagttatctttgccttcatgcaggctatcatttcttctctttaccactgagcttagtgactcagatctttcacacccacagatgttagattcttaaggtttccgacataacatccctggaaaggaccctctggctggcatctagacaggcccactctttctgggtgaaattaattggcccaatcttcaagggggctggcttttttttcacccggggcctccttcagaaatttctctttatggcttccgggcgggagggggttaacttggcccaccctggggaacgacttttgttcaggttcaatggg

SEQ ID NO: 63197 - DNA, 796 bp, Homo sapiens
  misc_feature (1)...(796): n = a,t,c or g
ccctggttctggtggaggaggttgtcctcggttctggtagaggaggttgccaggcatccccggttctggtggaggaggttgccaggcgtcctcggttctggtggaggaggttgccaggcgtcctcggttctggtggaggaggttgcgaggcgcccctggttctgggggaggagcttgtccctggttctggtggaggaggttgtccccgcttctggtggaggaggttgccagttgtccccggttctggcggaggaggttgtcccccgtgctggtggaggaggttgcgaggcgtccccggttctggcggaggaggttgcctgtgttgcccgcacagcctcactgtgcctctacccgagggcacgtcctgccactttaggtgctgtggggacccccactcttagggtggtgtgtggtctccactcacattctcttcagcctcaggtttgtctgctcgcgggcgggccacagggccctgctgtcccaccccccatcgccagacattagaggcagatcgaagtgggaggctttgcgggatctcgtcagccccccaacaaggaagggctctgtggtgccccagaagcattttctcccccactcgggatcctcctcagaagctgggagcatgtgctacacagcctgcgggccctgaccaagaagacacgacaacacatannnnnnnnnnnnnnnnnnnnnnnnngaaaaacccttataggaaaaaangggntattggttggtgtggccaagaaaggagctcttttttggggtgaccatatttaaatcatgcgcgagtgactgc

SEQ ID NO: 63198 - DNA, 2443 bp, Homo sapiens
cccacgcgtccgatttagggggtataagtacagatttcttacatgcatatattgcatcgtggtgaagagggggcagttccttttgattgctgagtagtattccatggtatggatgtaccacagtttgcttaaccattcacccactaaaggacataagagttgttttcagttttttgccctaataaagctgctgtgaacattcatgtacaggtttttatgtgaacatacattttcattttctgggataaatgctcaaaagggcaactgttgggttgtatggtaaacacatatatttttgtaagaaactaccctactctttttccagagtggctctactttttacatacagccactcatacaattcagacagcaatgtatgattgatccagtttcttcacatcctcaccagcatttggtattactactattttttatcttaaccattcacatagatgtgtgtaatgataccacatgtggttttaatttgcatttccaatggctaatgatgttgagtatctttttgtgtgctaatttgccatctatgtatcctcttcggtgaaatgtcttcatgtcttttgtctattttctatttaggtcatttgttctttttactattgagttttgagaggttttttatatatcctagataaaattcctctgttagatatgtggttgcttgaatttttaacataacttctaccaaggaaaaataagtaaaatttccaacccttgcatggccagtcacttacttaattcctgtccttcagtgttccatctagagaattaagagatatgatgtataaaatagacatcgagggccattaagagagtaaatacttaaaaatacatgttatgaaagcaaagccaataatcactgtaggagtatgagttgcctaagggccaaaactaatgtaaataagagaaagtgtggatataaatgaccattgtttataaacagttatgaaaaatgctgtgacttgaaatctttcccacatctcccaagaaagtaggtaggagtttatcctttccgtaatctctttttaaccctgctgactattacagggcttgtttaatcacagtggcaagaattacatgtatcttacagtaaagaaacagaatactggaatcgttagagaaccctgatgtgttgacctggataaagtacaaaggtggaagagggaatgagttatgctgttaaaatctcaggctattctgttaatgttcctgctactatgaacccaaactttttttttcccccttttgactccttgtgtcttcctctcctgtggcataaaagtagttctgtcgttaacttgtacaacattgccatctgctgttgagaattggtaggtactgcttctgagaacctggctgcagatccttagcataggcagcaaatgttgagaaagtctatctgtagtattacatatactaagttacagaggatgcattcaagtagagaaaataatatgtgggttaagatacatccttaaacttttttttttgggggggggggggacggagcttgctgcaacgccccaggctggagtgcaatggcactatctcagctcgctgcaaccttcacctcctgggttcaagcaattctcctgcctcagcctcctgagtagctgggaatataggtgcacaccaccatgcctggctaatttttgtattttcagtagaagcagagtttcaccatattggccaggttggtctcgaactcctgacctcaagtgatctgcctgcctcagcctcccaaagtgctgggattacacgcgtgagccaccacacccagcctccatctttaaacttttaaatgtgaaatttctatcatgtaccgttagcctaacaagattttctttcctatttctgactggtgcctttcccctttttaggagcaacgaaagctactctcttagttatgttcttgtgatgtgacaaaatgtcaagaagataggagaagagaatattttatttcgttgatgcttttgttcccaagtgtgaccctaaacttaagctttgtaggagttgacattctttcatgtcccttccctttactcatgccgaaactatcaactgggacattttgtgcttttggtttaaaagttaattgatattatactttggttttatctaaaaagtaaatgtatttgcctttgacaaaagactgacacaagagcaaataagctttaaaatcgggtgttatgtgctttcctccatttttgagcatattatccaaaatggtctgtataatataaatgagaatgatgcagtttaagtaagccttgttataccattgtcatggacccctgtcataaagccatttcttggtttgtttgggaaagaggcatatgggatttatacagattcacttgtaaatgttggattggggatttttgtgtaaattttctcaaataaaggctagcagaaaccaaaaaaaaaa

SEQ ID NO: 63199 - DNA, 1397 bp, Homo sapiens
gcagtatgtgtgagcatgtgtgtgtgtgtatgtgtgtgtgggggggtgtaaaatgtgtttttcaaagtactgagaggttgatgggactgttcgattagctcctctgagaagaagagaaaaggttcttggacctctccctgtttcttccttagaataatttggatgggatttgtgatgcaggaaagcctaagggaaaaagaatattcattctgtgtggtgaaaattttttgaaaaaaaaattgccttcttcaaacaagggtgtcattctgatatttatgaggactgttgttctcactatgaaggcatctgttattgaaatgttccttgttttgctggtgactggagtacattcaaacaaagaaacggcaaagaagattaaaaggcccaagttcactgtgcctcagatcaactgcgatgtcaaagccggaaagatcatcgatcctgagttcattgtgaaatgtccagcaggatgccaagaccccaaataccatgtttatggcactgacgtgtatgcatcctactccagtgtgtgtggcgctgccgtacacagtggtgtgcttgataattcaggagggaaaatacttgttcggaaggttgctggacagtctggttacaaagggagttattccaacggtgtccaatcgttatccctaccacgatggagagaatcctttatcgtcttagaaaggtaaacccaaaaagggtgtaacctacccatcagctcttacatactcatcatcgaaaagtccagctgcccaagcaggtgagaccacaaaagcctatcagaggccacctattccagggacaactgcacagccggtcactctgatgcagcttctggctgtcactgtagctgtggccacccccaccaccttgccaaggccatccccttctgctgcttctaccaccagcatccccagaccacaatcagtgggccacaggagccaggagatggatctctggtccactgccacctacacaagcagccaaaacaggcccagagctgatccaggtatccaaaggcaagatccttcaggagctgccttccagaaacctgttggagcggatgtcagcctgggagagatggactcatggaaacctggatcggtccttttagatgaaggacttgttccaaaagaagaattgagcacacagtctttggagccagtatccctgggagatccaaactgcaaaattgacttgtcgtttttaattgatgggagcaccagcattggcaaacggcgattccgaatccagaagcagctcctggctgatgttgcccaagctcttgacattggccctgccggtccactgatgggtgttgtccagtatggaaaaaaccaaaactctcagctttatacctcaagacacgctcgaattctcgggccgggaattcc

SEQ ID NO: 63200 - DNA, 373 bp, Homo sapiens
ccgagcttgggtcatggcggcgccgggcgcgctgctggtgatgggcgtgagcggctcggggaaatccaccgtgggcgccctgctggcatctgagctgggatggaaattctatgatgctgatgattatcacccggaggaaaatcgaaggaagatgggaaaaggcataccgctcaatgaccaggaccggattccatggctctgtaacttgcatgacattttactaagctgtgactaccaggaaggcctgaggtcatttgtgagtgaacagatctatgggcaagtaccctaggtagccccacttaacagatgatgaactgacgctcagagagagatgtagcctcgggacagcgtgtggttctagcctgttcagccc

SEQ ID NO: 63201 - DNA, 1157 bp, Homo sapiens
ctggggaggaggggcggggggagaccgcgaaggtgaaggtggaggccgaccagtaggctgcagaccagggacatgggttagttaaggcggaggtacgaggccgacccggggagggggacggggtggggaaacggaggcaggggacagaagaggggagattgggggagagatgacagctgcagggatggttgtgagccgctagtgatggagagcagagggagagggccaggctccagactcccacacgcccacacagcacctctgccaggcctaggagaggacaggtgcagctcttgcagctctgcgggtgtgcggccaaaggcaaggcccacgggctggatgtcacttccccgactgtctcttggttggcttgtccttgtgcaagacccagcctgtcacgacagagcctgggcacttcagaggaggagccaggatcgaatggaaggggggaattggggtccaccatagtcttctgctctggtcctccacgggtggaccaggatggagtctcctgcctacctcactgcattgcactggacctgggatgcctatccaccctctggcagaagacactcaccaggttatctgtgaagagactctgggatcccatcacctcaaagccagagggtccccaagtcaccgctgagagcacttgagcctcaaggatgtaagcctgaccataggatcttgactccaacagcggcaacccccacccccattgtggtccgtccttaacccatccactcttcttcggaggcaactgagaacacataaagcaagcagctacctagcatccccctcctaaagctttagactcagagcccagggtcccccacaagcctcaaggtagcctcaggtttctctaatttcctccactcccagttcgaagcaaacagcttactgcctagtccccgccaatcccaagggcgggctggctgatggcagcatggtgggctggcctgggtgtggagtgaaagagtcactgtggtgggggcgagaggaggacttgggagctggaggtgtgacaccttcagttctgttcctattaaaggaccttctgaagggcttctctgtcggtcttgtattcggattgtccgctttggggagatgggggaggaggggcctcaccatggttttgccaccagcagtcagttgca

SEQ ID NO: 63202 - DNA, 1014 bp, Homo sapiens
ctcgtccaaaacacttgttccctgctgaaactccaacaatttgcagatacttctgggaaccccaggcgtcagtctcctcatctgtaaaggagagagaaccgatgacgtatcaggcataatccttgatgagagtttgctgcgtgcctactcagtgccaggcgctgggggacacagccgtgttcaggacagccttggtcctgttctccgggagccgacattccagggggagagaagtttcctgaagacttccatgctgcgttccctctgctcctgctcctggcgccatcctaggagccagccatgcacgcaagcgtcatgcctccagggctctgactgcccagcccctcaccgcaactccacctcagctgcacacacccttggcacatcctgaacctcattttcatgacggacacacaatttttgctctctcctgtccaagcctcatcctctggccgccacctccttccagctcacttcctttagtgcggccagtaccgcccctgcctaggcatgtcgacctgcagggacccttttctggctcttcgaggcctctgcccaccatcccctctttgttctccatagtcccttccccctgttctctctcgtttcatcttactggtctggcaaagtccccggccttgggcgagcccagacctcctcagtgcctgcacacagctgcccacagccagagaaatccatttaagcagactgcctgcatccttcttaacagtgcaaggcaggcactccctgccacaagagaccctgttccctagtagggcagcttttctcctccccagaacctcctgtctatccccacccaatgtctcctcacaggcatattggggaaacaggtcaggctctcccaccgtatctgcaagtgtactggcatccatctgtcttcttcctacccctacagtagaaacagtgtctgtccccagctgtgctctgatcccggctcctttcacctcagagcttggaaaattgagctgtccccactctctcctgcgcccattt

SEQ ID NO: 63203 - DNA, 1475 bp, Homo sapiens
gggttcaggctatcggtttgattctaagctgcggggactgacacagagtaggccacagttgttcaattaactttttaaaaggggcgcttgggcaaggttgggactcgaaagaaaagaaagaggcagcagcaggagagcatgcaggtgggcaagaatttggtctggagggttcagcagaggaagaggtgactggcagaggcagccaagtagaggcttttgagtccaggtagggaggaccttggggagggcgggtagaggccgaggaatctgcaggcgcagaggacagctgtgggctggatcccgcgggctcccagacagcgagggcagaggggatgggagccatggtggaggctggggggcttctagaaaagtggacgctgttggaagaagaggctgttggatggcaggagagagaacagagggaagacagtgaggggcggtgtggggactaccaccctgagggagaggcaccaaggctccttgatgcagagggtctcatggtgaccgggggccggagggcagaggccaaggagactgagccagaaagcctggaacatgtcaggggccaggaggagcagccaacacaccaggcccctgcagaagctgcgccggagtcagtcggggaagccgagacggctgaggccatgggcagtgccagaggaggtgctgccaacagctggagcgaggccccgctccccgggtccctcctagacgtctctgtcccaaggagtcgcgtgcacctctcgagaagctcctcacagcgtcgctcccggccctcttttcgtcggactccggcctgggagcagcaggaggagcccccagcccccaaccctcctgaggaggagctgtcagctcctgagcagagacccctccagctggaggaacccctggagccaagccctctgaggcatgatgggaccccggtgccagccaggagaaggcccctgggacacgggtttggcctcgcgcaccctggcatgatgcaggagctgcaagcccgtctgggccggcctaagccccagtgactgagacccggtgctctgggagccaggccctgagtgggtgccagaaggcttgctccaatgccactgagccctgctccctctgccactgtggacacatcctctccaccctctgggcctcagtgtcttgatgtatcattcatggagcaggcaaaaccagacgtctgggaagaccgtgaacttaaggagtctgattctccgacacaggctggtggaccacgtaccccactgagaccacctctcagggtgcctgccctggttcctccccagcctgagtcagctgtctggactgcaaggaggctgggcacgggggctcacgcctgtcaccccaaacctttgggaggcccaggtgggaggatcgcttgagacccggagtttgagaccagcctgggcagcatagcaagatccccatcttttaaaaacaaaataaaacaataaagactgcaaaaaaaa

SEQ ID NO: 63204 - DNA, 2855 bp, Homo sapiens
gctctgtgctcaacgtggttagcagcacaagaattgtgtgaacccgggaggcggaggttgcagtgagttgaggttgggccactccattccagcctgggagacagagtcttgctctgtctccaaaacaaacaaacaaacaaaaaaaccctgtagcttgggatcagccttctcttctattgtttttctttaaaaaataaaaattaaaaatagatgtagatgctatgttgctgaggctggcctcaaactcctggcctcaggtgatcctcccgccatgacctccaaaaccacagggattgtaggtgtgagcactgcacccagccttatgtttttttctacataaaaaacagcacaggattatcttccagagctaataaatatgttcaaataaccacaaccccattaaggaaaaatatcactgggcagcaaataatcaatccagaccaatatgatcacaattgctgtgaaggtgagaaaagttcatttttattatgtttccccaagagacgcactctattgttctcttgaaaacacacagctcatgtcctcctttagaacacacatcctctttaaagtaacatacaaacatgccaaaacaaggtaaaaaattacatctgaattctcacatttcaaacatatatgaaatatcaaataaaaatttatttttacaagaatttaggggaactactacatagctataaatgtaatatatatgttaactaagtatcatagataaaaaccatgctcccttcagcagcacgtgtaataatagatacaaagattgaaaggtaaaagatttaggatgaaaagaatcctctcttaaaaaggaaaacaaaattatatgtagtgtgtatatcaacagttataatatccatcacacagctttatagaaacagcatctattcaaaaataccagtatttccaaaatatttaaaataatatttaaagtaataataatatttaaataaataaatatatttaataaatatttcaataaataaaataatatttaaataattctatacccatgtttttcaaaataaaccaataaattagatagtatgtattagacgtgttagtatatatatctgagacatgttaaaaatcacaactgaattctcacaattcagtcacaaacctaaacagcaaataaaaatttctatcaccagaattatgtttttttctggtggggaactaccaatagctataaatagaagagattattatggaagtatcatagataaaaagagtgctcgcttcaggagcacatgtaataatacagaaacaaatttaaagataataaaatatttaggataaaaagaattgtctcttaaaaatgaaaagaaaattatctttatgtatatataacaactataactctcatcaaaaaactacaggaacagcatgttttcaaaagtacaacaatttccaaactatttgaaataaatctatgaataattcaatggccgacattttccatacaaaccaataaaatgcagagtgtgcatgaagctatctgttacaatctgtggcactgatatttcacaaaagaattctgtcccaatctgagcccctgcattgtgccttcaaatcctcctggactgcaagtccgtaagaaacaggacctccaggttccgccccagggaggttggaattcagcaatataaaaagggtggtggtgccgcaggaaagggtggaactggaaacgctcctggtttcttacttttctccaaggactcctagaaggaccccacccccctccccccacccctgctcctaggaggacaacgtgatcactgtattcagctccatcaagaatggtccaggttcttctagatgatctgcacaaatggttcctctcctcctgcctggtgtctgccattagcattggaataaagttcctgctgaaaatccacatctcccctgggtccggtgttctggaagcgagagagacaatgtcacacttcaaggaggcagctctctagacaggaaagttattcacgtcccatgtcaattgagaaatgcaattttatctgctgcctttcattctataccctgcttctgaaccatcgtgttcaactgtgaaactcacactttggtgaccacgactccaaaactcacttaatacacccaaggtcagccccagtgatctgcttcatagcaaggactttgggtgggtctgcccagggagtagggcaccctcagagaatgtggctttggactttatcacagctggggccttttgtgtcacttaagatctaaacttgtaaccatgctagatgtgttttctaatgtgacaacatcacgaaccacgagtccagaagcctaatccttaatcctacctcctcatgatgaagtctcatgctctgtgctcaacgtggttagctgcacaagatgtaaaccaaagcttcactgaaccctcgacccaaatcagtaactcaagtgcgtcaatcataatgaacctccccaaactcagtttttatgattatttttgaggcagggtctcactctgtcgcccagactggagtgcagtggcaggatcagggctccgtgcggccccgaccttccaggctccagcgatcctcccgcctcagcctcctgagtagttgggagtagagatgcgtcccacatcgcctggctaatttttgtatttttgtggagaggggatctcgccacgttgcccaggcttgaagccagatcaagcaattgggttccttggatttccgaaatagaccccaatattctgcctttaccccggaggttgcagtgagccaagattgggcccctccattccagcctgagagacacagcaacactcttgtcttgataaataaataaataaataaataactgtcaaa

SEQ ID NO: 63205 - DNA, 1232 bp, Homo sapiens
ggtcacgaggcttcgtagtggaggaacgggtttggcgtgtgggacgcagctgcctctgtactggggagtcacggagtggccgggctccagggacatggcggcggcctctgcggtgtcggtgctgctggtggcggcggagaggaaccggtggcatcgtctcccgagcctgctcctgccgccgaggacatgggtgtggaggcaaagaaccatgaagtacacaacagccacaggaagaaacattaccaaggtcctcattgcaaacagaggagaaattgcctgcagggtgatgcgcacagccaaaaaactgggtgtacagactgtggcggtttatagtgaggctgacagaaattccatgcatgtatgatatggcagatgaagcatattccatcggcccccgcttcctcccagcagagctacctatttatggagaaaatcattcaagtggccaagacctctgctgcgcaggctatccatccaggatgcggttttctctcagaaaacatggaatttgctgaactttgtaagcaagaaggaattatttttataggccctcctccatctgcaattagagacatgggtataaagagcacatccaaatccataatggctgctgctggagtacctgttgtggagggttatcatggtgaggaccaatcagaccagtgcctgaaggaacacgccaggagaattggctatcctgtcatgattaaagccgtccggggtggaggaggaaaaggaatgaggattgttagatcagaacaagaatttcaagaacagttagagtcagcacggagagaagctaagaagtctttcaatgatgatgctatgctgatcgagaagtttgtagacacaccgaggcatgtagaagtccaggtgtttggtgatcaccatggcaatgctgtgtacttgtttgaaagagactgtagtgtgcagaggcgacatcagaagatcattgaggaggccccagcgcctggtattaaatctgaagtaagaaaaaagctgggagaagctgcagtcagagctgctaaagctgtaaattatgttggagcagggactgtggagtttattatggactcaaaacataatttctgtttcatggagatgaatacaaggctgcaagtggaacatcctgttactgaatatctcgtataccagaaacatgactcttaaagatggtcgtgtgggcagcagatcgccaggcggcattgacaaaactgaggtacagccttcgt

SEQ ID NO: 63206 - DNA, 1237 bp, Homo sapiens
ggcgcgacagccttcagcctctccctctgcagttttggccggttcctttaacttgccttcatctggggctgtttggtatttccacgtgccttgggcccgcccactgcagcctccatcttggaagcggccgccggcgcctaaattgagcatttccacagaaattacagttttgtcctttttgaaaaaatagaactgtatttcagaaaaaagaaactacagttttagcatgcagaaaggaaaagggagaacaagccggatcagaagacgaaaactctgcggaagttctgaatcaagaggagtgaatgagagccacaagtctgaatttatagagctgaggaagtggctgaaagctaggaagtttcaagattcaaacttagcgcctgcttgttttccaggtacaggaagagggctgatgagtcaaacatccctgcaggagggacagatgattatttcgttgcctgagagttgcctgctcaccacggacacagtgattcgaagctacttaggggcatacattactaagtggaagcctcctccatctcctctgctggcgctgtgcacctttttagtttcagaaaagcatgctgggcaccgatctcttttggaagccttacctggagattttacccaaggcgtatacctgccctgtttgtttggagccggaagtggtgaaccttcttcccaaatctttaaaagcaaaggctgaagagcagagagcccacgtgcaggagttctttgcttcctccagagactttttctcttctctgcaagcctctgtttgcggaggctgttgacagcatcttcagcttacagtgccctgctgtgggcttggtgcaccggtcaacaccagagccggtgtacctgaggccccaggcagcgggaatgcctttctgcagagccggacacctgtgcaactcgctccgtacctggaccctgctgaatccatagccccacatgtcccaggtaaaagcagcggtttaatgaagaaactcattcttacgaaattagaacggacttcacgttggagaaagcatgaagaggtattcatctgttacggccctcacgataatcaacggctgttcctggaatacggatttgtttctgtccataatcctcatgcttgtgtttatgtctcaagaggttggaatcaactttgttcttaacattaacactatataatttttttccccatttggagatgtgtattttcacgttttaataaaaatatcaaaacctt

SEQ ID NO: 63207 - DNA, 1898 bp, Homo sapiens
ggccatgagccaggctgtggggctgccgccctggctgcaggacccggagctcatgctggttgaaatgttccttcttgcctatgctgtgcgccacaccatccaggtgtaccggctctccaagtacaacacggaagaattcatcacagtctaccccaccgacccacccaaggactggccagtggtaacgctcattgctgaggacgatcggcactataacatccccgtcagagtgtgtgaggagaccagtctatgagagacgcatgctcctgacagcctggcgacgtggcgaagatgcacaggtggctcctgggcttgggctgcaggtttgggggtctctaagaacaatctctgagaagaacccttgggcccctgggagccaagttggacaggatgtcctgaagactagcttttgataagagaaattaaccaagtctttcccctcatctatgatgcaatatatttcagtgggggccttcagagcacacctgttggacggtgcaaaccatatcttctccagaaggcaaatacttttgtatcagaggaaactcagttttggagaggaatatgttctttatatctcaaatcaaaactctctctaatggtaaactggcttctaatttttttaagtacagtatttttttttcccctttagtagtaacgggtttctatagatcttcctatacagtctgctttaactcaggaccttgagattatgagactgacgtgctgcccactgcactgagggggcttctaacagtctgctttaagtggtataattctgggatagatctgttactggcatagtcatgacaacctctggtaatcttaccttctcctttttatgaagggaagagcaatggtttggacttacatcttaattaaggctattttaagcagattgttttgcaacagattaagaattgggtcccaaagtgggttatttcaaggcatttttgaagactggaggagcgtaggagggagtggtgagggaacctagaacttcttgctccttgtgactatgacagatgtctgatgcccccagcgcactggagtctggggcttggtgcaggtggtgccccatcagtgtggacagacactacttgcctttgtggtttagtgttggaagctttaattattctacagttccatagattcacaattttatagccaaacagtttgtatccacctgctttcagaggaggaaccaaaggccaaattactttgaggtagggcttagctggacctgggttttcctatgctcttttcatgctgtgttggagggtgtgtccactgccagatctgtgtaacccgtctgggtcaggggatgagtgacagcaaaccatcttaaaatttttcatgagtacatttaagcggaagcatacgggaatatgagtgcaaaagtgtggctgagccgcgtatgcccttgattggttttgggaagcctgagggaggcagccttcctggctatgagccatcgcctgcccaatcaggctaagggtggtgactggggtggtgaaggggcagctctgctgagcatggtctgccttatggcctgaattgtcctcaaggggtgtggactgcagatggtgttcacatgaaccggagacatcactctttaggattctactggcagcccctgaattggctcaacgtttgtggaggtggtatttccctgaagtactgagctttgttttataataattaaaatccttatttggtccaatttaatatagtttagaagctattttttttgaggcaaaccgtttttgaaaatgtaaattttgtttttaattaaaaataaagccttagttaagaaaactcaggatgcacaaaactattcagactgttactttagctttctcccattacctcatcagtaatattcaccacattttgct

SEQ ID NO: 63208 - DNA, 1918 bp, Homo sapiens
tttcgtctgcccaaggcctccatggctgagcctggaggctcttggaacaggctccgcgcccaagctggcagacatgggtgctctctggagccgtcagagagggcagagagctcgtggtttatggtgtaaaggctgggagcttggagggggtcgtgtgtggggctggactctgaggcggccagaggcctaggaacgttatcctgggcacaccgtgcgtggtgtgcagtctgagtcatgctccctgggtagggcatccagctcccagcctgggagtgctgagagccaaatccaccgtagagcaggggtgagagtcagggtcccacctcctctatctgccggcaatccagtggtgacctagggtaaaagcttgagagtcccatacacacggtcatcccacgacatacctcacaggccaggcagggacacacagcccccttccctccctcccaggtaccgtcatagctgctagtgtgactgaaggcagtgtccctggccccagctgaagcaccgtagccagccagcgggctcacgcaccttggcctgttgctcctagggtcacttgtgccattcagccaaggggacgaccgtgcctgctggcccagctgagctccgcccagtgagcccaccccccattctcctgccactgactctcgctcttctgcttttcccagcaggaagggcccagcctcacctacgagacctgcagccccccgaccagctgaggctcccctcttagacttataagtctatggccactggcatccggctgcctgccctccctgcctcccccagggtcccttcagagggtcctgggctttctgaacacccagaggggcctccggcgctccctccagccatcccttttagtttcaccctcctggttcaagcagtgttctttctctatcaggcctggtggctgttgcatggggctccccaaggcaaggggtggccccaggccagtgggttggaagacagggtgaccagagaagagggaagcccgagggggccgagcatcagcctgaattgcgggtgccctgcctgggtgccgtgtgagaggccagcgtgtgtggggtgggaagggccgccacagcccccaggcgctatctgtgaagctacggctcctccctccatcttcctcccctttcccttccagccccttttccaggaaccttgccacacccacacctgcagcctcccctccccggccctcccaccactgctgcggcgcggccggccccggccgtgtgctgcgcttgccttaccagctctctcctcgcttttctctcccgttttctctctgctttctctccaactgccagccgatcgggtcaggcaagtccatcccgtcctgagagccccaggccccccttcgacctctaaacagatccctcctcttctcggagacctccctttccaagcctgcctggacggctgttctgtgacttgacagtggctcccccagccccaaagccagcccccttcatctgtgacttaatctgttgtagtggtgagctgatacattcaggtgtgaccgttggtgaaaacttgtgccccttctgtggtatgcccttgccctgttctataaatatctataaatactcatatatatacacacctacacatggccaaccgcctcgcctctagcgctgggaatcagtcactgtgctatccttgtggagtcttgtggcccaactaccagagaacgctgtcccccgacatcccactccaaagtgtgccacctccagtgagcctccttgtcatgcccggcctgtggacagccagcccccgccatccctcccaccccctaccaagcatgggggtgctgtgcaggcagccgtgtggcctgacagtttctaccagtcctgctgtccctcggctgagaataaaacccatttctggatgatggggaaaaaaaaaa

SEQ ID NO: 63209 - DNA, 1906 bp, Homo sapiens
ccacgctgttacaaaggggacatcatgggctgtggaatcatgttcccccgggactacattttggacagtgagggggacagtgatgacagttgtgacacagtgatcctgtctccgactgcccgggccgtccggaacgtgcggaatgtcatgtacctgcaccaggaaggggaagaggaagaggaggaagaggaagaggaagaggatggggaagagatagagccggagcatgagggcaggaaggtggtggttttcttcactcggaatggcaagatcattgggaagaaggatgctgttgttccttctggaggcttcttccccaccattggaatgctgagctgcggggagaaagtcaaagtagatctgcaccccttgagtggctagggcctcccctccagacctgctccttctccctgctcaccctctgctgggccaggcacccagttcctgacttcccagaggcttcgtttacccagcaggcccctggaggtgtgtagtcactctgcccccactggctcaggcccctgtcacgcttctctgtgcccacgtttctgacctggtgctgccactgttgtcagtccctgggcctgagtccctggttggacaggaatggacccaaagaatggtgttggtatgtgggtggtcccactcgctttggtcagtgggcttctgggtccccctttccctcaccggccctgtgtgggtggagaggcgtgagcaccctatctcagctgctattcgggcatgatgctttgtagagggtagagtagacagccccctcccctactcaccatggtatttctccttgaattcctctttcttgttttctttcctggttgtgtgaaccagttgctgctgtcatacccctggcagggccaggggacctctctttggtcatctctgtcctttcactggctgctgccccaggaagactcctctaggctctccatctttcccttgagagctggctccccaccccaacctgctcaggcaccacagaggatctaggtctctggctccccatacctggacccacatgggtgggtgcctgttgcatgtttaagagagaggggctgtgaggtgacagggcactagggccttcactcctttctccccttccatcctttctttaccagtgccacccatgtccctagctcccgggtattggggctgaggctctggggcctgtctccctgccagcgtgagggcaagaccccagagccttagctgagcaagcccagaggggcagcgtggcccctccctccccttttcctgccccgtcccatgcctcagcttgctgcttgtgccagttgcctgtttcgcttcagtgtttgattctagcacttacatgtgtcctccccaccaagccctctatctccttctaatccttcaacccctggccccctccccgtaacagtgacttttccagggaggaagaggcagcaggagctgttggccttggtttgcacagagcgggtagggctgtagggaaagcgggtgagctgttgtgctgctgggcctccctttggccctcgcttcccaccctacgatgtatgaaatgtatgtacagaccagagatgtttatacagccgataaagatggagtttccgtatttatcagtatggccggaaccaggagcctttctagtccactgggctaggaacaggactgctggatgggggcagccgaaggcagcttgctcatggggagatgtggaccaatgttgggccagggatgggaatcatatgttccatgggcctggctacaggcctgagcacagatacgtcccctgggagatgaggctttgaccttcctgtgaataagtgttgactccaatttcggctaaagtttatagaaattctttattattagacaaaaatagactctcttttttcccctaaaaaaaaaa

SEQ ID NO: 63210 - DNA, 413 bp, Homo sapiens
gggcacagctcgttgtagaaggtgtggtgccagatcttctccatgtcatcccagatggtgatgatgccatgcttgatagggtacttcagggtcaggatgtcgtgcttgctctgggcctcatggcccatgtaggagtccttctggcccatgcccaccatcacaccctggtgccggggtcacctgatgatggaggggaacacagctcaggggccatccatccccagcaaagccagctttgcacatgccagagccattgtcaatgatgagcgcggcgatctctatttccattgcaacctgtggaagagcagggcggtggagccatgggaagacacggtgtgggggctggtggcagcaagtgactgtattactggattttgaagttaacaattagccaaatactgatttttgatggg

SEQ ID NO: 63211 - DNA, 1981 bp, Homo sapiens
  misc_feature (1)...(1981): n = a,t,c or g
ctcccagcgtgctgggattataggcgtgagccaccacgcccggcctgtttcctttggtttaaagtggattcgaatcagtgttaaatcacaaaatcagggttttctaggaaattgggaattacttgccagaaaggaaactgaactatgcagaaggagttaagagctgggatgaggctggatggggtgactgaccgtccatatccttgaaacagattgggtcgtcggaaactggtccagatgaggctggatggggtgactgacagtctggatcattgaaactgattaagtcgtcagaaacgggtccagatgaggatgaggctgaggctggatggggtgactgacagtctggatcattgaaactgattgggtggttggtcagaaacgggtccagatgaggatgaggctggatggggtgactgacagtctggatcattgaaactgattgggtcgtcagaaactggtccagatgaggctgggtggggtgactgacagtttggatcattgaaactgattgggtggtcagaaactggtccagatgaggatgtggctggatggggtgactgacagtctggatcattgaaactgattgggtggtcagaaactggtccagatgaggatgtggctggatggggtgactgacagtctggatcattgaaactgattgggtggtgagaaatgggtccagatgaggatgaggctggatggggtgactgacagtctggatcattgaaactgattgggtggtgagaaatgggtccagatgaggatgaggctggatggggtgactgacagtctggatcattgaaactggtccactatgacgcagcaggggcagtttggcagagcatcctcttcccttgtccttgtgaaagaacacaggaaacatttgggttttacagcttttcacaccctactatcaggcatcagaatcaaaattagttactaaattgggtgaatttttggaaacctgcatttctatgcatctgctattccagaaaaaaatgggaatgtattacaggagagttacctcacagtgtcttatgttgtggaacctgaaacataaccacgtgttttcttatatgatcatttgtgttgatactgcttttatttgagtttatgaacagaaatagaaagtatggtgcttgggttttgccctttcttactcctgaaagttaaatcagaagacactgatttcattttgtgaaatttagctcagagactattgatcttttgtttcattaatatgaacaactattagtaaaaaatagctttaacagcatttctgctgatatctagtaatctattcttttaatgtgaaaataagataaaatgtcctggagctaattctagcttaaatttgccagtatttctgtatgtcattaagtttttttcctctaaggttgggtaataggaattttgttaatctttgcatacctgatgggcatctatgtccaatgctggattggggtaattattaaattctgtggctaattttaaaacttaatttgcctcttaaggtgattgtccccctgagtaatgattgtagttaaatgaagtatagcttgcaactatactatcacatgggtcgttaagtaaaaataaataaaccaaatttgtctgagacaggctaagatcaancctccctcatcaaccccaatttttcccctaagagcaatttcactttcagttttagggtggacattccttgaatgccctcaaattaaaccgttaccctatttaaccctcctgggaatagtctgtgaccaaaaaggagggtgtgatatatttaggtgtaaatatatcacatatatggtgtgatatatttgggatttatatattcagctcattctctgtgaagaagtcttcctgactaaaattggtttcaagataaactaatttctgttagtatttctactctgcctaccatgtatgcctttttgttagaaactaataaatgtatcagtcactagcaaaaaaaaaa

SEQ ID NO: 63212 - DNA, 2029 bp, Homo sapiens
gcggccgcctggagctctcggcctcggccttcgacgacggcaacttctcgctgctcatccgcgcggtggaggagacggacgcggggctgtacacctgcaacctgcaccatcactactgccacctctacgagagcctggccgtccgcctggaggtcaccgacggccgtgagtgcttcccccccgccccccagctcccgcccctcgaccctcgaccgccgccccggcccgcgcgccgctgaccgcgccccctccgcagccccggccacccccgactactgggacggcgagaaggaggtgctggcggtggcgcgcggcgcacccgcgcttctgacctgcgtgaaccgcgggcacgtgtggaccgaccggcacgtggaggaggctcaacaggtggtgcactgggaccggcagccgcccggggtcccgcacgaccgcgcggaccgcctgctggacctctacgcgtcgggcgagcgccgcgcctacgggcccctttttctgcgcgaccgcgtggctgtgggcgcggatgcctttgagcgcggtgacttctcactgcgtatcgagccgctggaggtcgccgacgagggcacctactcctgccacctgcaccaccattactgtggcctgcacgaacgccgcgtcttccacctgacggtcgccgaaccccacgcggagccgcccccccggggctctccgggcaacggctccagccacagcggcgccccaggcccagaccccacactggcgcgcggccacaacgtcatcaatgtcatcgtccccgagagccgagcccacttcttccagcagctgggctacgtgctggccacgctgctgctcttcatcctgctactggtcactgtcctcctggccgcccgcaggcgccgcggaggctacgaatactcggaccagaagtcgggaaagtcaaaggggaaggatgttaacttggcggagttcgctgtggctgcaggggaccagatgctttacaggagtgaggacatccagctagattacaaaaacaacatcctgaaggagagggcggagctggcccacagccccctgcctgccaagtacatcgacctagacaaagggttccggaaggagaactgcaaatagggaggccctgggctcctggctgggccagcagctgcacctctcctgtctgtgctcctcggggcatctcctgatgctccggggctcaccccccttccagcggctggtcccgctttcctggaatttggcctgggcgtatgcagaggccgcctccacacccctcccccaggggcttggtggcagcatagcccccacccctgcggcctttgctcacgggtggccctgcccacccctggcacaaccaaaatcccactgatgcccatcatgccctcagacccttctgggctctgcccgctgggggcctgaagacattcctggaggacactcccatcagaacctggcagccccaaaactggggtcagcctcagggcaggagtcccactcctccagggctctgctcgtccggggctgggagatgttcctggaggaggacactcccatcagaacttggcagccttgaagttggggtcagcctcggcaggagtcccactcctcctggggtgctgcctgccaccaagagctcccccacctgtaccaccatgtgggactccaggcaccatctgttctccccagggacctgctgacttgaatgccagcccttgctcctctgtgttgctttgggccacctggggctgcaccccctgccctttctctgccccatccctaccctagccttgctctcagccaccttgatagtcactgggctccctgtgacttctgaccctgacacccctcccttggactctgcctgggctggagtctagggctggggctacatttggcttctgtactggctgaggacaggggagggagtgaagttggtttggggtggcctgtgttgccactctcagcaccccacatttgcatctgctggtggacctgccaccatcacaataaagtccccatctgatttttaaaaaaaaaa

SEQ ID NO: 63213 - DNA, 470 bp, Homo sapiens
ctagcattttgggaggctgaggttggaggatcacttgagcccacggtgtatcatattttgtaataatctggcgtatcccaggggataccgtctcagaatctgcaggtttgaccttatctctttagctaccattagcatagtatgagggcatttaccatgtcctctagccagcctcctgatggcagtaggtctttcctgttttggaggatccgtgcctcatccatagtcagggaatagccctgtcacctgcaaaggtctggttgacactgaaactctaataataggctcctaacagtaaccttctttctccccacagtgtaatccagtgatgattgatgccatcaaagtttctgctgctcacagggcccgatacttttggggcaacctacccgggatgaacaggatctttggctttcctgtgcactacacagacgtgtccaacatgggccgtggtgcccgccagaagctgc

SEQ ID NO: 63214 - DNA, 506 bp, Homo sapiens
cgctttatatattttgaaattctattgttaggtacaagtaagtttatgattattatatcttcttgatagattgattcttttatcattatacagtgccctataagaacaatttttatcttaagtctatttgtctatattagtatagccacttcagctttcttttgtttactgtttgcatggaatattttcttcttttactttctatttggggtcttgagtctaaggggaatctctgtagatagcaattggatctgccaatctttgctttttatttggggagtttaaaccattgacatttaatgtaattattgatgaggaagattacttctgatattttgccatttgtttcctttattttgtgtctcttgttcttaaattcttccattactaccttctttcttttgtattacatattttctagtggaacgattttaatttctttggcatttcttttggtggatggttttagttattttcttagcgggtgccacggagattttattgtc

SEQ ID NO: 63215 - DNA, 836 bp, Homo sapiens
  misc_feature (1)...(836): n = a,t,c or g
ggcacgaggagagagctacaccatgagctgcaataccctgtatagtcgtttaagaaaagaatctctcttggtgagaagcagatctgggaagtgacagtaaaataggatcttcttccgccgtctagccagcctgaacactgggatacaggcagacacctagccaaagcaaaaatcaacagcggataaagtggtcaactcaacttcaaccaaaccaaaaacacagacacccaccccgtctggctagtctgtgggctcctcatgggcaatgtctgattctgttttattccccaagactctcacccagtaccatatgcctggtgtacagaaggctacagacgtttgctagatgtgtgctaaacatttaaagcttcaagtccagtgatttcctcttgtatagtgctgtctaatagaaatctagtaatattaaaaatgtttttaagggtgaaattaattttaacatattatttaccgaaaacattatcatttcaaaatgtaaccaatactaaacagtattaatgagatactttatatatacatatatttcacattacatcttcaaaatcggtgtgtattttaactttagcacatctcagtttagactagccacatttcaagtgctcaacagccacatgtggctagtggctaccatactgaacagtgccgctctaggatctttctccttctaaggaactgaatgaatcccctatagtagtttagagcacaagctctagattaaaaaaagccagggtttgaatctcagctctactaactggccacgatcaagtaatttatccctaantggcngcctatagcgagctattaatnnnnnngttcca

SEQ ID NO: 63216 - DNA, 1401 bp, Homo sapiens
gtgggcctttgacccctcggatgattacgttcgcccgggccgacccacgcgtgcgccccgtcgcgggagccgcttcgggccttctgggcatgtctgccatatggctccaggtttgtttttctccccggcactctgacggggagggctcccggcatctcctggcgtccgggtagaggacgcggaggatgctgagctgctggcgcactgcagcacaactagagatgtacggatgcccccatcttgatcttacagaatcagaggtacagccgcgagaaaggtctagtcaagaacagacagagtcgcttgaggactcaggagggtgtttgctgcgttgacaacagactacaccctcacagtttgctctgctcttccaacaccagtggaagatgatcacatcccagggatcagtgtcgtttagggatgtgactgtgggcttcactcaagaggagtggcagcatctggaccctgctcagaggaccctgtagagggatgtgatgctggagaactacagccaccttgtctcagtagggtattgcatcattcacagggtattgcattcctaaaccagaagtgatcctcaaattggagacaggcaaggagccatggatattagaggaaaaatttcgaagccagagtcatctgggtgagttagtgccagatggaatttaaagaattaattaataccagtagaaactattcaagaatgaagttcaatgagtttaacaaaggtggaaaatgtttctgtgatgaaagcatgaaataattcattttgaagaggaaccttctgaatataataacaatgggaacagcttctggctgaatgaagacctcatttggcatcagaagattaaaaattgggagcaaccttttgaatacaatgaatgtgggaaagctttccctgagaattcactcttccttgtacataagagagcttacacaggacagaaaacatgcaaatatactgaacatgggaaaacctgttatatgtcattttttattactcatcagcaaacacatccaagagagaaccactatgaatgtaatgaatgtggagaaagtatctttgaggaatccattctctttgaacatcagaatgtttacccattcagccagaatttaaatcccactctaattcagagaacccactcaattagcaatattattgaatataatgaatgtggaacctttttcagtgaaaaattagcccttcatttacaacagagaacacatccaggggaaaaaccttatgaatgtcatgaatgtggaaaaaccttcacccagaagtcagcccacacaagacatcagagaacacacacagggaaaaccctatgaatgtcacggatgtgggaagaccttctataagaattcagacctcattagaaatcaaagaattcacacagg

SEQ ID NO: 63217 - DNA, 1678 bp, Homo sapiens
  misc_feature (1)...(1678): n = a,t,c or g
gctcggggtaatagggctgctgctcggccggccgttggcggcgagcagcaggggcatgagggctaacccgggaagcggcagctgagcgggccgggaggagcgccggtccccgtggatcccgagagtgcagagctcggggcaggggccgggaggcgtgggggagccgggccctcccctcaggaacgtgtcccggggccgacccggcccgtagtgtggaagcagcttcaggtaggtgagctcgtgaaacaatatgaagaggagaaaatagccttttaaggaaattggcccacagaaaggatggccttcttggacaatccaactatcattctagctcatattcgacagtcacatgtgaccagtgatgacacgggaatgtgtgagatggttctcattgatcatgatgttgacctagagaagattcatcctccttcaatgcctggagacagtgggtcagaaattcagggaagcaatggtgagactcagggctatgtatatgcccagtcagtcgatattacctcaagttgggactttggtattagaagacgctcaaacacagctcaaagattagaacgactccgaaaagagagacaaaaccagatcaaatgcaaaaatattcagtggaaagaaagaaattctaagcaatcagcccaggagttaaagtcactgtttgaaaaaaaatctctcaaagagaagcctccaatttctgggaagcagtcgatattatctgtacgcctagaacagtgccctctgcagctgaataacccttttaacgagtattccaaatttgatggcaagggtcatgtaggtacaacagcaaccaagaagatcgatgtctacctccctctgcactcgagccaggacagactgctgccaatgaccgtggtgacaatggccagcgccagggtgcaggacctgatcgggctcatctgctggcagtatacaagcgaaggacgggagccgaagctcaatgacaatgtcagtgcctactgcctgcatattgctgaggatgatggggaggtggacaccgatttccccccgctggattccaatgagcccattcataagtttggcttcagtactttggccctggttgaaaagtactcatctcctggtctgacatccaaagagtcactctttgttcgaataaatgctgctcatggattctcccttattcaggtggacaacacaaaggttaccatgaaggaaatcttactgaaggcagtgaagcgaagaaaaggatcccagaaagtttcaggttcaagggcagacggggtttttgaggaggattcgcaaattgacatagccacagtacaggatatgcttagcagccatcattacaagtcattcaaagtcagcatgatccacagactgcgattcacaaccgacgtacagctaggtgtgcactcttcccgggggtgctcaggaagagggctgctcccgtggactgcctcaggccgagtgctgacacatggcggcaggagcagatagggtgctgcggtgctgcctgcgctgccttaagaagctgagactcacacaagtgttaagagggtatctctggagacaaagtagagatagaccctgttacgaatcagaaagccagcactaagttttggattaagcagaaacccatctcaatcgattccgacctgctctgtgcctgtngaccttgctgaagaaa

SEQ ID NO: 63218 - DNA, 1775 bp, Homo sapiens
ggtggttcagggggcgtgtaacctgggccgattctgccccagcacactggttgtcgggagccccgcctccgctcgcggttgacagctcagctggtgccgagcaactcgtgccagccagtcgtgtctcagcctggagagtgcgcgcaccgccgcccgggcagccgctggctccagctcacgaaacagccccgggcgccgcgccgctctgagtccagcctcctactgagaacagtccctcccttgtgcgggtcgcacggctagccgcaggttcggccacgtcaaatccattttctaaaaaagcagggagcagagctctctcttcgccgccgacgcagaaaggagctggggaggaaaaagctgctgccttttgcgctggagattcgtgggcaaggcttctcattttcccaggctgcttcccctcccgggtgaggagcgtcctgagactaaggaaagagcctggaaaatggagcagacctggacgagagattattttgcagaggatgatggggagatggtacccagaacgagtcacacagcagttctgtttcattgacagcttttcttagtgacactaaagatcgaggccctccagtgcagtcacagatctggagaagtggtgaaaaggtcccgtttgtgcagacatattccttgagagcatttgagaaaccccctcaggtacagacccaggctcttcgagactttgagaagcacctcaatgacctgaagaaggagaacttcagcctcaagctgctcatctacttcctggaggagcgcatgcaacagaagtatgaggccagccgggaggacatctacaagcggaacactgagctgaaggttgaagtggagagcttgaaacgagaactccaggacaagaaacagcatctggataaaacatgggctgatgtggagaatctcaacagtcagaatgaagctgagctccgacgccagtttgaggagcgacagcaggagatggagcatgtttatgagctcttggagaataagatgcagcttctgcaggaggaatccaggctagcaaagaatgaagctgcgcggatggcagctctggtggaagcagagaaggagtgtaacctggagctctcagagaaactgaagggagtcaccaaaaactgggaagatgtaccaggagaccaggtcaagcccgaccaatacactgaggccctggcccagagggacaagtaggtgccttcggtgctctttttgtcgcttgtcttttgcccattctcaaggcatacagcagctgtcctgttccctttcaaggactgacagtaggagcttcactatttctaagactttatgggcccacaaccgaagacattcttttcagggttgaattttcagtggtatccattatgaaaactcacttcatggattcagtgggcaaatagcggcaagcaagagacatggattcacttattcggcaaacatttactgggcatgccacatgccagataccgggctaagtatctggcatgtgttacagaaacaaaagacctaaatcttgtcaccaagaaacatgttacatgattttaataagttccctgatagaagagcatggggtgctctggggaaatattggagggtcatccattccacattaaaagagcaagttgtctgctgtggtctgaatgtttgtgtcccatccccacctccctcccccaccagtttatatgttgaaatcttaacccttaaggttaatacttctgcctccagaagtattatgaggtggagccattaggaggtgattaaatcataga

SEQ ID NO: 63219 - DNA, 427 bp, Homo sapiens
ctcacatcacataaactcacatcacctaatgtgtaaggactcacatcacataaaaaagactcacaaaccaaagagactcacataacacataaggactcacaacaaaaaggactcacatcacataaggactcacaacacataaaaaacttaagataaaggtgaaaaaagacattccatgcaaatggacaccaaaagcaagcaagcttagctattcttctatcagacaaagcagactttaaagcaactacagttaaaaaatacaaagagagacgttacataatgataaaaggactaccccaacaggaaaatattgcaattctaaatatatgtgcacctaatactatagctcccaaatttgtaaagcaattactactggacataagaaatgaggtagacagcagcacaataatagtgggggatttcatag

SEQ ID NO: 63220 - DNA, 1048 bp, Homo sapiens
ggccggctgggcgtgcgctcgctccccgaagccggggctgggccggagccgggcgagggctgggagctgggccgggtccggggacagcgggcgaggggcagctgccggagccgggcagccaggccgctcagggcaggggacagctggcgccggttctgcggtctccggggcccagatgtgaggcggcggcgcccccggcccgagagcgcacgatgggggccccgctcgccgtagcgctgggcgccctccactacctggcacttttcctgcaactcggcggcgccacgcggcccgccggccacgcgccctgggacaaccacgtctccggccacgccctgttcacagagacaccccatgacatgacagcacggacgggcgaggacgtggagatggcctgctccttccgcggcagcggctccccctcctactcgctggagatccagtggtggtatgtacggagccaccgggactggaccgacaagcaggcgtgggcctcgaaccagctaaaagcatctcagcaggaagacgcagggaaggaggcaaccaaaataagtgtggtcaaggtggtgggcagcaacatctcccacaagctgcgcctgtcccgggtgaagcccacggacgaaggcacctacgagtgccgcgtcatcgacttcagcgacggcaaggcccggcaccacaaggtcaaggcctacctgcgggtgcagccaggggagaactccgtcctgcatctgcccgaagcccctcccgccgcgcccgccccgccgccccccaagccaggcaaggagctgaggaagcgctcggtggaccaggaggcctgcagcctctagactgatgcccctgcccccgcccatccgcccccacgctgtacagagtgcatgaggagccgccggaccaccggggaccgactgcctgcgtccagccgcgccccatccccgaggccgcctgtggccaccatgtcggccctctttccaccaccccttgctcagcatgtaagccccacccacccctgccctttcagacccctgcggtgacctggctcggagaaggg

SEQ ID NO: 63221 - DNA, 569 bp, Homo sapiens
agaggggaggagaaagcacttttacagacctcacattccactgctgtcatcacagctggtcacttctctggatccagcacgtcaggttccagtgcacacctgcctgaatgcagttttgtcctgtaaacctagcctggagaaagcaggcccttctttcccttaacatgatactttcactttaatctattcatgcctaccaagtagtcacatagatgggaaggacacactgtagggcatggtgtgatcctggacaagtgttaggagggcccttccatcagtgatatgtgtactttttcctgctgtgaaagctaattgtcgctgtcttattattttacaggccaaggaggtagcagagcaaactctgggatctgggttagattcctttgagttgattccgtttaaggcagccctgcggtaagcaatggctgatattttttataaggaaattttttttcttcgggttggaataatctttttttcccttataattaagatttcatctcccttttgaaaaatgttcaagtaaaataatgggatggggggaaggagattatttcttgattcacccc

SEQ ID NO: 63222 - DNA, 819 bp, Homo sapiens
ccgccccggaatttccgggtcgacgatttcgtccgggagggcggctcgcaggcaccatgactcctgtgaggatgcagcactccctggcaggtcagacctatgccgtgcccctcatccagccagacctgcggcgagaggaggccgtccagcagatggcggatgccctgcagtacctgcagaaggtctctggagacatcttcagcagcaggtagagcagagccggagccaggtgcaggccattggagagaaggtctccttggcccaggccaagattgagaagatcaagggcagcaagaaggccatcaaggtgttctccagtgccaagtaccctgctccagagcgcctgcaggaatatggctccatcttcacgggcgcccaggaccctggcctgcagagacgctcccgccacaggatccagagcaagcaccgccccctggacgagcgggccctgcaggagaagctgaagtactttcctgtgtgcgtgagcaccaagccggagcccgaggacgatgcagaagagggacttgggggtcttcccagcaacatcagctctgtcagctccttgctgctcttcaacaccaccgagaacctgtacaagaagtatgtcttcctggaccccctggctggtgctgtaacaaagacccatgtgatgctgggggcagagacagaggagaagctgtttgatgcccccttgtcattcacagagagagcagctgacagcaggtccagagaatattctatgtgcaaaccttggcagtgctgaaatgatgttcacctactgctgacttccacattgcaagactatgtcatgcggctggg

SEQ ID NO: 63223 - DNA, 1495 bp, Homo sapiens
tttcgtgggcgctccgggaggagggaccaggatccggcgccggggcgcagatactgacaccaagggaatccgggtgccccccccccacgccatgcgggcccccaggaaactggctccgccacctcggctgccccgtggccacggccccaatcctggccaggcggagattctgcggacattcagtgaatgtggtggaggcacttcaggaattctggcagatgaagcagtcccgtggtgctgacttaaagaatggggctctagtggtttatgagatggttccctccaacagccctccttatgtctgctatgtcaccctgcctgggggaagctgctttgggagtttccagttttgccccacaaaagctgaggcccggaggagtgctgcaaagattgcgctaatgaattctgtgtttaatgaacatccttcccgaagaatcactgatgagttcatcgagaagagtgtctctgaggccctggcatcttttaatggcaacagggaggaagctgacaacccaaatacagggattggtgccttccgattcatgctggaatccaacaagggcaaatcaatgttggagttccaggagctaatgacagtttttcaactgctacactggaatggcagccttaaggccatgagggaacgacaatgctctcggcaggaggtgttggctcattattcgcaccgggccctggatgatgatattcgccaccaaatggccttggactgggtgagccgggagcagagtgtgccgggggcactgtctagagagctggcctctactgagcgggagctggatgaagcccgactggcaggcaaggagctgcgcttccacaaggagaagaaagatattcttgtgctggctgctgggcagttgggcaatatgcattcttccaactgctaggcatccacccacataactccccaggctttccacagccttttttttatgtctcctttctaagatttaggatgattttttgtacatactttctcatttttatactttaaaaaatatatatgtgtataaattctacacctagattcctatttgctaagagatcccttttcttactaccagtttttggatgtagttttatttgaaacatcttcagtccactttacaacaaagagcagcttgtctttgcagctttgttagctcttaaacttccagattaactgtgtagccatttcagtagcactaaaagattaactctagtgttcatgtgtccttcttttcaaatatcaggtaacttgaataaggattatgtgccccacccttactctcattcctgcttcctcttggactcaaacagggtatgagtatgaagattttgcctttagttcctgaactgaacctgcttgctatccctttcctccccaccactaccttattccttctctgcctccaaattgccactttgttttgaggcttccttccctaccttattattctgaaggaagtagagatcttgcttctgaaacccctcctaa

SEQ ID NO: 63224 - DNA, 2456 bp, Homo sapiens
ttttttcacggacagacagggtcgtttgtcacagcagagaagcacctcacggctcctacccgcactcatcgcggacagtgcctgcagcgggagcggcgcgagcaccctccccagatgaaaacaccagcaccaggaggtgggccgtagcccaggctgagggaggaggctgggggctggggctcagggcccccccccggccacagcgccaccctgagtggccctgaaaatagtgcacagtgctgggtactgccccggccggaggcacctagttgttgagcattccggccacaggccacccgctggcccttccttggtgtggcacgagaccacgggcacttgcaggagctccctgcatgctgttttgtgctttggtctcagggagcaccctcctacctcggggtcccagagtgggcagccgggcaggtgtgaacagtgtgacaagggtaccgtggggcacctggtagtgccacccagaggggcagccggtgctcctggtggtgtggcagcaacagttacaaactcaccccaagtccaaaccccagaaatcctgtttctctggccctccgggtccagaatgccctgcactgcctcctggcctcaggggctgctgcggtggtgggaaggctgcccagcagtgaggaaggcgagtgcaggggctgcggccgcggtcagagaaggagagacaccagcagaggacgcgaagctggaccggccaggttcagagcccgcctcggttgctcccaatcagaatctgctttgtgctccacggcctccaagcactttcatgagcgttctgctcctacgtggccaggtcctaccttccctgacggctctggccaggccagctcggtttccctctaacccatgaggcctgggggggctgtgacagaggctggaagcgtggccagagcccaggggcaggcccgcctggtcacagcaggatgaggctggggtggcgcagctgccggtacacctgtagcagcctctgggcggtggcacaggagctggcctcatcctccgtgcagagccggtcgcgcagggtctgcacctcccgcagcagtgtctcgtggttggcgtggatctggcggaggtactgcacacggagatcaggagcgctggagccctgggcggcctgctctgtcaccatcgtctgcatgcgcccgacaacggcatggtgcgccctgcaaatgtcggccagagaggagctttccacttgaatctccacggcctggatgggccctgctgggcacaggtcggtcatggccacctctcggacgatgaggtgaacgttggcgccatcaggggccactccctggatggaagatagtgctcgggccctcacgacgtccacagcagcattctcagcaaggagccactgcagggtggcacagcacaggggcacgcctgagtggccgtccttcaaggcagctctgagcagctccgccgacaccttgatggaagccacagatgggggcaggtactcggcccgcagggaggcgggtcctgctggctggctgccaggctcccgacaagtttccagaaaagtggccacagggtctcgggtggggccgagtggggagggggcccgtgtgtgtggcagggccaggccagggaagcgcagacactgcagcatgtccactgtgtgcctgctcaggggcaggcaaacaccctcttgctcgggcaggacgtcggaggggcactcatccagaaaggggtcctcagagtctgagggggcaagggccccgcccaccacctccctgagactgtagaacagcgtgcaggacacggtcacgggcaggtcgagcccgccgttctcaccagggcccaggggtagcgtcacctcccgccgagcaccggggccgagctggtccacggggatggtgtaggtgatggcggagcaggccgagtccaggtcgagagcacaggagctggtgagcacctggatgcacagggtccacccctggtccaggctgaagctgctgctgttctctagcacgcaggtggccatgagcacatcctgtgtctgcaggcggctccaggtggtgctggtggtgcaggagatgggtctggggcccgtgccgcttgacagcagtgcacagctcacgttcatggcctcgttgaggcttgtcagtgccttgttccgctggtcaaccgccttctttagaaaagacactctctcagagatgttgccaattccagacagcagctcctttattttctgacctgcactctctgtggtcatcctggctgggccaggcatctcagagtccaggtccaggctgcaggtcatcaggcggcctttggcggacagggccaggagcttggtgccaccttcatgcgtcctgggagacgcggacagcgagacgacactgcagatgttcaggctggctgggcacagcatggggggcaggcctcccgggccttcttcgggctgctcagggcccagcggggtgttt

SEQ ID NO: 63225 - DNA, 688 bp, Homo sapiens
ggagaataagaaaactgtctggcacacaataggtactcaataaatgcccattttcttccctggcacagagcagaaagaagcagagactggtggagtcagtggagactgaagggcaagaggagaggagagaaaggacataattgcttgcataccagaagtgctcaataaatgtagtccttgccttggaagagggcagagagctcagaaacacaaggaaaggacagaagagggaccggggaggaagagagtgaggaaacagccagagaatctgctagaagggagagaggagagagaagagccggacagggagagcagaagtgagaaaaaggagggtggccacagagaggacagcgagaaaaagagaacaggaagaggggaaaagagaagaaatgggagagggaagaagggtgggagagaaaacggaacagagagggggcacagacagcggactggaccgagagggagatggagcggtgcggagggggagagagaaagagggagggaaggagggtaggagagggctggagataggggaaaagagaaaaggagggtaggagagggctggagagagaagggaagttaagaagggagcaaggggtcccagacagccctatgcctgaggtcaatacagaactggaggtgagacattagagttgcattatgcccataagccaaactgcatacgaaa

SEQ ID NO: 63226 - DNA, 569 bp, Homo sapiens
gctgcgagaagacgacagaaggggacacttaggttctttgtagctaactgtgtgatcttgggcaagtcatttggccttttagagcttcattttcttcaaacacaacaataagaactactatgtgaggggacttcaaagaaaactcatggaaaaatacatattatgaaaaaactgcagaatttcaaaattttgtatgcaccaaaataaacttgcactaacttgtcataacatatctgaacaggatgtagtttgaggcactaagaaggataagacatcagtttgaaaagagcccctatcagagcaacataagttctgctaaaattgaagcaaaaacaaacataaaatttatggtgaagctgggtgaaagaatggtgaaatcattgatgctttacataaagtttatggggacaatgccccaaataaataattggatggctcattttaagaagggacaagatgatgttgaagatgaagcctgtagtagcagactgtccagtttgcaaggaaaaaattcatcttgttcatgccgtaattgaagaggaatgatgattaacagcacaaataatagc

SEQ ID NO: 63227 - DNA, 1083 bp, Homo sapiens
  misc_feature (1)...(1083): n = a,t,c or g
atcctctagagcggccgcttcccccgcgccgagcgaggaggcaggctgcggcggcgagaggcggctgcgcggccatgggcgcgccagtgtcgccctagggcgggcgcacagaccacagccggagcggtggtggcagcctccgcagaaagccttcccgggcggcggcggcggcggcccctggagcagcgcggccgggatgagcgggagctgcgcggcgcccggcccgggctcgggctcctccccggccgcctgccgcttcgcgcactacttcgtgctgtgcgggatcgacgcggacagcgggctggagcctgacgagctggcggttttgtaccaatggctagaagcagatcgtcatggcaagagccaaggtgctgcaaatacgacttcaggcgaaaattttggccagagtcctttgaaaagaacattcaaatccaaagttctcgcccactatcctcagaatatagaatggaacccttttgatcaagatgcggtgaacatgttgtgcatgcctaaagggctatctttcaggacacaaacggacaataaagacccccagtttcactcatttataattaccagggaagatggttctcgcacctatggttttgttctcactttttatgaagaagttacaagtaagcaaatctgcacagcaatgcagacactttaccagatgcacaacgctgagcattacagcagtgtgtatgcttcatcttcctgcagtatggactcattggcaagtagtcttgatgaaggagatacaacttcccttttgaaactccagcgatacaactcctatgatattagcagagacaccctgtatgtttcaaaaagtatatgcttgatcacaccgttaccattcatgcaggcctgcaagaaattccttatccagctttacaaggctgttacctcacagcagccaccacccttgccacttgaaagctatatccacaatattctttatgaagtaccccttccacctccagggaggtcactgaaattttatggtgtttatgaacctggtcatctgccagaggctgggcccagtgaactccccctctctgattanccccttcgggaggc

SEQ ID NO: 63228 - DNA, 769 bp, Homo sapiens
cttgcggccgccatggtccccacgacgctgctactagggccctctggggcgggcggggcagccgggcatggctctaaggggacgcgccccggggcccccggagggaggggggtccttagcgccgaacccccatgcgtgagtgggggacccggcggggggcgtcgagggtccgggcgtggggtagggcctcaggagcggcgggtcatgcaacggtggcgacaacggggcttcttcctcctccaccttctccacgtcccgcggggcaggggcgccagcagcgcctcatgccgcggagggctgctgcggagacgcggcccgactcccgaccagaccctcggacgcccggcccggcccgcactttaaagctctccgcacgacgtcacgggcagccagcccgacgtccgccagcgccgctccttagcgggctcctcaccgcgcacgcgcagtgctgccggccaccgcggctccgcgcgctacgggcatgcgcgtgcgtgcaggccgggtcggcagaggcgccggcgcaagcgcagacaggaaccgccgccgtccgccgcccctcccccactctctgaggggcttcaagggaacgctctcaaatagcaacctgtcttcacgccgcgccgcctccaggaccgaagggctccctctacaggggtgcgctcatattgccaacagtgtcgccgtgccgcgtcacggcatcgtccgaacgcccgcagacgcctcaaccccagggcgcattcaccagggaaccgccacaacgtagacgaaa

SEQ ID NO: 63229 - DNA, 644 bp, Homo sapiens
cgacccacgcgtccggtggatcctgccctccctgtggcttctcctgcttggggggcctgcctgcctgaagacccaggaacaccccagctgcccaggtgggcacctagggtgccctcctcaccaacccactcctcattccctcgctgggtgtccccccaccaaggctcatcaacctcaaggagcagggtgggagtttcataatctgggctctgcatgtaaatatatgcaaatggatgcaaagcacacgaaaccttgccagctcaggagacaagcatcctgacagtgggaatctgggagacaggaagagaactgaagaggggtctggaagagacagtctaccctgtgcccaccctgcctgtgtctccctgtaggacccagggaactggaagccagcaaagttgtcctcctgcccagttgtcccggagctccaggaagtcctggagagaatggagccccaggtcctcaagggccatctggaccaccagactagatggtccccacgtgtgagccaagacatccagtgatcctgctgcgatgacgttatagcctcataaattgacggcagctcaagagcttattcgccaactttgggcggatttaaccattcttgggaatttaagagcaggctgcccacctggtgaacg

SEQ ID NO: 63230 - DNA, 1840 bp, Homo sapiens
ttttttttttttaaagaaggaagaggtttttatttggccggtagcatcggcagactcatgtcttaagagccaagctccccaaaaaagaaattcctagcccttttaagggcttacaactctaaggggtccgcgtgaaagggtcatgatagatcaagtaagcatgaggaatgtgactggaggctacatatatcagctaacagaacaaaaagttttacagtgctttctcatacaatgtctggaatttacagatagtaccagtagtttttatcggtaataagaaaaaggatggcttaatagtgccaataacacaactgtctgcccatttcattagggtaactgaatgtaggctctctgcccacatatccagtatagtccagcgagagccatccagtcctgatgagatcctggacaagcccccattatatcaggagctggatcagtgggcaccaactctcaggcttcccaaggccatcggtctctgatagtggttcccccgcatatataacaagaagtaacattaagggaatgagctacattttctgctaattggagaaacaaattttttatctttttcagaagttctggtgctggcagatttaactcctcataaaaggtttgaaacactggtttgggagagtgcttgtggacctccccttgaactaaaatggcaacttgggggtttaaccctgtccctttgatccccagggttacacattctccctttttccaatggggatctaggggattggtaattattagttctagtgggttacagtgactggcagcacaggaggggttggcttcccctttctgaagatgaaccaagtcctttttgttctttttccaagtagcctaaataacacatggccaaaaggcacaattttcacaaacccctgactcatgacaaacatatttattttctactctgtagctcctttcccagttaagagaaccacatcctgttcctagcttgttactattaatggctgcacaagcgtcaaatcttaaagttacttgtttggggattcctttttcttctgttctagttattatttcacttgtatcacctaggaaaaggccagttcttaatcttatttcaaaactggtggttgtagggggctcagatgggttataacacacatcaggtcagtcatttcccaggctacataccttgtactgactggcattatacaaacaagtttcttttaatgttcccatacattcataataactatagaacagaaagattgttttagtttgctgtcctacctcggtgacctgatgaatacactgggaacagtccccagtttgagtaaggtcagttgaagcccttactgtgtaagtccaaaatttaagaaaaatgaatcccatgatgagcttcctcatgcttcggccatgtgtggaccagtcagcttctgggtgtgactggagcagggcttgtcgtcttcctcagggtcactctgcaagggtcgtctgggcttggtcttgcctcccaggtttcaggtgctgcaggttttacacggctgtggtggatccaggctgggattccctctaccttcacagcggtgggagtggtcaggacgacagactacggtctttccaccgtgggcacaaagaagttacgttccagtccttgatccacactcgattaccaagtttcaaatgtccggactccaagtgcccattccttcccggtgttcagccactgcgttgatcctccacaggggcctgccacgcactgctctgatgaggcgttccaccggggcaattgcctacccgggagtggtctcaggatctgcgtcactcaagctggccagagtcccccacagggatgctccac

SEQ ID NO: 63231 - DNA, 857 bp, Homo sapiens
cggcacgagaaaaaagatatatacttaggtgtgtagtagctggttcacaggcatgcatagcctcaacttatataagttatgccaacttgtgttctgaagtgggcatggcagcttatgctcccagcaggagtctatgagaattcttgttgtacatcctcaccaacatttgggattgtgagacctcatgttttatccatctattcagctggaagtgaaatctcagaggggtttttaagttgcttactagtgagcatgagcatcttttcatatgttgcttggcccttcctgtttccccatctgtgatttgaccattcaaggtgtttgcctacttttcaatgggtctattctttttgttattgatttgtagaaatcccatataaattatggaaacatttaggtctttaactggaattaattttatatgaatgctgggagatagaaataaatttttgcctgctttatcttcttacttgtttattttcatggtttcctggcattttatttttgttttattttttgcttttaaatataactatatagctggtattacactatgtagcaactgagtgcttttgtctttttaaaagcatttcgttatataaaaatggggtgggcacagtggctcacgcctgtaatcccagactttgagaggctgaggtgggtggatcacttgaggccaggagtttgagaccagcctggccaacatggcaaaatcccgtctctactaaaaatacacaaattagccgagcctggtggtgcatgcctgaaaataccagctactcggatggctgaggagtgagaatcgccttgaacctgggaggcgaaggttgcaatgaactgagatcacaccactgtac

SEQ ID NO: 63232 - DNA, 459 bp, Homo sapiens
ccgatggaggcctattccagccagcgctacaagaactgctaaaaggagctctaaaccttgaaagaaattcttgaaatactccaaaatagaacctccttaaaccgtaaatcttacaagacctatgtaacaataatatgatttttaaaaaaaggtattcaggcaacaaatagcatgaggaatagaatagtacctcacatctcaatactaacattgaatgtaaatggcctaaatgctctacttaaaggatacagaatggaagaatggataagaattcaccaaccaagtttctgctgtcttcagtagactcacctaagagtaaggactcacagaaacttaagtaaaggggtagaaaaagatactccatgcaaatggacaccaaatgtgagcagggatcactatttttatatcagacaaaacagaccttaaagcaacagcagttaggaaaaaacaaagagggac

SEQ ID NO: 63233 - DNA, 806 bp, Homo sapiens
gcttgaattcgctcgcggggccatgccattcctcgggcaggactggcggtccccggggcagaactgggtgaagacggtcgacggctggaagcgcttcctggatgagaagagcggcagtttcgtgagcgacctcagcagttactgcaacaaggaggtatacaataaggagaatcttttcaacagcctgaactatgatgttgcagccaagaagagaaagaaggacatgctgaatagcaaaaccaaaactcagtatttccaccaagaaaaatggatctatgttcacaaaggaagtactaaagagcgccatggatattgcaccctgggggaagctttcaacagactggacttctcaactgccattctggattccagaagatttaactacgtggtccggctgttggagctgatagcaaagtcacagctcacatccctgagtggcatcgcccaaaagaacttcatgaatattttggaaaaagtggtactgaaagtccttgaagaccagcaaaacattacactaataagggaactactccagaccctctacacatccttatgtacactggtcaaaagagtcggcaagtctgtgctggtcgggaacattaacatgtgggtgtatcggatggagacgattctccactggcagcagcagctgaacaacattcagatcaccagggtaagcgggcaggcccagcctcctcccggcagtgggtccctccacagggatactggacagactcgccaagactttgaattcactcctgtgacggaagagtctggtcttttctgatctgctgccttgttctggt

SEQ ID NO: 63234 - DNA, 1313 bp, Homo sapiens
cttttctttcttccttttctttcctcttctttttcttgtgtttctctttacttcagaggaactggagctgctcccatcttcatccaagatagaatcctccaataactgttttaactgctgtatccttacatccttttcatgtcttttattgcctcacatgctgccatatatgggatcttcatgtgctactctgaactgctctttcagttacctttgataaagaaagggcattgtttgtcgcccatttggtgaccataccgtttgcaacgccaacccaaacatcctttaatcttgttgctttaggaatgaattttccatcaccaagaaattatgaagcaatccaatgaaaagtaagtgcttaactttgacttctttctccagtggcatccaaagtcctttagttggtgtgtgagccagaaattccctggcatgttcattgcctggtacatctggtatgcagtcttctggcttagtgtcatcttccttgataagcccaggaggaggttttttcataaaaggactccaggtgcatgagctgcatcatgctgcttttgctcccggcgccactgccctgcaacttgcccgggaggtggccaaaatcctggcctccgctacttgatccccgcctccctgtggctggccccacgtcagtgcacggagccccagagcttagcgccgtcaggcccatggctgacagttggtagtttttttttccccaaagatttgtttgggagtaggaggaatggcaaaatcttaagactttaaaattagatttttttctgagacgaagtctcgctctatcacacaggctggagtgcaatggcatgatcccagctcactgcaacctctacctcctggattcaagtgcttctcccacctcagcctccccagtagctaaggacaacaggcgcacgccacccacgcttggctaagttttttggaattaagtaagagacgggggttcaccattttggccaggctggtctctaactcctgacctcaagtgatccactgcacccggcctaaaattagattttattaaaattattttctaggctgggcgcagtggctcacacctgtaatcccagcactttgggaggccaaggcaggcggatcacctgaggtcgggagttcaagaccagcctgaccaacatggagaaaccctgttctccattaaaaatacaaaattagccaggcatgatggcacgcgcccgtcatcccagccacttgggaggctgaggcaagagaattgctccgggaggcagaggttgtggtgagctgagatcactccattgcactccagtctgggtcga

SEQ ID NO: 63235 - DNA, 1114 bp, Homo sapiens
gcggccgctgctgaggcggagactccccgccgccgcttcctccatccccagtccgccggcctcgcggcgctgcagggcggttgcgcgcagagctcttccctcctcctttttcttcctcctcctcctcctcctccgggtccccgcccagcacccctcgcaccaggcggcggcggcggaggaggagagctagacccgccgccggggcacaacatggcggagccctcggccccggagagcaagcacaagtcgtccctcaactcgtccccgtggagtggcctcatggccctgggaaacagccggcacggccaccacgggcccggggcccagtgcgcgcacaaggcggcgggcggcgcggcgccgccgaagccggccccggcggcgtgctcacggggggctgtcgcagccggctgggtggcagtcgcttctctccttcaccatcctcttcctggcctggcttgccggcttcagctcgcgcctcttcgccgtcatccgcttcgaaagcatcatccacgagttcgacccgtggtttaactatagatcaacacatcatcttgcatctcatgggttctatgaatttttaaattggtttgatgaaagagcatggtatccactaggaagaatagtaggtggtactgtttacccagggttgatgataaccgctggccttattcattggattttaaatacattgaacataactgttcacataagagacgtatgtgtgttccttgcaccaacttttagcggccttacatctatatctactttcctgcttacaagagaactttggaaccaaggagcaggacttttagctgcttgttttattgctattgtaccaggctacatatctcggtcagtagctggatcctttgataatgaaggcattgctatttttgcacttcagttcacatactatttatgggtaaaatctgtaaaaactgggtcagttttttggacaatgtgctgctgcttatcctatttctatatggtctctgcttggggtggttatgtatttatcatcaatcttattccactgcatgcatttgtgttggtactgatgcagatacagcaaaagagtctacatatgatatagcactttctacattgtgggttt

SEQ ID NO: 63236 - DNA, 1758 bp, Homo sapiens
ggaattcgattgcaccactgcactccagcctgggcgacaaagcgagactccgtctcaaaaaaagagaaacatctttagcattttctaaggatccctgggggacgggaggcaggtgtgcggtgagttgggggattagaagctcccagggctcttccgtcagctgctgggaccccagatccactgtgactttccttcccagggaagacccttcgcacagtggagccgctggacagccgggtgcccctgactgcggtggctgtcatgcccgccccccacaccagcatcaccatggccagctctgactctaccctgcgctttgtggactgcaggaagcctggtctgcagcacgagttccgactgggcggtgggctgaaccctgggcttgtccgtgccctggccatcagccccagtggccgtagtgtcgtggccggcttctcctcaggcttcatggtgctcctggacacccgcacgggcctggttctgcgaggctggccagcccacgagggggacattctgcagatcaaggcggtggagggcagcgtcctggtcagctcctcctctgaccattccttgactgtctggaaggagctggagcagaagcccacccatcactacaagtcagcatccgaccccatccacacctttgacctgtacggcagcgaggtggtcactggcaccgtgtccaacaagattggcgtctgctccctgcttgagccaccctcgcaggccaccacgaagctcagctctgagaacttccgcggcacgctcaccagcctggccttgctgcccactaaacgccacctcctgctgggctcagacaacggggttatccgcctcctggcatagactgaggcaggagctggccgggcaagggtgggaagacatctgcgggcgcgtgtccgctcaccctgttccctgagcagcagctccctccagggaggccctgggtcccacgccctgggtgcccacatggcctgccaactagggcctgcaaatggagtgggggagtcctggcccctgaatcaccagagccaccaagcctgccagaggggtctcattcatggcttggggacacagggctcctagcaagcaggaagttaagagcaggaggaagcgttgctaccttcacttctccccagctccgccctctgggtccacatgaggacagggaagctcgggaaggggaagggagactggccctgcccagccggtctctagcccctcagcccccgctgggcactctctgtcccatccctctaggacagggaagctggcctggtccagggcactgatggtgcttggattccagcctaaggaaggctggccgtggtccaggagttaagggcttgggtctggggtttaagtggccacccatccaggccctggccagtgtgggaccgggacgggaaggaagaaggaggctaggagcagggggaaaaggtgcacttggccagtggcgcctgccaggagtgagtccatgcgttgtctgcccacccctaccacagtgtttgtgccttcagctgagggggcagcctctgggccctgaacccctgctggggctccacgaccctgagagaaggggtgagaagaatcatctctgcacctcgggtctctgccagaggaagacttaagcatccctgcgacctcacattctagacagagatgaggtccaggggttggcccctgctgccttctcacaatttgcaatagatgtaaataggaccaataaatcctttggaagagccaaaaaaaaaaaaa

SEQ ID NO: 63237 - DNA, 863 bp, Homo sapiens
  misc_feature (1)...(863): n = a,t,c or g
gttagactgccattggagaggcacaggtcctgcctcaggcctccataggagtgacatttgctggtgtcagaagcttggcaagaggggaggatgatcagaccctgcatggacagttcgaattggagctctctgcagagtccaggaagagagctctggatgggagggaagccatggggtggaaaagatagcttccaatggaaggcagtgaaaactcgccataagtgaaggagaagaaggaggccaaggagagggggcaggaatggcagccggcagccaggcggtcagtggagcaggtgctcaggaggcccacaggagagcttcgtggaaggagtggacagtgtctgaggcaaggggcaaaaggcatctgctggagctggtgaccccagcttggtgccccccaaagccagagtacgaggctgagaggatgcaggtgtcctcctaggaggtttgagtcagaaggcacgaggcagaagcagtgggggaggactccctcagtagagcgaggaggaggcccctcatccaagaggaggttggagcacaggggggtctaggtttgcagtttcgggaccggtagctgaggggtcccagggcctttcttctgtgaaggagaatgtgtccaccgtggggagggggtcgggagagagagatacttcagagtggacagggctgagaaagctttatgggccgcgaaaggcagagtanttgttggtggatgagggtggctgtggcaagtggcgtttcaggtgagacagctcggggcccagaaagacactgggaggaggagagctctgctctccagagaaacaggagcagagaggaaaacagagccgcagcgagcggcttgtggtctggggatgaagccc

SEQ ID NO: 63238 - DNA, 2461 bp, Homo sapiens
ggaggcaaagcttgcagtgagctgagattgcgccactgcactccagcctaggtgacagaacgagactctgtctcgaaataaaattaaaataaaatgggggccgggcacagtggctcatgtctgtaatcccagccctttgaaaggccgaggcaggcgaatcacctaaggtcaggagtttgagaccagcctgaccaacatggcgaaaccccgtttttgctaaaaatacaaaaatcagccaggcatggtggtgggcccctataatgccagctactcaggaggctgaggcaggaaaactgctttaacctgggaggcagaggtcgcagtgagccgagattgcaccattgcactccagcctgggtgacaaagtttttttaaaaaaaaaaataataaaatgggacctccacgctgtggaggcccttgccagtctagagtggtgcttctttgcagggacttggaaacaaccccccaaacacagcatcccctcacacctgccacccacttccttaccggctgccgtgggagcctctatcctgaactatggaggggcggggtggaaattttatataaggaccttgttaaggccaagaaagtcagtttaatcttacaatataaatatatcatttagtcacctcagcttatccccagaggtgtttacacaattcccaatgaccagtgcagcttggaagggactgaggctcgcaagtgggtggcacagtcggctcttcagtggctccaaagtgaagcccctcacaacaggagacacttcaaagaggtctgtccccagccacgcactcatgattgctttttagcagaagtcatggggccttgaggccctgggtttgggcaaaagcacagctgccagcagagcacagttctggtaggtggggccacggctgacctggccccagagctacaggaacaggcaggggccagcttggcttgcaacaccatgaaacaagcctgtggggcccttagtgtcttctcccgcagagcccaccagaaacacttctgtgagtaacagaacctggaaggaaaaggggcaggggtggggccttggtggcaccgcacaggacgtgccccaggcttcctctccagctgcactgccacgtgcggccaacaagagccccgcagccctggggtgctgaggcttggtccttcccagcttctgcaaatgccctggcactgccctccaattcagagggtataaacatcaatccaagccctgttcctctttccaacatgggggggacttggagtgccactggagggaagggggcagtctctctggaagaaccagagctgcacccttcaccactggagtgatcacagcttcaggctctacctggctggcttttctcatgaaggatcccgtctcatctcccagatcaaaaagaccctcttctaatgctgtcccagcatctaccaacaggctgacctgagctgcccgtgtcccccgttcctgtagcctgagacctatcagatgtcatcttccacggagccactgtgctcgcctaaggaggtaaccacttcagcctgtcgggcaaaaggcagggctttgaccttcacatccacaggccacggctgaaaggtaagaagccggatggccacacggcacaggtgcttgaggggcgggggatagctctccagctgcctcaaggagaagtggagggcctggatcttttccgccaggctgcccacagggtggatatcgaagttttcgggcagctggagtttctgagagttggtcaccatgagatccaggacagtctcagctttgcgcaggaggtccgcatggctctcgtcttccgtgcagcctgggtgggaacagagcctctcaaagatgatgtgaaagccagaccagcaggacgcaccgtgcagggagcagttgtaggcggctccggactccaggaggaagcgcaggagagggaagtgcagtttaaagctcttcaggcagatgtgggtgagggactcgtgggctgggcactcgctggggtcggccccgtgtgccagcagcagccgtgtgacttggaagcagaagcggttgatcatctgggcctcctctttgtcccctcccacggtctcaccaagcaggaagatgatgcaggtgaacactgtgtccccatctttggtggtggccttgacgtctgcccctccttccagtaagagacgaatgttctcagtattgtggatctgcaccccgtcgctgctggccagagcatggagcagagcagtttttcctagggagggagggagagcaaggaggagcaggaggccaggaagcccaggtcagggcaacccagaggaggtggcagaaatccagacactcagaggatcagaagatgaactttcagagacaactctcagctcaggtgagggctgagggtgacgggcttctggccattccctttccacccagagaagtgggagcggaaaggccaggaaaggtaggatttttctggac

SEQ ID NO: 63239 - DNA, 1690 bp, Homo sapiens
cgttgctgtcgctcctaacgccagcgctcgcgcccgcgccccaggaagtagggtttgccttagctcctggcgcctgcgatagcggcaagatggcggaccgtggcggcgtgggtgaagccgcagctgttggagcgtctcctgcatctgtccctggcctaaacccgacgctaggctggagggagcgactgcgggccgggctggcggggactggggcctcgttgtggttcgtggcggggctggggctgctttacgccctgaggatccctttgaggctgtgtgagaatttggcagcggtgactgtatttttaaattcattgacacccaaattctatgtggcacttacagggacctcttcattgatatcaggactaatatttatatttgaatggtggtacttccataagcatggcacatcttttattgagcaagtatctgtaagccatttgcaaccactgatgggaggaacagagagcagcatttcagaaccaggttctccttcgaggaacagagaaaatgaaaccagcagacagaatttgtcagaatgtaaggtatggagaaaccctctaaatcttttcagaggagcagaatataggagatacacttgggtgactggtaaagagccacttacatactatgacatgaacctgtcagctcaggaccatcagacctttttcacctgtgacacagattttttacgtccttcagacacagttatgcagaaggcttggagggaaagaaatcctccagctcgaatcaaagcagcctatcaagctttagaattaaacaatgactgtgccactgcatatgttctactggctgaggaagaagcaacaactattgtagatgctgaaaggttatttaaacaggcactcaaggcaggagaaacaatttataggcagtcacagcagtgccagcaccaaagtcctcagcatgaagctcaactgaggagagataccaatgtactggtatatattaattgaagattggcaatgtgtgcaagaaaattaggaagaataagagaagcagtaaaaataatgagagatttgatgaatgaatttcctcctcttaccatgttgaacatccatgaaaatctcttagaatcacttttagaattacaggcctatccagatgttcaggcagtcctaccaaaatatgatgatataagccttccaaagtcagcagcaatctgttacacagcagcactgttgaagacaaggactgtttcagaaaaattctctccagaaacagcctccacaagaggattaagcgcagcagaaattaatgccgtggatgcaattcatagagctgtggaatttaatcctcatgttccaaaatatttattagagatgaaaagtttaattttacctccagaacacattctgaaacggggtgatagtgaagcaattgcctatgctttctttcatcttcagcactggaaacgaatagaaggtgctcttaatctgttacagtgtacatgggaaggcagtaagtattcttttccaaaagtaacactaatctctctaactattcattgaattcacaggcagtctttttaaatgagattgtctgggtttccataaggatttgtcgttcagattggtttcaaatggaaattagtgatgagatatttggtttattggtagaaatgcataatgttatattgatcccacaaaagcagaatgagaaattg

SEQ ID NO: 63240 - DNA, 972 bp, Homo sapiens
cggccgcgctggccgagggccggggtcgcgtggcccacgcgcacgcctgcgtggacgagctgctggagctggtggtgcaggccgtgccgctgccctggctggtgggacccttcgcgcccatccttgtggagcgacccgagcccctgcccgacctggcggacctggtggacgaggtcatcgggggccctgacccccgctgggcgcacctggactggccggcccagcagagagcctgggaggcagagcacagggacgggagtgggaatggggatggggacaggatgggtgttgccggggacatctgcgagcaggaacccgagacccccagctgcccggtcaagcacaccctgatgcccgagctggacttctgacccatgggccagtggaggcggggaggaaaggccacctgcacaccccgatccctgctgccccctggtggccacacgtaagctcgaggccttggccttgacccttctttggaatcaggcccaactccggatctctgaccacctttttggtattggactctcccattttttccttgaacacatggacaaagaggcccgggggagcagggcctcgaaccctattcaggccaacttgagccacaagctgggttcttcacctatgtcctgctccctggctccatgaagcgaatccaaatctttccaagaggctgggcacagtggctcacgcctgtaatcccagcactttgggagtctgaggcaggtggatcatctgaagtcaggagttcgggatcatcctggccaacatgatgaaaccctgtctctacttagaaagaaagaaaaaaaaaaaaaacccggggggggggggggccccctgtagccccacttagttggggggctaccccaaaaaaattgtttaaacccccagggcccgggccttgcagggacaaaaaaacgccccagtggcccccaccctgggggacaaagcgagactccttttaacaaa

SEQ ID NO: 63241 - DNA, 681 bp, Homo sapiens
gcgggccgcgggaaggggatgagttcgggcgcctgccaggccctgcaggtggccgggtcgcaggccagccgcggaagcggagcggtaaccttacccccggcgacagccgccggtcagctgccagagtgtggcgctcccggtggacgcaggggccgggtttcgggcagtctcggcctccaggaggcgcgtcttggtccagggtccgtgaggactggctagatgggggctgcgtggcctttggtggcagggaggaggagggggtctccgaggcgggagaggcgggtttgggaaggaaggtgcgccaggctgaagctggggtcggagaagtgttgggtggagacctcactgtgggtgcgttcctcctctcctctccccaaaacgatggtgttaaaagctagggtcaggatgtggagcgctgcctgggcctcttcctttccgatggttatggagaatgagcctacttcctggacccaaaatccttttcttctgttactcatttatgttggttttaaaaggagctttggggcagagcttacttgttgcctcctactagagcgcctcattttagaactctggttcttccactacttccctctttgcaggcccctcggaaaaccacactgagagttgcttaaaaaccagcatgtaggtatttgtaagtgactttttcccttcaagttg

SEQ ID NO: 63242 - DNA, 987 bp, Homo sapiens
aatcgaagatcattagtcagtgcggtggaattcccagaatgaagtgtggatgccacctccagcctgcaggacggagccccctcccatcatcacacagtgcacctgggctctgcagccccttgcctccattgcagccgcagcaagaggcctccacttgtccgtcagggacgctccaaggaaggaaaaagccgcccccggacaggggagaccactgtgttctctgtgggcaggttccgggtgacacacattgagaagcgctatggactgcacgaacaccgtgatggctcccccacagacaggagctggggctctggtgggggacaggacccagggggtggtcaggggtctgggggagggcagcccaaggcagggatgcctgccatggagaggctgccccctgagaggccacagccccaggtcctagccagccccccagtacagaatggaggactcagggacagcagcctaacccctcgtgcacttgaagggaaccccagagcttctgcagagccaacactgagggccggagggaggggcccaagcccagggctgcccactcaagaggcaaatgggcagccaagcaaaccagacacttctgatcaccaggtgtctctaccacagggagcagggagtatgtgagtctccttcattgtgctgatggactaccagctggcagggccagggggtgggtgggcgtgaaagccctcccctccactggacagcactgccccccagctgagggaccagctctacttccacctggagttgcacagtctcaggctgggggcctcaggagaggtcacagcccctcagtctcttctccttcccctgcctgcaacaggctgcctgccccgccttccccaacacctcgctccatatgatagagcgtggcagctgggagcaggcccctgcccgtggtgggcccctaaagcaatagcaccgtaggccccctgccctcttagcacaagaggcccaggccctggcctg

SEQ ID NO: 63243 - DNA, 727 bp, Homo sapiens
gtcggggaattccacggacagacgcagacggacacagcgacatgccccagacacgttaagggactggttggccaaactcagacacgtggacagggatagacagaaagagacagaagctggggctacgtccatgtggacacagaccacagatgtgggcacacgaatccatccacctgtccacgtgcacacgtgaatgtagcgatagatatttggacatcaaatttggacaccaggtcacggagaaacacaaacaccacccaggaacacgcagacatatgcccatagcatcccacaggcccaggcaggaggtcccaccccagaccctgccccagacgctccctcaccctctcggccccctcgccctggcccccaggttctctgcagagatctctcctggacccccagcggtctccttggcgcccacgaacacaggcgtgcacacgcagcgcacatgcattgagacacacgatacctcgttccaccttggcgtcacggtgggctggaggcagcccccccccccacaacacttgaggccaaaggacacccctgtccccggggctcagcctccccctgggccgaggccttggcccacacagctgagggagaggcccagccctgagcctcccccaccaggactgggcctccccggcagcaagaccccggcactccccgccaggcccagggtggggtagatgggcccaaaggcccagccccacactcctttccc

SEQ ID NO: 63244 - DNA, 1862 bp, Homo sapiens
cgtattttgtgggagaggatatgggggtattttttccccggataaaaaaggttttttttaaaaagggagaaatgaagaatttttgatagataggtgtttttaaaaatgcgggagttagttattttttatatacttcttttttgaaggaaaatattagttttgtgattagggtaaatgggggggcccatgagaggttttttaaaaagggggccttttttttttttttttttttttttttttttttttttttttttttttttttttttttttttgccacttttgtattttattgtggaactgagtttttttttttcctttacatcaaatatcctcaatggaagaggggatattgcacacaaatatcataaaagcactacatattactttcactggaaactaattttctacattagatatgactggataggatagaagtgatgcaggattataagacataataccatacacagctgcagactgacacaaacaccattcagaacaagagagaggagtgtgaagtgcttctcagctgggctcaagaccacttctttccagtgctggaaagaggggctgcatgcagtgtaggaaaagcgtgtctctgaactgccacagggtgttctcgaaagggcagcccggtcttgatgccacttctccatggctcctgttttggggagctccaaacaagtgcagagaagctgcctattttttcccttccttttcagtttttgatgctgcctttaaaaatcaacttcatgaagtcacagattttttaacagtaaatagttttaataccaggtgaataacctaattgctttcaaagaaatgctcatccctaggctgcttttggtgtattgttcagttggttaaaagataaaagcttacagttcctttcaaatggaaacaggatctttttttttaaatctgaagcacaaaaaaaaaaagttattatcctaactcacaatatcattactgagcaggaacctcctgtgacaggtgactaaagagaggcaagaaaagcaaattcagaattgtagagcagctcctaagagctgaaatttggtaacagagggaaaatgaaaggtggtaagatttccattagcaaatgattaaatcttaattaaatgagtattggaaagctcctagactgcataagctattggagacacttaaaacattcatatacactggggaaaccattcactatgatatgtaacgttaagaaaaaaaatttttttgaactccatggaaaatggtgtttaaagaggggaggaggggaagttagtcattgtatccagtcccaccacaagactgagaaagcatgcacagggctcagggttttgagaaaggggacagaattggttaaaattgaaaatggaggatcatcgctaacatttagtctctgtagaattttgtttaagaatactaccaaaaaggtcatgatcatgagtgctatctcgatagaatcccatcatttaaacagagtgtaaattccttccactcaaatattcaatctatacaattggattaagtaatcagtatgaacaaagctcctagaagtctgtgtcgatctttagctctccccatgaatgtacatggtacattgtgatggctgttactaaactaatcgtgtatttatggaactagcaaaattaggttagtcacacaggcaggaaaggtgtctggaaggacaggagcaacctgtaatgcgaatattggttttcttggtatactcaggctctgtggtcattattgagaacaacggatggaaaaaggtactgatagatttcataggaaaaagagccaggctgactagtgacagtttttacatatttttcccattaaatcccatagcaaaaaaaaaa

SEQ ID NO: 63245 - DNA, 2297 bp, Homo sapiens
ggtgcgccagctgctcagcgccttcgccgccctgctggaggacgcgctgcggcaccgaggcggtgctggccgcgctcttcggggaggaggtgctggaggagatgtctgagcagacgccgggaccgctgcccctgagctacgagcagatccgcgtggccctgcaggacgccgctagcgggctgcaggagcaggcgctcggctgggacgagctggccgcccgagtgacggccctggagcaggcctcggagcccccgcggccggcagagcacctggagcccagccacgacgcgggccgcgaggaggccgccaccaccgccctggccgggctggcgcgggagctccagagcctgagcaacgacgtcaagaatgtgggggcggtgctgcgaggctgaggccggggccggggccgcctccctcaacgcctcccttcacggccttccacaacgcactcttcgccactcagcgcagcttggagcagcaccagcggctcttccacagcctctttgggaacttccaagggctcatggaagccaacgtcagcctggacctggggaagctgcagaccatgctgagcaggaaagggaagaagcagcagaaagacctggaagctccccggaagagggacaagaaggaagcggagcctttggtggacatacgggtcacagggcctgtgccaggtgccttgggcgcggcgctctgggaggcaggatcccctgtggccttctatgccagcttttcagaagggacggctgccctgcagacagtgaagttcaacaccacatacatcaacattggcagcagctacttccctgaacatggctacttccgagcccctgagcgtggtgtctacctgtttgcagtgagcgttgaatttggcccagggccaggcaccgggcagctggtgtttggaggtcaccatcggactccagtctgtaccactgggcaggggagtggaagcacagcaacggtctttgccatggctgagctgcagaagggtgagcgagtatggtttgagttaacccagggatcaataacaaagagaagcctgtcgggcactgcatttgggggcttcctgatgtttaagacctgaaccccagccccaatctgatcagacatcatggactcgcccagctctcctcggcctggggctctggccaaggatgggctggaggtcattcagttggcctgtctcttccctggaaaccttctgcaaagatggtgtggggtacgtggcttccctgtaaccacatggggcttggccatttctccatgatgagaaggactggaatgcttctccgggcaggacatggtcctaggaagcctgaaccttggcttggcatgccttctcagacagcacggcctggggctccaactcttcaccacaccctgtattctacaacttctttggtgttttgctcctcctgtggttggaaacttctgtacaacactttaaacttttctcttgcttcctcttctcttctcccttatcgtatgatagaaagacattcttccccaggaggaatgtttaaaatggaggcaacattttggccaacattggaaagcactagagggcaatgggattaaaccaacctgcttggtctctattagtcagtaatgaagacgacagcctggccaaccaagggaaaggaaattagtatctttagtttcagtcattccttgtaggatatggtttagctgtgcccccacctaaaatatcatcttgaattgtaatccctataatccccacatcaagggagagatcaggtggaggtaattggatcttgggggcggttcccccatgctgttcttgtgatagttctcacgagatctgatgattttataagtttgatagttcctcctgtgttcattctccttcctgccaccttgtgaagatgccttggttcctcttcactgtctgccatgattgtaagtttcctgaggcctccccagccatgtggaacagtgagtcaattaaacctctttcctttataaattatccagtcttgggcaattcttgatagcagtgtgaaaatggactaatacacttgtgtttatctgtaatttaaatttcatgtctttttctccttgccttacatagggtaaagaccaagaaatgccaaacgtgaactaaaatatgtagggccttcaacttttttacttcctccagtatcttaggaccatcgtaattcttgttagcatctctaaccaggaggcagctgagggaggagggaaagaagactgtaaaaatccccctcactaatgatcaactttggaataaagtgatgcccttcaaaaaa

SEQ ID NO: 63246 - DNA, 628 bp, Homo sapiens
caggaagggagcatcgaggatatcccacgcggtttcttggtgcctgtaagtaacatgagccacacacatcctgcagttgactcttaagtcagaatcctggtagggggccatagaagcctgtacgtaaggaacttctcctcattttccttcctttttactgaataagtccaattgtaaaatagtatgataatgtaaagaacaagtttcaggccaaatttcttgttctctcaagaaaattgtttctttttctttgagccatctcatttgaatttgctccaattgccttaaagacaccctagtggggagtcctttgggatgctcgcctttgtccccatgtctaacaaggatctctactacacccagaagtttttctaagtctagcaaaagctcagttactttccctttcaaattcccacctcctgcagagaagatgtaagtacagttagcaaagtgttatgaaagtagattatgaaatatgaatgcgaagtaaaatgatgggtctgaattccacagagtgaagaaagcattttagtttgggcaaagaggggttaaaagaaacaaggtgatcatggaagggaggaagggaaagcatgaacagcgttgtccagactgaggtgccagaaaatct

SEQ ID NO: 63247 - DNA, 2949 bp, Homo sapiens
ccccccccccccccccttgaaaccttatgaagccgtacgccgcacgaccggtccgaattcccggtcgactacgcgtccgcggagctgagtaagcctggcgtgctggtatcccaggtagacagcccgttctcgggctgctgggaggatcttgccatcagtgccagcacctccttgggcatggggccctgccatggcccagaggagaatgagtataagtccgagggcacctttgggatccacgtggctgagaaccccagcatccagctcctggagggcaaccctgggccacctgcggacccggatggcggccccaggccacaagccgaccggaagttccaggagagggaggtgccatgccacaggccctcacctggggctctgtggctccaggtggctgtgacaggggtgctggtagtcacactcctggtggtgctgtaccggcggcgtctgcactagtgaagccctgggctcttcccaccacccatctgttccgttcctgcagtacacctggcccctctccgaagccccttgtccctttcttggggattgtggaggctgggtcagaggggagttaagggactgcaggcctggcagcaggacatgccttggctgaaccaagtcctgagagcagcatctctgtccccacggtgccttgtgtgggtccccgtccttggctttgtgggtcctgggctgcccccagtgctccagaccttccccactggcaatccaggttatcatccatgtcctccagaggagcttcctcctccaggcctcagccctgttggcccaggtggagcaggagggaccactggaacatgtggtgcttgggaatgcctctcctgttgcattggtccctgaaggcctcagggcaggtatgtggtgtgtgggcgactccacaagacctgcctcccatcctggcagcccagcctgagaccgttgcattgaggcaggcaggagcggcagggtggctgctctccaggagcccaactgccttgagttcctgccccactgggccccctcccctgctgggcaatcctgggaaggtctggaggttcctgtggacctcagggaagccaggggcagctgtcaggcctgaggaagacctgtggagctcctctccagcctcctctttccctcccctctggtctccattctcttcagctccctacatgggctggggaggagacacctggtgggcagagctcaggcagaggtttggatttcagctccctcacttccggggctgtgtggctttggcagatgtcagacttctggtcttgcttctccacgtggacagtgagtatctggctcattcttcactgggttcttctgagattgaacctacaggtgtttgccaagtgcctggcccagagcaagtggccactgcttctcccatctctctcctgcccaacctggtagagctgagggcatgagaggcagagtgcacagtggtcaagggtgcagctctgcagcacaggcagcctaggcctgcgtcccaacctgcctctcaccagctctgtgaccttgggcaagggatttatctgtctgtcccttagttttctcacctgtaaaaggaggataagtatatatatatatttcccagtgttgtgaagattaaagttgtttatcgatgtaggtcttaggatgagtcctggcatttaccaagggttggatatatgttattatcactattaagtgttgagggtccaggcatgctgggcaacagggactccatctcaaaaaaataataaagatgtggggcctgtgggaggtggttaggtcatgagggtggagatcatgaatggggttagcaccttataaaacaggcttgagggagcccttctgtcccttctaccatgtgtggatgcagtgagaaggcaccgtatctctgaagcagagagcccgccctggacactggatctgctggcaccttgatcttggacttcccagcctctagaactgtgagaaataattttttgttgtttacaaattacccaggctaaggtgtttcattgtaacctgaatggaccaagctggtgtgaccctgttggaaaactggcagtatctaccaaaagccgaacatacgtataaactgatccagcagttccactcctgggtatgtacaccacagaaagctatgtccaccgagacattggcaagaatgtttctaaccacacgctgactgtagccccaaacctgaaacaacccaaatgtccatccaccaacccaaatgtccatccacagttgaagctacagtgaagtcacagggtcgaatactactgcacagcaacgaatatgaatgaaaatatcgctatgcacagcaacatggataaatttcacagacatgaggtcaagcaaaagaggtcagagtcctcatcatcaagagagaattcattgtatgattctcttcctacaaaaagtacagaaataagcaaaactgatccatggtgttagaagccaggggaacagttaacaggggagggatactggggaggggcatcctggagtgctggtctacctcatctgggtgttgatttcacgagtattgtcagtttgtttccagactccctgttggagatgtggaaataaaaaccacctaaacaagagcagagaggccatttggtcaaagtttgcaaaggagtcagccatgattgcttgtatttggcaggggtcaaaggcaggcagggactgtgaaatgttatagtggaaaaaaagggaaggctctgggtgtgctgtgattggagattgttggcatggggacagagcggactaactggaggggcatctttggttggttgggggggtatatttggctttctctggttggtctggagttggaagagggggtgtggtggctggggattgggaagaagctggcagccactaagttcagactgttctgggtccgattgctgctgaggctgtggtttggcttccttggcttcccag

SEQ ID NO: 63248 - DNA, 1966 bp, Homo sapiens
ttttttttttttgctacattttactttattttgttgtaaggaaaaccaattgactaagttgtccccaaaatgttagtgttcactgatcaagaaggaaatgaggtcagaaggcaaacttttcacttcttctcaaacataaattgcaagtatcacagaaaattgtaacaacacatgcaacacgggatggctttcaacacacagagagcctaagcaagaagagtgagtactgaaggtctacagaggtcagactgggagcactaccacaggaagtttgaatctatccacgcagctctttcctcccacagtccaggctcaacacctcttcctattccaaggtggcttatccatatgcagaaatccaggctgttccatatacattaatacttgcccagctgtgtttcacgaggcatctccataagccaagccccgactcaaattctgtacaggaagttcccgttgctgtcaaagaactctcggcccctctgcactactttgctgctgaagttatctggctcctctgccttcaactcctccagcttctgaccacttggcaacgcaccactgccagttcctctggggctctcagaatcactggagtacttctgcagctctcttggatgacctaggggtgcagcaacaggcacaaagctctcctccaggtcctggatttctttatttcttcccttccttctccttggtgtatttgtcctgtgagtgtctgactctatcactttcaaagctgtgctgtgatttgggtctttagatgaggcttcatgccctggcataagcaaagagcctgatacagagtggcctgcagggagcagctttgaggtatttccagagccccggaggtgctgcagcgagtgggcaagcccagctttcttaaggactttttgatcctgcttcagcttctgctccaatgtgggtaaaaacttgctttttaaaactcttcggatcacatcagtgctgacatcaaagccttcagccaacctgggaactgaccaggactctggaaattcctcatgtaaataccgtatctgctccatggcttcccacgtcagggtcctgggcggggcaccaggcgcctccatttgcctccgaattttctggaatcggattgcttgtttctgtcgtttcagggtgctgggggaagagaaccaatggcagaagccatgcgtggaagcagaatggatgtttgaagagcctcaggctaaatcatggagcgcccagccctcttctctttgatcgcaagggcaaccgggccatgttgccggcttagagctgctccgtacacccagaaagctaacacctagaacaataactgcctgtaagcatgccgaactctctaaactgatgatgaaatacgtcactaatgaagggaccagtggtcccaggggagctgaacacctgacgctgcgcccctaacaacgggtaagaagaaacaagggccgctgcgcaagcagcggcaggacacccggcgccaagggggcgcggcctggagcgccggggcacgaggccctgcttcaagctgagggcccggggagaagccggtacctctccacctcctgcagctcccgttcctccggctcccagtcggaatcggggtccggctcccggccaatagggcctgggcccgccaccccccgggtcgcgaacccacagcgagtgacggcggcgcaaacgcgcccgcccagcaagagactcagggtaaccgccatgtcgacgcaaaccagccttcagcagtcggctacgaaacagcagcggaagtagccggactttgatgatgacggaaccttgaacagagaagacctgagccggctggtgaactgcctcacgggagagggcgaggacacacggcttagtgcgtctgagatgaacagctcatcgacaacatctggagagtctgacatgacaggatggaccatcacctctctgaggtcagcacgcaatctccgtctcagacttg

SEQ ID NO: 63249 - DNA, 1318 bp, Homo sapiens
ttttttttttttggctcttaagggtctttaatggtttcattttgtggcccttccccccaaccctggtgactgtcccagcaagcagtcagtagaggtccccggagttcagtgggggcctggagatgtcggacttgtgagggaagggccactctccccttgtaacctctggtggctgctaggtggaagctgcagcaagggggtcccaagtgcagggcctctgggtgctacacatctcacagccagggcggtctggggcattgatgaaggtgcaggaaggacaggaccagctgggctggagtggactgggcaggctggaggcagctggctgggggcctgggggtagccccaatgatgggggaaacaagcgtccaagttccccgtccatcttctgggggtgctgagggctaggtcctgtggctggggcttctcgaggagctgacagcaagtagaggaaagcagggtccccatcctgccgaaccccgtaagaggcaaggctgcgctcaggcacacacaggcaccgtccgatgacccagcgttgcacggctggcgggaaaccgagctctgagaacacctgctcctggagagctgcaacagtgcagtgggggtggacctgcagggcaacgtgtgcagaggacgcggcggatgcggcagaggcagcgtcttcaagtgtgacctgcagcctgatggggccaggtgggaagcaggcctcctgaagctgaacactcagggccacacgatgctgggccaggacggctgccacttgggctgcccccttctcgtctccacctgcaatagcccgggccaggctccctgccagctcttctctctccgtcaagtttccagggctcctaggaagatctgcctcaggtggagggcccttgagtgtggaggcttccgggggactgggcagggagacagggcatgcttctgggcccaaggctggtggtgagttgctcttgctgccattctgtccttccacggtggcacctcggactaggactgcccaccgctgagcttcctgagggttgaggaagtgcaggctgagggttccaggccctcctggtggaggctgtagctcgtgctgggtggggcctcggatggtgtaggaaactgactcctgcggccactccaaattaacgttagagctggtctttgggggcgaagggtcagggggcgaagcaccggccacaactgaaggcggacgcggccttttcgccccaggggctcggcggacgtagatgcatccagcgtgcgactatcccagcgcctaacggcagctggacttcgctcccgggacctccaatgggctaccacctcc

SEQ ID NO: 63250 - DNA, 1598 bp, Homo sapiens
tatattaatgccagatatagtatatttcagaacaaataaactaatcagagacagagagggagactatataatgtgcaaaggaccaatccaccaactcctcgcctgacaaattcataaatgtctacgcaagaacaactgaaagtacttaacagagaactagacaaatccacaaatacagctgtatgcttcaatgtccccctttctcaacaatttatacaacaaccagatagaaaatcagcaagaatacagaagaacccaacaacacgatcaaccagcgggacttaaattggcaattttagaacacccaaccacaccagaatacacattgttatgggatgcattgtgcccagcccccccaaattcatatgttgaaatcagaacattattagccactagtgatttactaattaaaacaatgagaaattgctacgtacctatcagaatggccaacataaaagtgtgaccacatcaagtgctgtcaaggattcagagaaagctggatcactcatacattgctggtggggatgtaaaagattacagcccactctggagaatatctgtataatttttacttttaaaactctatgtgcaactaccataccacctcggaattacattccctgcatttatcacagagaaatagaatcttatgttcacacaaaacccatgtacttcaagtttatagcagccttgtttttaatagccaaaactggggaaacaatgtatacacgacttttgtgagatgaatggttaaactgtggtatatatccacagcatcaaatagtcctcagtaattttttttaaaaaaacaacaaatgattgatacccacaataacctggacgaatctccacagaattatggtgagtggacgaagggtaatcccaaaggttacatgtagaattccatttaagtaacattcttgaaatgaataaattataagagtggggaatagattagtagttgccaggggttaaggagggaaggaggagcagcactgaatagaaggggtcataactataaaaaggcaacatgatgaatcccggtgttgacggaaatgttctgtaccttgcttgtataaatgtcaatctcctggtactgtggcatttgcaatatttgcaaattttatttatttattcattcattcatttttctgagacggagtcttcctctgtcgcccaggctggagtgcagtggcgcgatcttggctcactgcaacctccgtctcctgggttcacaccattctcctgcctcagcctcctgagtagctgggactacagcgtgcgctccaccaccacgcccggctaattttttttgtatttttagtaaagacggggtttcaccgtgttagccaggctggtctcgatctcctgacctcaggtggtctgcctgcctcggtctcccaaagtgctgggaatacagggcatgagctaccacacctggcctggcttttttttttttcttttaaagacagggttggtctctgtcacccaggcagtgcagtggcatgatcatagctcactgcagcccaaaactcctaggctcaattgatcctcttgcctcagtcccctaagtagctagaactgcaggtacacgccac

SEQ ID NO: 63251 - DNA, 2715 bp, Homo sapiens
ccagcttcgctcccctgcgctgctgcgggaggccgtggctttcctcctgggcacagaccggcagcctgaagcccccggggacaacccccacaccctgtatgctcatctcatcgggcattgtgaccacctctctgatgagatcagcatcaccacactccggctgtttgaggagctgctgcagaagccccacgaggggatcatccacagcctggtcctgcgcaaccttgagggccgcccttacgtggcctggggctcaccagagcctgagagctatgaggacaccctagacctggaggaagacccctacttcaccgacagcttcctggattccggctttcaaactcccgcaaagcctcgcctagctcctgctaccagttacgatggcaaaacagcagtgaccgagatcgtcaacagtttcctgtgcctggtccccgaggaagccaagacctctgccttcctggaggagacaggctatgacacatacgtccacgatgcttatggcctgttccaggagtgcagctcccgcgtcgcctcctggggctggcctctgacccccacacctttggacccccatgagcccgagcgacctttcttcgagggccacttcctccgagtgctgtttgaccgcatgtcccggattctggatcagccatacagcctgaacctgcaggtgacctcggtcctgtcccggcttgccctcttcccccacccccatattcatgagtacctgctggatccgtacatcagcctggcccccggctgcaggagcctattctccgtgttggtgagggtgatcggggacttgatgcagagaatccagagggtaccccagttcccaggcaagctgctcctggtgcgcaagcagttgacgggccaggctcctggggagcagctggaccaccagaccctcctccagggcgtggtggtgctggaggagttctgcaaggagctggctgccattgccttcgtcaagtttcccccacatgatcctcgccagaacgtctccccagccccggaagggcaggtctgagccagcaccagggcggtgggagactcctgtccacacctctgccccagagctgcctcctgcctggcactgccgccacactcccctcctgggatggggcttctgctcccgggctcactcaaggagactgcggcatgttgaccacaccagactgggtttcagggaatgggcatgccaggtgccaaggagccaaacagatggctttccaggcagcaaggtccttggggccttcttggaggagcttgggtgacagccaggtgagcacccagaccccagaccctcatgtgctgtgtgcctggccccttctgtactggccatttgtggccagggccaagcctgtgactcaactccaggggcaagatggggagtgagctgatggctccgagactggtcaggagcccaggccagtgagatggggcctggagccttgtctgtgtcacattaggtaccatgggagctgctgagacctgacattttgtcccctgcctacatggcttggcccatggagaaggagcagtgaatgggatcgtcggggaagcccctcttcctgctctgctcccctggaaactgttgcaaaactcccagccgcctcatggcaaatgcccaaagcatgttccgcacccaggcgggggcccctgctaatgagaaccttggtgcagctgcagccaggaggggagcgggcccaggagccaggctcaggtccagctggttcctctctggcgccttctgaacccgtctcagcaggtccacagcacctgggcagaggtcagagaccaggggaggccgggccttgccctcccttctgcccagggcccagtgttcttgatagaagacccttctggggagccagggagctcaggggacagataagggaaggacgccccctgactccaggcccctgagcctggcgggaagtggctgcggcccaggcagccagtcctggtggtgttctccctgcatgccctccgtggctgggctgccaccccacccggcccgaatctgtcttgacctgcaggaatacacgggcggcgccaggcattacctcacagcgggactacacagttgctggctttgctcctgggcaaggaggagcaggccagagcctcttttgcttccttttcttgcccatgccgcttctagaagccaggcacaggttgccaagaggtgacacgaaacaggaggaaactcagtgacctctgcctctcccacattcctccccgcgggggaggacctcgccgctctgaagagcaccgtgcacatgtgggtgcacaaacgtgggtgttggtgtggacggggcgcagatctccgtggatgaactgcgtctggactcttagattcataaaatattcgagggtttgggagtcacagaccctcccctctcctcagtgcactttggcatttgcacggtgtcttccccggacagcacagcaataaatggtgtgattgcgtggacaccgtggctctgttcttggccaagtttccccaccttctgcccaggactccactgctaattcgggcccatcttcctccccaaggaagacaaattctttttctagcgctgcagcagggaggtggggtgggcggtaaacagacaggctctggcagtgcagatctgctgatcctcagcgcctgccaggagccagactcttggcggagcagtgccacttctgctgggctgacctgcagct

SEQ ID NO: 63252 - DNA, 1669 bp, Homo sapiens
ttttttttttttgtagcccaaggagtttagtctcctttgctcagacagacagatctttattagtgttttcaacttattttgctcacaacttcccagcaagaaatgtcttacattgcaaccagttctcacatttagatgtatgggtgaaaagtttcacaaaacagtatttgcctttactacatgatgcattctggcctactttattctgcttcattgctgtgtaatgctggtgaccacttgctaattgatttcccattttactaaatgggctgggacccacggtctgaaaaccctgccttaggctgcaagcatttctgtgatctctgcgagctactccatataggtaaacacacgcgaggtaaactaggaaacagcttctgcttttgcagattagaagtgaagttgacatcacgccaagtacgaaaaggctaaacagctgacaaaatttccacttgagcaaccctggggagcgcaaacaggaggaatcggggcaagggtgacttgaagaaagcactggcagatcacgcactttaaggcaactctacactgcacaatgtcaaataacctagcatggggcggcactaaatggctgcaggaaagccgagtcttcttccacatccggcggctcccctcggatgcgagcgctggcccagggtgtgtttacagaggtgagggcttcccgtggacccttctcgttgggagcgcttagcctcaggagcggattcagggcacaggcagaggacgtccacaaacaccacaggaagccgccacccaggggcgtggaaaggcccaatgcctcgtctgggattcacggccggcaaagcggcccctccggaacgggacagcacagcggctcacctctgcgcctctgggggtgcggggggagcctcgccctccacgctctctgggggaccgcccgccctagcccccgcctgggcttcgcgggtggacggttgggggccccgggcgccccccagcgcgtagcttttctccttctcgtgggtcttctggtgctcggctagggccaggctgaagtggaaggtcttccagcagccctgacaggcgtagcgcttccggccgccatggctgctgtggtgctccatcaggtgcgagagccacgcgaaggcctccccgcactcgccgcaggcatagggcttcccgcgggacaagcccggctcgtcagccccagggccctgcccggcctccagccctgcgctgtcgccggagctagagacgccctcgaggctctgcccgtccccatcctcggggtgcggcctcttggttcccagtttcgccgtgcccctgtccggggcaggctgctggatgacggactgcctctgcgatccggtggcagagtcggactccgcgtcctgggggtcctgcgggtccggggccttcccaggctgctcttcctcctcctcagtggtgcccgacgggggatcggcaagggcgtccccagggggcgcctccgtaggcagctcaggcagcacccccgcgggggcggcctcctcgcaggcgcacccagcgctctcctgccgcctcccgccttctgggaggctgcttccttgtggatctctttccaccaaccggagttcctcagtgtccagcctggaggcagcgtcaggctgggaaagctgatacccccacaggagcagcttccggtagctct

SEQ ID NO: 63253 - DNA, 996 bp, Homo sapiens
  misc_feature (1)...(996): n = a,t,c or g
ttttttttttttcgggcactggaaatcttttattcgttaatttagtttctggcaagtgtttcctcaaaatcatcatgtagttccttgaaccgtaaaaccacacattaaaaatgttattccactgaaaatgactcctatgcaaatatcgacatgtgatgtgtgtccaaatgccagagcattttgaggaaaagaatcctctggcaaataaaattaaggtataagctgagtcaggaatgatccgattccccaccccagggantgacccggagctggcaccaactcagcgaggtttggnagctgaaaccctgagttaataatgatcaaaagggacaagacaggaaggcctggggaccgtggacagggaagtgcgcagccctgattgccagtgggcggaacagggtcaggctcggggaagcaggaggggtggtgggcggtgggcgctgagcagagcaggcctggccgaggctgggggccactgtgcactgaggccagaggagcagggtggtgggggcagctttggaaagggactaaaaagggcctgagaagagaccactctggaaaggtgcatgtagaggccatgatcaaaacaaaaaaatcaagtttcctacgttcatgatagcatttggctgacaatgagttataaatacttggattctatcttccagataaaaacaccttccaggaaagggcactcacaacaggcgtgcccagttcccagtggggagggtggataaagctaagtgtttccgcttcaccactggaggacggttctatgtgggcggtcccatgtgggcggtcctatgtgggcgttcccatgtgggcggtcccatgtgggcgttcccatgtgggcggtcctatgtgggcggttctatgtgggcgttcccatgtgggcggtcccatgtggacggttctatgtgggcggtcccatgtgggcggtcctatgtgggcggttctatgtgggcgttcccatgtgggcggtcctatgtgggcggtcct

SEQ ID NO: 63254 - DNA, 1349 bp, Homo sapiens
ttttttttttttcgaggagggtctgggctagtttattttctctctggaggggtcttcagggagagcagtcccggctgctcaagcgggtgggaaggagcggccgctcttgctgaaaggtggctgggagaggtcctggtcacagtcggagtcagagtcccaggaggggagtggagggctcaggcactggtgccccttgtggcctcttaggctcgaggccttgggacaggcccccgagcacaaagtgaggctgtctatggagttctgcagcacgtgcacagcagaccatatatcactcagttccttctggaggtcatccttccagcagccactggctccctgcggtatctcttcagtctccggacaggcggctgtctcatgaccctgctgcttcatcttggtcaggattttgcggcatttcacctgcgttttctgcattttctgaatgttcaccaagttctctgagatctcatcctcctgcgcttggagcttctgatagatgaaggtcacctcctcccgcaccagttccagctcctcccacaggaacttcttgctgtcccggatctcctgggccagcagctgcaggcagcgagtggtgcgggcccgctgcatctcctcactgtcacgcagggtcttctccagcccctgaaggccttgggtcagggccccatacagctcctgccggccctgctccatgccccacttgtgctcctccttctctccctggcggcctgtggggctcagcacctcttcaagctgctgaatcttgatttgctgcaagcagctctccttctccaacatggtcactgagtggttcaggaactcgaaagccttggtctgggcctgtaactggctcttgagtgactcaagttcacatcgcaggagcttctgggagtcgggaatcatcacaatggtcttggctttgactttggaagagctggtctccaagggcttcagattcagcccatttggccccgacgcctctgttctcggaatccgggtgctgcggattgaggtcccggttcctaacggtgggatcggtgtcctcgggatgagatttggcgtttcctcggggctttggtgggatcggtgtcctcaggatgagatttagggtttcctcggggctttcgggatcttcacctaatatccggtattattttatgagaggagtggtcttggctgtcagaactggatcccttcggactagtgcagagcaaactcttccccttctacttccacatctccatgggctgtgccttcatcaacctctgcatcttggcttcacagcatgcttgggctcagctcacattctgggaggccagccaggtacgtgggtttgagtgccacacgaa

SEQ ID NO: 63255 - DNA, 1438 bp, Homo sapiens
ttttttttttttccttgtccagtgctgtttattgagtccatcatcagaggcaggaaagacgccactcatcacagagggcatgtgggctgcgggcaggggcttagggtcctgcagaggacaagtagctgggacagcccttcaccccgacaccccatggcctctgtgaggcaggctgaggagacaggacagggaatggccaggtgcagaatctgcacagccccctgccgggtcgcagatggccaccacccagcaggcccctggcactcacccacaggcagttccccaccccacttcccccttggaccctcccaaatcagggccggggagtgagacccagacctggccccgatggcaggaggcaccctagctgcttccagggccaggaggggtgggtgggatacagtgaggccaaacaaggcagaagcgggtgcagtagtccctggctactgcccagcttccgggactcccacagctgggctcagccttggtcctggcagtgctgggctcagaaatacagggctggctcgctgcggaagtccgagaggtcattctgactggcgggtgtgagcatggcctccacgggcgggggctctgcctccctcggggcctgctccagcgcctgctcctgccacttgctgaaggccacagagtgcttcggggtgtagctggacaggcctgagctaccctctggcagccgagagctctcgggtctcacgctgctcacaaacgtggcccggggcaggaagagtgcaaagggcttctcctctgagccggatccctcttcctcctcttcctcttcctcctcctcctcctcctcctcctcctggtggtccacctcttcctcctgctctagggagctctcggaagggtactcaaatgtggtctgcaggcttttgtcgttgaaggagatcttcatcttctttcttgaggagccagccttggtgaggcaggacttctgcagggccaggtagccgccaatcacctcgatctcatgcacggtggggtagcgctttttcaacgtgggccccaggaggcaactagcctcctcctcctcggcctcccgtggccaaggctccctgttggcctgactgaagtgctggtcctgcagagtccctggcttcctcttgggcaccactgtgaaggtgttgctgccccggggctgaagctctgccacgcacccgggcctggcagggtgcagaggcctggcagggtgcgggaggtagggtagtttggctgcttggggggcctcctccgagtctacctcatcgatgaaggtgacaggcagccccggcctcacatattcccggctattcttggccaagccaggaaccctgaggccctcagcaggctcagcttcttccgaagcagccggcaggaaggggggcggtgaggacggcctcctcgtcccaagctaggcgtaatgatggtcacagatggt

SEQ ID NO: 63256 - DNA, 851 bp, Homo sapiens
ttttttttttttcagaatccaaaaggactttattttctggcactgggaggcgccctgaggccacagccttttcccagggctgctggcagggtcccagggctgctggcagggtcccagggctgctggcaggggttgtggtcctgttgagcagaggagcgacgccgctgccctggcccccgctgtccctatgatcctgcactctggggtgggagctacatatcatccttggacaccaggcagtagaagtctgtgcgggcactgtagtttcgcgagccgagatccgagacgtccacttcgctgctccggctctctcccagcgagaccccactggtgtgcggtggagctgatggctctccaaaaacaggcccccggacacccaggtcgccctcagggtccgggtccacctctgagtccagggcccggccctcagggactcggcctcgaagaatcagcatggggtccttgtcgtcctgcagctgcgtctgggggtctccttccaccggcctgtaccgcaccttccgcggcagcgccagctgcacttctttccaaaaatcggaggaaggagtcacggagccgggcctccagagcagcaaggtcaccaggtggcggtgctggcgcagcaggcggagcgccgggtgcgcggggtcgcgcctctggccctcgaaggtgatgaagatgggtctgcgggtgagctccagcagccggcacaggccctccctgcggggcgggaccgtcaggggggtgggtgctacgctggggcccacccaaccccgcgcgggacccaccggaagctgtggctgcaccaggcccggctcaggaaggcgtccgaaagcaccacgatgaggcgtcgg

SEQ ID NO: 63257 - DNA, 1058 bp, Homo sapiens
ttttttttttttgcataaaatactgtttattttgtcctttaggaagactaaagtagtccagctcccctacagcccagtcttgcccccaccctgcactctgtcgccttagttcctggggaccaagcatctggcatttctcaagcagaccctctccttgttgctccttttcagtccctggagtctggcttcccaaagccaaagctggaggagagctcattgctgaggaagcagggttggagcctgaggagatgcagagggcctggacccctcgctggatcccagaggcccaggggcagagatgctgggacagggctctaggggaccactgggtgactcttgaggggctagaagcagggctgggtgacttttgctacggtgggctgcaacactgtctggcttctcaaagcgcttgccgcagaattcacaggggaagcgcaaggcagccaccgtctctgcatgcttgcgctggtgccagttcagggaagccttctggcggcaggtaaacccgcatatctcacactgcaggggtttttctccagtgtggatacgtctgtggatgacaaggttgctgctagtgcggaaagaccgggcgcagaactcacagatgtagtcccgggtgtcactgtgcagcttcatgtgctccttcaggtgtttcttaaagttgaaagacttcccacaggctggctctgggcaggagaaagacttctggtggatgtgctggtactttttgtggtgctagagaaggaagtgggtggtagggagagaagaggcaaaagcatagccaccttccacggagagatgaactgagctgacccggcaggcatgctcctctgtccccttcctggcccctgtgccccagcagttctccctgtcatggcctgctcgtttccttgaggatcagtcctcacctacaccatgagtaccacacccatcccatcctgaccactcaactctcctgtcacccaattctgtgctttacttccattatctcacctccttgtcacactctcaccctgcaatgtcctgcaatgttccctgtacaaagtatcactctgggt

SEQ ID NO: 63258 - DNA, 462 bp, Homo sapiens
tttgagattcgtaggcagtgtggaggaattcacccggctcgaggtcagcaggaaggggcaggtggcatgggtccaggcgggactcagggctggggtgccactgctggagactgtccggaggcccctccagggcaccttgccattgccattgtcgctcatggccatctggtcccgtttcagggaacaagaggaggatcagatgctgcgggacatgattgagaagctgggtgactgggccggggatgctgagggctgggctggctggctgggtgggccggggatgctgagtgctgggctggctggctgggtggaccgggcctccagctgggggtggggggggggcgggcttcggagccccccctcaaccttggtgactggacaggtaggctcaccctgtaaggggaaagcttcctcccctccctaaaatagccatgggcatctggtgaccgtgcggacctgggg

SEQ ID NO: 63259 - DNA, 2855 bp, Homo sapiens
cccaaagcgggacaggtccagcggttgttctgtgtgaagtcgcgcggcttccacccacgcagtgttctaagtgaaggccagaaactcgctcgccatgtcggctgcagaggcggggggtgttttccacagagccaggggcaggaccctggccgcgtttcccgcagaaaaggaaagcgaatggaaaggcccattctacttcatcctgggcgcagacccacagtttgggctgatcaaggcctggtccactggggactgtgacaatggcggtgacgaatgggaacaggagatccgtctaactgagcaagccgtccaggccatcaacaagctgaaccccaaacccaaattcttcgttctgtgcggcgacctcatccacgccatgccagggaagccgtggcggacggagcagacggaggacctgaagcgagtgcttagggcagtggacagggccatcccactggtccttgtcagcggcaaccatgacattggcaacacccccacggccgagaccgtcgaggagttctgccggacttggggagatgactacttcagcttctgggtcgggggcgtcctgttcctggtcctcaactcccagttctacgagaacccctccaaatgccccagcctgaagcaggctcaggaccagtggctggacgagcagctgagcatcgcgaggcagcggcactgccagcatgccatcgtcttccagcacatcccgctgttcctggagagcatcgacgaggacgacgactactacttcaacctcagcaagtccactcggaagaagttggcagacaagttcatccacgcaggtgtcagagtcgtgttctcaggccactaccacaggaatgccgggggtacctaccagaacctcgacatggtggtgtcatctgccattggatgccagctgggcagagacccccacgggctccgagtcgtggtggtcaccgccgagaaaattgttcaccgatactacagtctagatgagctgagtgagaaaggaatagaagacgatctcatggatttgatcaagaaaaaatgacgctccttcccgttcccgttcacttttcacttgcactatttttttattttgccagaaacagcagctgcacacaacctcttgctgaaatataaaaatagcccaggcaggtttgtgaatttatgtccttttgcataaatcagagagctggggccctgtcctgaattatattcaaaatagaactgcatttcctttaaaatggagcgaatgatcctggaaatcagtttttaaaatattagactatctctgcatggatgtttgaataaattctcctaatgctgtgtttctcaactccacttttgaattggattgtattctggttagcatatggtcaaagtctgcctatcgacctcaattccaatctgacagccaagtatgatctttgataattccttaaacaaactacacctgattgtattaaattgtggtcacgattcccaaaacgctaggcaaaacaaagttcatctcctttcctttccagcggaacgaacagctgtctgccttgttgtgagagccatgcagacttattttgacaaggagccaagtaggcaccatttactgttcaattctgagacttctgatgataggaacagaatgcagttgatacagctcggagcttaaatttgccttcctgggtgcctagaaaagtcacctttgcacataaattggccatttctgaaaatctcctccaagagactgaaaccaaagctctaaaacgccgcttcttcagtctctggggagcacgttgagttggttcacatccacattctggctgtgtagccactccacagatgggtggtctcttgggatcagaatgcccctccactcatgagactcttcattttgtccactttgacaggaaaagtgggaatgtatgcagagctctcaaaagaaacaaaaaaggccaaaacggtgccttcagccacatcctctgaattggccctgacttggactaaatgcactaatgcaaaatcccttgacaaaagcgcataggttatttcaaaccagcattgttttttatgtaacctgttttaccgcatcttctcagcagcttctgaccactgctcaattttctcctttacagccattgttctggtggacaaataacctaggtactccaaatcctggcaggaaaaatatacagcattatgaaacagcactcagtaatcctaaaatgatttccaaagctggttacacatgacctgcaaagtctattaaattaaaagactttctcattacagagtttagtcaacgtagcaaaaccatgggaaattaaatggaaagataattaaatatgtaaattcataaggaacaaaagacgagaagttaattatacaataggctggtgacaccagagttcattgttatgtgccacaagaaaattaaattttttaaaaaactagaacgctcttcttttagtgttttgctgaaatcctgttttgtatttgtttctttacaacaggtgtaggtataggaggtcaagaaaaggagttcggtaaagggcatagctaataacaaccacacattgggccaggcgcagtggcttacgcctgtaatcccagcactttgggaggctgagacgggcagatcacctgagatcaggagtttgagaacagcctggccaacatggtgaaactccatctctactaaaaatacaaaaattagccaggcatgctggtgcacacctgtaatcccagctactcgggaggctgaggcaggagatcgctggaactcaggaggcagaggttgcagtgagccaagatcatgccactgcactccagcctgggcaacagagcaagactctgtctcaaaaaaaaaa

SEQ ID NO: 63260 - DNA, 1014 bp, Homo sapiens
tgccacggagatcacgtccagcggcttccgcctgggctggccacccctgctgaccgcagactcgggctactatgtgctggagctggtgcccagcgcccagccgggggctgcaagacgccagcagctgccagggaacgccacggactggatctgggccggcctcgacccggacacggactacgacgtggcgctagtgcctgagtccaacgtggggctacgcctggcggttaccccgcagctagccccggccccatccccgcccagagccgggcgttcgtgtgggtccgtgggtgataattgagagcgtcagacccaggactgttcagggaggagccccggtcagactcccacgtgtgaagaccgggccccaagtggcaagggctggcctggggcgggcagcttgggtcctggacgttgataggaagcggaaggggaatcgcgggaagctggcccaggtcaggtccgcaaaggcttctgaagaagaggaagggcgagtaggggcacctggacgctgatggtggccaggatgctcagctggccaggagggcagcacctgctggggacggtggccctgccttcatgcccaggacaccagctgggtccagctagcagccactgggaatcagaggaatggggcagagctgggcattcaggaccttgaggacacgtgaccccacccgcccaccgccactatcaggccccgggaccgcactgacaggaaaccttccgtcgtgagggagcacttcccaggggccgcagggacgacactctccagggaggccccagcaaccacaccatcttcttgctgtgagaggtctcaccccgggctacctcctgtcactactcactgccctggggtccgtgggcaagttgcccagggtgggggtgcctagccaggtgcagtccccgccccgcctagtcctcggcgtcacgcaatgctcacctcgcctcttccccactaacatcccagactttaaaattcagtaaatcagatgtacaccgagaaaaaaaaaa

SEQ ID NO: 63261 - DNA, 438 bp, Homo sapiens
caatgatgtccttggtccctgtggtggaattcgtctcatccagcggctgcggaactgggcgtccggggtgcgcggggcggacagggctgcaccatggggggcttcgggctccgtgtgtccgggacccgctcctgctcctcacctccctcctaagccgggacccttcgctctccccgaatctccctgggaacccccagctagtcaccccttcagcccgggaccctctcctggcctgggaaccactcaggcctgggatttccccagtccccgaccttcttagccttggatctgtgggcccggactctggctttgctcttcacctgcaggacccacatccgtttccccgagtgttcatcccctgccttcccttaaaatgcgcatccccggaccatccctggtcccttgccctctcctttcctctctcctggggtgccttgc

SEQ ID NO: 63262 - DNA, 1266 bp, Homo sapiens
gccggaattcagcacctcccttgccctcaggaggaccccagcggcagcatctgaaacgtccgtatttgagcagcagctgctggactcccaccggcagcagggcgccctgctgtcctcctgggcccagcagcagagcacactcatggcccagcaaaacctgctgctgcagcggctggccgagcagagccagcgtctggccgatggcgtggaggccctcaaccggaccctcgagaggctggtggaagcacgccctacccgggaagcctcaccctcactccaggacggtagtcctgccagtggagtggcccaggggcctgctggaggctcccaggacagccccaagggcacccactcggggctcgaggtcttctcagggatgatcttgaaggtggaggaggagatatagggctggtcgggggtgctggcagagccaaagggcaggagcagggcctccagtctttcccctgctgagtccaggcaggggagaggtggcagtgactgggtctccagggcaccgggacaactccagtccaggagaccggaaggatgagaggatgtgggctgtctacctgtgatgtcgcgtccttgccattgcctgtagagggtggtgacctgcagggaaaggctgcagagagccgacctgtgggactcagtggaccaggtctactcagggatgatgctgttggaggctccaaccccatgtggcagcagctgcgaagtctgcagcccagcgtccctggaagcaggggaggtggggaagatgcactgaggggccccctgctcactggaactctggaaagggtggctcagccaggctctaaaaaggtcccaagcgtgatctggtgtgactcctgaaagcccctgtccctttggtgggcatgcacacttggagggcagggctcctctgccctacgtggttctggcccaggggaaccacatcccatatgcctggaataatttctatccaattttctgttataaatacataaatatatatatatatatatatgcctatatattacttggtactgtatggggctgggatgacattttgtacctgtagatttttcttgcaaaaagtatttttttacataagcataaaatgacaaagcaggcagcagtgcggctgctgacgagcacgagagttggagcctgcttctcgggcgtggcaggcaccgctgctttcatcctccctgcgggggcctgggcacttccctgcgtcttcagatccttcttcctccattacctactttgactcttgggaga

SEQ ID NO: 63263 - DNA, 1554 bp, Homo sapiens
ttgaggtggcgcggcgctaagatggcggcggcggcggcggcggccgtggcgggggtggggcgcggtggcggtggcgcggagccacggcaggagcggagccgggcccggtgctgggccggcgtcgaacgcagcgaaggccggaggatggaaccaggtgaggagctggaagaggagggctctccaggtggccgtgagatggcttcaccgccgagcacctggctgcagaggccatggcagctgacatggacccctggctagtgtttgatgcccgcacaacgcctgccactgagctggatgcctggctggccaagtacccaccatcccaagttacccgctatggggaccccggttcacccaactcagagcctgtgggctggattgcagtgtatgggcagggctacagccccaactccggggacgtgcagggcctgcaggcagcctgggaagctctgcagaccagtgggcggcccatcacaccgggtaccctgcgccagctcgccatcacccaccacgtgctctcgggcaagtggcttatgcatctggcaccgggcttcaagctggaccacgcctgggctggcattgcccgggccgtggttgaaggccggcttcaggtggccaaggtgagcccacgtgccaaggagggtgggcgccaggtcatctgtgtttacacggacgacttcacggaccgcttgggtgtactggaggcggattcagccatccgtgcagcgggcattaagtgcctgctcacctacaagcctgatgtctacacctacctgggcatctaccgggccaatcgctggcacctctgccccactctctatgagagccgtttccagcttgggggtagtgcccgtggctcccgagtgcttgaccgtgccaacaacgtggaactgacctagaggggccaaattggggagactgcccactcccccctccatgctggggttggatcctcctgtcttcctccttgtcccatgaaggccacaccccccagctctggggactcctaggtcacttgggaactacctgcatcttcagtccccttgaacttctgccctctgttcagggctgacacaagccccacaggctggggggctccggttccctgagggatgagccttcagcctccctttgtaatgctgctcctctccactgcccagcaccatgagttgggtgcagacacctagaaggagagacttcttggaacgctcatcccccgctatacctccccttcctcctgcatctccccttctttccttccccctcaggagagagaaaacttagtgcttccagcccttcttggagccttcatggtccaggggtaggggccccactggcctgagcatgccattttgaggggagggtagttgtgcctacttatcccctggcagaggggatgccaggaccatggacatgaggcttgcccatccctgccaacttacacagcctgtaccactgtccccccttccttggctactttgacatgtgcctgctcctggcatttcaataaaacccggcttgggtctgtgtcttgagtgttttttaaaaaaaaaa

SEQ ID NO: 63264 - DNA, 887 bp, Homo sapiens
cgtccgatatcttaaactttttgagtgccaacctgtctacacaagtggaaaattccacacctgacctcatgtgacagggcatagtcaaagcacaggtgcacgacacagttgatttagcgtccccaagggaaaaaaaagacccacccagcccccttcaactatagtataacttttccacgcacacccaaattcccccacacaagcacgcccacaatgtgtaataaaatggcacgtgtgcaggctggacgcacccaacgcatattccccacgatacctcacgtggggccgagaactccatgcattactcactgtgggtttttgcttattctctgcagtgtcatgtaaaaatattactgaaaatgtcgaaaaggcctgcagatccccctatgtgtaacagtgatcagaaaaagaggaataatttatgtttatcaatagcacaaacagtcaacttgttggaggaactgaacagcagtataagtgtgaagcgtcttacagaagagtatggtgttgggatgaccaccatacatgacctgaagaaacagaaggatacgcttttgaagttctatgctgaatgtgatgagcagaagttaatgaaaaatagaaaaactctacgtaaagctaaaaatgaagatgtgaatagtgtattgaaaaactagatctgaaggcatcacactgaacccgtgccactcagtggtaggctgatcatgaaacaagcgaagatctatcctgatgaactgaaaattgaagggaactgtgaatattcaacaggctggttgcagaaatttaagaaatgacatggaattcaagttttaaagcatctgcagatcacaaggcagcgtcgaaactcattgacgagtttgccaagattatcgctaatgaaaatctga

SEQ ID NO: 63265 - DNA, 603 bp, Homo sapiens
agctggggagaggtagagggtggcataagaacaggaatgagaataagagtaaatataaaagtaaagaataggacttcatcagggtgaaagtattggaggataccttgtcactgaagatcttctgtccacttcaagagagacttaagggtggcaatttgaggtaaaaccaggagccactaaataccaagagcctgagaaactgcttgggtaatatgactagtaaaggcccgtccgttaatgggactgtatagaggtgggaaggctaaactgaagaattatgtctgacagaagggaagaaatgactgtggtggccttctcagaccctgtgggaaaggtctctacccatctagtgaaagtgtctaccctgaccaagtggtattttggtttcctgactccgggcatgtgggtaaagtcaatttgccagtcctgggcgggggaaaatccctgagcttgatgtgtagggaagggtggggtggggggggttgtccttaacaatccctgtggggtagtggaatagctcttggaacacatagaagtgattttacttgaggataaatttctctattgaatggtaatgagagggtctaatagactggtctatgg

SEQ ID NO: 63266 - DNA, 1798 bp, Homo sapiens
ttagcagcaagtgctgtttcctggggcaggggcaagtacccctcaaccccttctccttcacccttagcggcaagtcccgctttcctagggggcaagaaccccccaatcgcttatttccgccgcaccccaacctcttatctctgtgccccaatcacttatttctgcaccctgacctcttatctctgtgccccaatcccttatttccctgccccaaccccttctctgctttcctggagggcaagaaccctccgccccttctccctgtctctactcttttctctgggcttgctccttcactatgggtaagcttccaccctccattcctccttcttctcccttagcctgtgttctcaaaaacttaaaacctcttcaactcacacctgacctaaaacctaagtgtcttattttcttctgcaacaccgcttggccccaatacaaactcgacaatgattccaaatagccagaaaacggcactttcgagttctccatcctacaagttctagataattcttgtcataaaatgggcaaatggtctgaggtgcctgacgtccaggcattcttttacacattggtccctccctagtctctgctcccaatgtgactcatcccaaatctttcttctttctctcctttctgttccttcggtctccaccccaagttccgagtcctctgaatccttcttttctatggactcatctgacctccccccttctccccaggctgctcctcgccaggctgagccaggtcccaattctcacttagcctctgctcccccaccctataatccttttatcacctcccctcctcacacctggtccagcttacagtttcgttcctcgactagctctccccgatctgcccaacaatttcctgttaaagagatggctgactatcctgacttcatcagagcaggctggtgcctggccttcctggaatgagtgggtgttctgacaggcccccagtttgtcccatctgcaccgccaagaggtctccgggtggccagaggagcaaagttgccttccaagtgcctgttggtgcctgggagaacacagcaggagtgtcgtgcggcccacagcgcagtgcatggtgattccaggcgctgaacaactccccttgacccttgggcctgcatctgactcccggctgcagaatcagaagctgagtccaggcaaccgctcggccactcccggtcactcctctctggacacccagttactaaagtcagcaaagaagatgcggtaatcaccgcctgatctccacatggtgaacacaacactctcactaacacctccttgaccagtcagtcttcagcactgggggtggacaggcaggttttctgtgtttaccagaatcgcacaggctaagcacaaacatggaaccagagttcccaggtgaggaaacctcactcgcagaagcccaggctgcaccccaccaggtgatgcagtgcgcctaggctgtgggtgctaggagccaagtgctagggactcgtcatgagtgggaatccccacgttcctgtcactgctgtcaaacagaaggtaaacagtcttacgaatgtaattccttaggaagacttgtacaaacttttattaggatatctatttatttaatactgaactttggcctactttgtgataagactataaacaaattgaggaaatcactatttctcacttctgtatttctcaaaaaataattttgatacagagttcaatatactgtgtactactgatcttctattatgaaagcaaagcatttcatcaaaacaaagtattttaaattatgagtgaaaaaaaaaaaa

SEQ ID NO: 63267 - DNA, 927 bp, Homo sapiens
  misc_feature (1)...(927): n = a,t,c or g
gctggccaagtaagccactaacctaggtcataaagagttagctttgggaccatttatttccatgatcaaaataaatacatctgggtttaacctgaatcaccatttagtaacatagtcatcagtttcagtacctttgtctttttccaggtaaaactctttagcctcttatcaaacatgttatgccacatctaaattccatattttatgtaatataaggaaaaatagttttatttgtatgatttatacttcatgtgttaggaacctgtgactacatgttctgaactgttagtaagaaaaatggtattggataccttactctttaagatttttaattatttttggtaaaactgggaaatagccgtctgatttgcattttattttcttttgtattttaaggatatggaatattatcttgtaaaatggaaaggatggccagattctacaaatacttgggaacctttgcaaaatctgaagtgcccgttactgcttcagcaattctctaatgacaagcataattatttatctcaggtaaagaaaggcaaagcaataactccaaaagacaataacaaaactttgaaacctgccattgctgagtacattgtgaagaaggctaaacaaaggatagctctgcagagatggcaagatgaactcaacagaagaaagaatcataaaggaatgatatttgttgaaaatactgttgatttagagggcccaccttcagacttctattacattaacgaatacaaaccagctcctggaatcagcttagtcaatgaagctacctttggttgttcatgcacagatttgctttctttccaaaatgttgtcctgctgaagctggagttcttttggcttataattaaaaccnaccaatttaaatnccacctggtactnccatctatgnatgcaactccaaggtgtccgtgt

SEQ ID NO: 63268 - DNA, 448 bp, Homo sapiens
tttcgtgctgaattctgcgtcttcctttaggctgcggcgagacaatccccagagccccgcggcccggcctcggggcagccatggactcgcaggaattgaagactttgattaattactattgtcaagagagatatttccatcatgtattactggttgccagtgaaggaattaagaggtatggaagtgatccagtcttcaggttttatcatgcctatggcacattaatggaaggtaaaactcaagaagctcttcgagaatttgaggctattaaaaataaacaagatgtatcactttgttctctacttgcactgatatatgcccataaaatgagtcctaatccagatagagaagctattctggaatcagatgccagagtgaaggaacaacgtaaaggagctggagagaaagccttataccatgcaggcttatttttatggcacattggtcg

SEQ ID NO: 63269 - DNA, 499 bp, Homo sapiens
  misc_feature (1)...(499): n = a,t,c or g
tttcgtcatctctaggatctctgcatctctggggactctgcatctctttagtctctgcgtctctaaggtctctgcatctctggggtctctgcgtctctagggtctctgcatctctggggtctctgcatctctggagtctctgcgtctctggagtctctgcatctctggggtctctgcatctctggggtctctgcatctctggggtctctgcgtctctggagtctctgcgtctctggggtctctgcatctctggggtctctgcctctctggagtctctgcgtctctggagtctctgcatttctggggtctctgcgtctctggagtctctgcatctctagggtctctgcatctctggggtctctgcatctctggggtctctgcatcttccgcagcggctgtcccacagcttatttacaagcagcttcgggcaaatgcctgccatgtttaaatacatctccttttaccacattanacctattgaacctctttacgtgtgttt

SEQ ID NO: 63270 - DNA, 560 bp, Homo sapiens
tttcgtctgcttttctgctcctggaagcggccaaggggggaagcggcgagtcaacatggagctttcagcggtgggggagcgggtgttcgcggccgaagccctcctgaagcggcgcatacggaaaggacgcatggaatacctcgtgaaatggaagggatggtcgcagaagtacagcacatgggaaccggaggaaaacatcctggatgctcgcttgctcgcagcctttgaggaaagggaaagagagatggagctctatggccccaaaaagcgtggacccaagcccaaaaccttcctcctcaaagcgcaggccaaggcaaaggccaaaacttacgagtttcgaagtgactcagccaggggcatccggatcccctaccctggccgctcgccccaggacctggcctccacttcccgggcccgggagggccttcgaaacatgggtttgtccccgccagcgagcagcaccagcaccagcagcacctgccgcgcagaggcccctcgggaccgggaccgagaccgggatagggaccgggagcgggatcgagaaagggagagggagcgag

SEQ ID NO: 63271 - DNA, 860 bp, Homo sapiens
ggacccccgagcgtgaaccccggagccggtggcgctggggccagaggggccgggcggtaggtgatggcggaggcgaaggggcgacgggacctgggcctggcccgtgtgtgtcctcagaggcctggcgccggccgttgctgtacggtgagccccagggaggcggatctgggccccgagaaggacacccacctggatttgccccataggcccggcccgggcccctcgggagcaaaacagccttggtgaggtggacaggaggtgacctcgcgagcagacgcgtgcgccagcgacagcagcccgccccggcctctcgggagccgtggggcagaggctgcggagccccaggagggccggagccctcatgacttcagtgacctgcttctgcccctctaggtctatcagccacagtctctgcaagtttccaagagcagcagaaaatgaacacattgcaggggccagtgtcattcaaagatgtggctgtggatttcacccaggaggagtggcagcaactggaccctgatgagaagatagcatacggggatgtgatgttggagaactacagccatctagtttctgtggggtatgattatcaccaagccaaacatcatcatggagtggaggtgaaggaagtggagcagggagaggagccgtggataatggaaggtgaatttccatgtcaacatagtccaggtaagttagtagattatcacatgttaaaaaacactcatccccgacctttgggagtgactaaagagttgtttatatgtactcggtaccctcagtaacacctcccaacccccaaatatcactttccttcccacacacataccacatacatgaactcttttgttgattctaca

SEQ ID NO: 63272 - DNA, 2544 bp, Homo sapiens
ttttttttttttcccattaaaaaaataggtttaatgcaggtgggtcatggcatgacgaatttcacaggcaccggggacagcaggcggccaggtgctcagagggcaccaaggtgccacaactccctgcagcgttgacaccgcacgagcggcaccaccagccccctcccgcctcccgtcccaccttcaccctcagccaagaggcttgggtgactctgagtaatacgttaacaaaaaacaaagcttctttgaggaaacagcatgacttagtgcaaaagattctctgcagcaagaaatgaggcccacgcagggaagctcccgcctacctgcccagggcgtggacgcagcccgggctcatcagaggtcatccacagaagctgccgataaattagagagcacggtttacggccagagattttttgctttctctacctgatttagggtttttcaaaaagtttctcttccagtggcacacaactgtcctcatggctcctgggccactggtccgcctgacagggtagggtcacaagtcccacccatgcccagagtgtggggacatggatttgaggtgacactagggttgtcagtaccacaccctgtgtcctgctctagggtagcctctgcctgttgtccttgcaatcattattcagggcgccctcccacttgcccccaaagtcacacggccatgggcagtccaccatagtgctgccgtgactgcaaggctgaggagcagagcaaggggtcctgggtgagacctcggcccatggtggccaccctccctgaacacaggcatctgcgcccctccagcccacctgcccctgtgccatcatttgggccccccagacactggaggacagcgtgagataagatctcagcatatacctggggctctaagatgctgctggtgccacacaggctctggggctgtgtttgccgcactgaggcctctgccgcctgctccggacacttgggacacgcgtttccatcctggctcactgaagcctcgatctcccaggctttctttgacggtgttccctcaaagaaagaggcccaaagccctcccccgcaaaaaaagccagaaaggaatggaggtgcctccgcagaaatccagagcatctgcaagacatcctcacagccctcccagaacaggcagacaggccagtgttgctggagtcagcccctggctcccagggttccccccaggccagcccctgagctgggagcctgctgaggcccctcccacctgagcccttctccggccccccgctagactgcatctacacaatccaaggggaccctgaaggctggctggggactcaggacccacacagcccctcaggatgacacacacagggtggtccgcgggcagtgccaggcctcaggcggcccagggcagagtaagcagctttgtggcagtgtggtgtgtcagcgaggggagccttccgtgtcccgttggctggggctggggccagggcacgcagaaggggctgtgcagccaggagggcccccctccggaattgctcctgggcacacagccctctgtgtccaggggcctcccagggtgatgtctaaagtccctggcagctgtggtcctggagagaggcccacagagaggcggaacggagggcccaccccgcagtacgacccgaagacatgtgagcaggagccaccggcaggtgggcgctgcccctgagagtgcatacggggagggtgggtccaggaagccagcctaggggtggtgtccgcgcccccatcacagaagtctcagccctttcttttctctccgtgggcgccgggcagcagcgactgcctgggggatgggcgaagggaaggcgctggccgaccccacccatggagagaacacagccacaggccgggacgatacatcaagctcgcacccacggccctcacatgtccacgaagaccatgaagcaccagcccaggcccccgaccagcagcatggtgacgtggatgccatagacgagcagctcgttcaccaggcggaagtccacgcgccggcggcccagcagcagcagcagcaccgacagcttgcgctggaagcgcagcaggacgcgaacgcccaggtactgtaggcagaagagggcggccagcgcaccccagagcgccgcagtgaacaggctgcagctaaagtagagtaggaagcggatgaagccgtacagccagcgcgtcttgatgtacacgtcgaagttgttgtacttggtgcgggccaggtgggaggcgcgcacgggcccgcaggccgcatgcaggcaggtggtgtgcgggccgtggaaggagcgcacccgccgcggaatgggcatgaccggcattgggccccggcggcggcggcgctaggtcgcagtggcggcggcggtgtccaggcggcggttggcgtaggggtcatgggcgcctaggcctgggagcccgcagctgaccctggggggaggcgtcggcccggtgccctctccgcggcggcgccggcgtcccggacctcggggccggccggcggtgctaggggccgggcaagagggtgcccctgtccctcggggc

SEQ ID NO: 63273 - DNA, 553 bp, Homo sapiens
caactggcatgagtcattttgaccagcagattaatcaactgtaaaaccgatcctcacacaaagaggctactgaaaggatgaaatcactgacttggatcttgggcctttgggctcttgcagcgtgattcacacctggtgagagtcaaagaggccccaggggaccatatccacctggaccgctggctcctcctcaaccttttggcccaagatttgttccaccacctccatttttccctgtaaattctccaactgatcctaccctccctactcctgcaccccaaatatgaacaactgcagcaggtgccaccaccaccacaaaagacaccactacccttgtaactactgcttctgctacccaaaatatgaattccaacactgcttccaagagacatttacataaaattgcttccatttttggatgagaatgaaaaattccaaaagtgctgagctttggggagaaataatcttagaaagaaattgtagaaaaaacccatgcagacataacatttataccaatgaggcaaaaataaagaattgagcaccaaaaaaaaaa

SEQ ID NO: 63274 - DNA, 824 bp, Homo sapiens
  misc_feature (1)...(824): n = a,t,c or g
ttcgagatcgtagtccgtgtggtggaattcggcgggcgtctgcttggccaggcgtgcacagtgcaggagctcccgctgcagcaagggcaggtttgcctgtggggtggggaaggagggcctgggtagcatgcaggggtgcacagccctgctcaggtccgagcagagggggcctgggctgggtggccgaaagctcaacttgacctcgggcctcaaaggtcaaggtgctcgacctctctgggcctcaagttccttcctagcagtgccatgggagggtggcgtgggagggtgggcacagagcttcgcaggagtgcctcacctgggccacacggcgatgtggggcatgtgggacttgagcccagatcctggactcccagggtggggctttcccaccgcacccagctccctcccatggcgtggtctggagaaggcgagaggacgaaggggcagcagatcatggttggtcttcccgcctgcacccgccctgcccagcaggcaccacatgacccaacacagctggggaaatgcaggctcagagagggggaggcagccctgggcctacaggcggctcacacgagggagctgggagtgaaacccagctgggattgcctgcagtgtgtctgctccagccctgatgggaagccctgaggttcagcttccccttcccttcccgctggtttccagccttggccttgatggagcgtggacctaggacgtggacacccacgttctgtggctnnnnnnnnnnnnnnnnnnnnnnnntgaggacggcctcaagacccacgtgtgcgggtaaagactccgcagcatgcgggcgaaggacggcc

SEQ ID NO: 63275 - DNA, 1228 bp, Homo sapiens
  misc_feature (1)...(1228): n = a,t,c or g
tttttttttgagattagacagtgctccgtcggccgccgcaagacacttttaatatccctgtttcccaggctgtagataaaggggttgagcatggaggtgaccaccgtgtacatcactgcagccactgcaccctttctgggggaagatgacacatcatctgaactgaggtaacctccaacgcctgttccataaactcagcaaacaactgacaggtgagacccacaggtggagaaggctttatacttcccacctgatgatgaaaccctcagaatggaggaaacaattttagagtaagagaaaagggtccctgagatgggaagaaaaccaaatatggcagcagggaaatacatgattatcttattggtgaaggtgtcacaacatgcaagatgggggagttgagaagggtcacagaagaaattaggaatttccacatccttgaagcaggtcacttgtaaggcaatcaagttgtgcagctgggagtctaaaagactgagaaaaaaaaaaaaaagacaacaaaactagaaaggcacagaaacacgggttcatgatggtgaatgatatagcgggtgacagatggctacaaaccagtcataggccatcacactcaggagcatgtctctcttccatgcctccaaaaatggcaaagagagacatctgagtcaggcagcctgcataggagatgactctgctgtgagactggatgtccacaatcatcttggggaccgtggtggaggtgaaaccgatgtcaggcaaggacaggttggagaggaagaagtacatgggggtgtggaggtgggagtcagggctgatggccaggatgatgagcaggttccccagcaccgtgaccaggcacatggacaggaacagcccagcaaggactggctgcagttctggatcccctgagacttcttgtacatgctgtagcactgctgcagcaccgagctataaaccttgtccaacaactcctcctcttgatattcaataactggttttccatctttactgtttttcaattataggattccgaacaacctctccttcccgcggccagaagcgcgggttgtagatgaagaaactcagcagcgccggcaggaactgcttctcctgggccgccgagggcccgctcccagccccggccgccgctgcagccatcccggccgggtccccacctcgggagcctcacgaaatcgtcgacccggtnntccggnccggtncggcaagaggtact

SEQ ID NO: 63276 - DNA, 938 bp, Homo sapiens
ttttgaatttcgattcactattccagagtggtggaattcccccgggagccggtccccggcgtccggtcgcccagcccttttcaggcttgggcccgcatggaggggaccgtggagtcccagacgcctgacctgcgggatgtggagggtaaggtgggcaggaagacccctgaagggctgctccgcgggctgcgaggcgagtgtgagctgggaacctctggcgccctgctgctcccaggggcgtctagcaccggccacgacttgggggacaagatcatggcgctgaagatggagctggcttacctgcgagccatcgatgtgaagatcctgcagcagctggtgaccttgaatgagggcatcgaggcagtgcgctggctgttggaggagcgggggacgttgaccagtcattgcagcagcctcaccagcagtcaatatagcctgacaggcgggagcccaggccgctcaaggcgaggcagctgggacagcctgccagacaccagcaccaccgaccggctggacagtgtctctattggcagcttcctggacacagtggcccccagcgagctggatgaacagggcccacctggggctccacgttccgagatggactgggcaaaagttatagctggtggagagagggccaggactgaggtggatgtggcagccaccaggctagggagcttgagagctgtgtggaagcccccaggggagaggcttcaaggtggaccacctgagtcaccagaggatgagagtgccaagctgggcttcgaggcccactggttctgggagcagtgccaggatgatgtgaccttcttgtaacaactattccacccttttgtaatcctgtggctcttttatccattagatgtggtctcccccaaaattgattctccctcagtctgacactaggaagaggctgccctgaaatcaaaaaaaaaaaa

SEQ ID NO: 63277 - DNA, 804 bp, Homo sapiens
ggaggcaggaggatgaagaggggggaggtgactccctggaagttgatggggtggctgcaactccagggaaagcagaggccaccagggtcctcccaaggcagtgcccggtgcaggctgagaaaagtcatggggctcccctggaggaggccacggagaagatggtatctatgaagccaccaggtttccaggcatccctggctagagacgggcacatgtcaggcctgggcaaggctgaggcagcccctccaggccctggcgtgccaccccaccctccaggcaccaagtccgcagcatcccaccaaagtagtatgaccagcctggagggaagcggcatctctgagcgccttccacagaagcctttgcaccgaggcggtgggccccacctggaggagacctggatggcgtccccagagacagacagtggctttgtgggctcagaaacaagcagagtttcacccctcacccagactccagagcaccggctctcccacatcagcacagcaggaacattagcccagccctttgctgcatctgtgcccagggatggagcttcctaccccaaggccaggggttctctgattcccagaagagccacagagcccagcacaccccggagccaagcacagaggtacctctccagcccaagtgggcctctccggcagagggcacccaacttcagcctggagcggacactggcagccgagatggcggttcctggctcagagtttgaggggcacaaacggatttctgaacagccccttcccaacaagacaataagcccacccccagcccccgccccggcgc

SEQ ID NO: 63278 - DNA, 1440 bp, Homo sapiens
agttcttctagcaaaggaggctcttcatcaaaactgtcaatgtaaggagattgtgaataataatctgagttggatgctggctgaaaaaattgtcctgcgtaacccgatgacatgagcatctctgatggaacaaaggaggcaggctgaggctgctcaccagcttgttgtgtgaccactccactacccggcgccaagacgcgctgatgtcacgacagcgtgcggcgtgcagacgtcggcaagctgcgccgccgcttcgggttgcttccggatctggtacttgggcagagctccccggggttcattgtcttcgcttcacaggatctgtttgagtcctgtccaccggatcctacggggggtaccttcgaaaaaaaacgggctatgctgctgttgcgtgaaaaacttgacatgtctaggtttcctgttgaaaatattagaaatttcagtattgttgcacacgtggatcatggcaaaagtactttagctgacaggctcctagaacttacagggacaattgataaaacaaagaataataagcaggttcttgataaattgcaagtggaacgagaaagaggaatcactgttaaagcacagacagcatctctcttttacaattgtgaaggaaagcagtaccttttaaatctcattgatacaccgggccatgttgattttagttatgaagtatccaggtcactttctgcttgccagggtgttttacttgtggttgatgcaaatgagggaattcaagcccaaactgtagcaaacttgtttcttgccttcgaagcacagctatcggtaattccagctataaataagatagatctgaagaatgctgatcctgaaagggttgaaaaccaaattgagaaagtgtttgatattccaagtgatgaatgtattaagatttctgctaaacttggaacaaatgttgagagtgttcttcaggcaattattgaaagaatcccccctcctaaagtgcatcgcaaaaatcctctgagagctttggtatttgactccacctttgaccagtatagaggtgtgatagccaatgtagcattatttgacggagtggtttccaaaggagataaaattgtatctgcacatactcaaaagacatacgaagttaatgaagtaggagtcttgaatcctaatgagcagccaactcataaattgaatgtatcctctagaccaatctgaatataacaatctgaagagtgctatagaaaaactgactttaaatgattccagtgtgaccgttcattgggatagtagccttgctctgggtgctggctggaggctaggatttcttggacttttgcacatggaagttttcaaccagcgactggagcaagaatataatgcttctgttattttaacaacccctactgttccatataaagctgtactgtcatcatcaaaattgataaaggaacatagaaaaaaaaa

SEQ ID NO: 63279 - DNA, 1165 bp, Homo sapiens
  misc_feature (1)...(1165): n = a,t,c or g
gtgtctgtgcctgagcagcgctggagccggagccggttcccgggtcctgcggctgaggagcccctccgctgtccacggcccctaccggcggggggcggctgggtccctcggcggagctcgggagatgtgactgcctgagggcggtggtggtgtcagcgtccggggccgggggagggggtgtctcgggcagagacccccgggcttggggcagctgaggcggccgggcctcctctacacggggcccgccttccgctgtctgggccgcgagagtccttcgtcccttacagccccgccccggctttgggacactgcgggtggtctgtttcccccagcttgggacaccccgttttctgaggcgtggaagagcgtcgccccggagtaagctgcccgtgccgcgccccgacagcttccctcagccccaagccgccccttattccggatcccggccccaactttggccacggagcctcccattcaaatccctcccttgctgtcaaggggtctccccttcccccaaggtggctcccgcgagcctctaatgccctgacttcttccaatgtcacctacggcccccttagtctcagctcagccaaaaactttaatgcaaaggaaaagtctggattggttccacaggccttttaaaaagcggacttaaaagttgctggcaatgcattccttttcgtcagagtcgagggcaaactcgctgaaatctgggtgacccgtgtccttttccggagagcaaagcagagaagcgagagcggccactagttcggcaggaaatttgttggaagatgaagaagctaagatagggggttggtgacttccacaggaaaagttctggaggagtagccaaagaccatcagcgtttcctttatgtgtgagaattgaaatgactagcattattgacccttttcagcatcccctgtgaatatttctgtttaggtttttcttcttgaaaagaaattgttattcagcccgtttaaaacaaatcaagaaacttttgggtaacattgcaattacatgaaattgataaccgcgaaaataattggaactcctgcttgcaagtgtcaacctaaaaaaagtgcttccttttgttatggaagatggtctttctgtggatttgactttcaaattgctggactttntgggagattgccagcgaatt

SEQ ID NO: 63280 - DNA, 2112 bp, Homo sapiens
gatatacttatttttttttactgtgtaacttttttttccaatttagagaaccacatcctcatccatgctgcttactatcaatagtggcacaagtgtcaaattttaaggttacatttttggggacccctctttcttctgttctagctattacctttcttgtgtcacctagaaaaggaccagtccttaattgtattttaaaaactgtgatcatgggaggcttaaaatgggtcataacacgcatcaagttggttatttcctgggctacataccttggatagaatagcattatacaaacaagtttcttttagagtcctggtacacttataataaccataaaataataggactgtagcaatcttttgtcctacctcagtgacttgatgtatatactggaaacagttctcaatctgaggaaggtcagttgaagtccttactgtacaagtccaaattttaaggaaaatgagtcccgcaatgagtttcctcatgcttcgcctgtgcgtggaccagtcagcttctgggtgtgactggagcagggcttgtctccttcttcagagtcactttgcaggggttggcaaagccgctcccatccacgtacagctcccagtctactgatgtttaagggtggtctcggaggttaggcctactagaataaactgagtccagcacctctaaacagttatgtttaactgggctctctgttaccaggagtaaggtggctgggttagggtgttggaaacttcaatggttttgtggggattttcacagagcaaggtttggtatctagttagtctagcatttattagctaatgatgtcctttggtatttattaaagtcaccaccagcatggggagactttctgtttaggttttgcctaagagttagctcatctgcttcttgtgctaacagggcagttgctgccagggcccttggacatgggggccagcctttggaaaccccgtctagttgttttgagagataggcccctggccttgaccagggccctacagtctgggttaaaactccaactgtcattttttctctttctgacacatggagtgtaaagagttttgtcaggtcaggtagccccagggctggggccgacatgagtttttctttttaactcatgaaaagctcgttgctgttggttgtaatagatgtagtttatctaatttacatttttattgactgtcatctaccaaaatattgacttcagtcctgtaactatttgatttcaagctttaaattgatctggtattccttgcggggctccaattgcatttaaatatatacgagagttgaaagacccataaggggcttctctccctttatgatgtcttattttttttttcctctggttgatgaaatgccagggtgaaagggatagccaaatggactaaagcacaagtgccactctagttattcagcagagtgcccagtaaaggtccaccacaataccaccacgcatccgctcggggatgaacaagggctgactgattgataagctcttgaaaattcttaagctcactgcatcccttcaggtctccaaggaatgctaagttttctccctgttgttagagacatgaagtgaacttagtgttcgggagatggaagctggatggccctcgggggctgactcgcagggtgccagacttcaggatatagcaggagagagcttggcatcgacttattactccaggctatagaatcctggaaaagagctaccatgcagcccacacctggtcgactggaggacccaccttagtggaaaggggacattctgagcctctgccctgccatgtgcacaagcataacaattgcttttgtttaacgtgcagatggaatatttgatccatttcatccaggcatttgcatcttggtatcctgtcttaattgccaaagtttgttttaagtctttaacttctatgatcctttagtaaaatgaatgcttcctttagcacctatttttgttagtttttagaccaaagaaagctaaacaccattttatatttaataatgcttcttgtatgatttttataccagagaagctaaattttatctttatattagtgtgttattaatgttaaacttaattttaataaaaccttgtagaca

SEQ ID NO: 63281 - DNA, 1073 bp, Homo sapiens
gacattcgtgaccatcattacgcctagcttggcacgaggccgggactaggttgcgggagaaagcctgttgcgtggaagataaggcggcgcgggaagtggacacagggtgggctggagatctaactggactctcgctcctgctggctggacatggaggatttggaggaagatgtaaggtttattgtggatgagaccttggactttggggggctgtcaccatctgacagccgtgaggaggaagacataacagtgttggtgactccagagaaaccacttcgacggggcctctcccaccgaagtgacccaaatgcagtggcacctgccccccagggtgtgaggctcagcctaggccccctcagtccagagaagctggaggagatcctcgatgaggccaaccggctggccgctcagctggagcagtgtgccctgcaggatcgggagagcgcaggcgagggcctggggcctcgccgagtgaagcccagtcctcggcgggagacctttgtgctgaaggatagtcctgtccgagacctgctgcccactgtgaactctttgacgcggagcaccccctccccaagcagcctgacgcctcgactccggagtaatgataggaaggggtcagtcagggctctccgggctacatctggaaagaggccctccaacatgaagagggagtcacccacttgcaatctgttccctgcatccaaaagcccagcatcttctcctcttacccgatcgactcccccagtccgggggagagccgggcccagtgggagagcagcagccagtgaggagaccagagcagccaagttgcggggagcagctgctaaatcttcctgtcaactgcccattccctcggccatccccaggcctgccagccgaatgccactcaccagccggagtgtgccacctggcagaggtgccctacctccggattctctgtcaactcgaaaagggcttccaagaccaagcactgcaggacacagagtgcgggaaagtggacacaaggttcctgtttcccagcgactaaatcttcctgtcatgggtgccactcgcagcaatctgcagccccccag

SEQ ID NO: 63282 - DNA, 816 bp, Homo sapiens
  misc_feature (1)...(816): n = a,t,c or g
cccacgcgtccgggaaatacaaatgagtaagagtagccaaaacagtaagttactcatcccagtattaagactgtgcagctacagtgatgagagtgtagtgctggtaagaggactggcacgcaggccagtggggtggaatggagcccggaaagtgaaccacaaacttttggttcacagaggtaccaggataattcaagggggaggaattgtcttatctacaggtggttctggcaacagagtattcacaggaaaaatggtgaacgttaacccttgcatcatatgcaaaaaattatttgaaacaggtcataagaactaaaaccatcaaacttctaggagaaaatacagggaaaaatctctgtggccttgaccatgcaaaaatttcttgggacacaaaaagcatgagccacaaaagaaaacgttgataggtgggatctcatcaaaatttcaaactctctttctttgaaagacagttaagaaaataaaaaggcaagccacgccctccaaaaatacatgcagtacatatacaggacaaaggacttatttctagaacctgnnnnnnnnnnnnnnnnnnnnnnnnnnnnnnnnnnnnnnnnnnnnnnnnnnnnnnnnnnnnnnnnnnnnnnnnnnnnnnnnnnnnnnnnnnnnnnnnnnnnnnnnnncacagggtatcattatttatcagggacatgcaaattcacccatgagctacctgaacatacttgctagaatggttaaaatgaagaagagacagtcttcattgttgataaggatatggagcagttgaaacgctcacacgttattgataggaatgtaaaa

SEQ ID NO: 63283 - DNA, 837 bp, Homo sapiens
ttttttctccaacgaagtcttatattttaccattctgcgtgtattagaaagctaaatttaaacagcaacaataagaaatcttccccagtggatccctcgagcctttcgggaaaatgcaggtttctggctgacaggaagaagaaacagcatccaatcggcacttgtgtctcaatgaccaatcaaatttcgccttacattgcatcgctgggataaacggagctggacgactcagtctcttggtctgtggctgctgcggttacctggatgggcgagcacctctgaggctggctttgttacctgggcaataagggactagcagttcagccgttttctatgcctgctggatttgtttgtatttgttcccagccactgctcatgtaatgtactcccttaaccaggaaattaaagcattctcccggaataatctcaggaagcaatgcaccagggtgacaacgctaactggaaagaaaattatagaaacatggaaagatgccagaattcatgttgtggaagaagtagagccgagcagtgggggtggttgtggttatgtgcaggaccttagctcggacctgcaagttggcgttattaagccatggttgctcctagggtcacaagatgctgctcatgatttggatacactgaaaaagaataaggtgactcatattcttaatgttgcatatggagttgaaaatgctttcctcagtgactttacatataagagcatttctatattggatctgcctgaaaccaacatcctgtcttattttccagaatgttttgaatttattgaagaagcaaaaagaaaagatggagtggttcttgttcattgtaatgcag

SEQ ID NO: 63284 - DNA, 1095 bp, Homo sapiens
cgcgcctggctgtcgcggttgccgggcaacgcgctgtccatgtcgcgggcctcgctgggactccctgggagatgaggccgcgaggtctcccgccgctcctggtggtgctcctgggctgctgggcctccgtgagcgcccagaccgatgccaccccggcggtgacgacagagggcctcaactccaccgaggcagccctggccaccttcggaactttcccgtcgaccaggccccccgggactcccagggctccagggccctcctccggccccaggcctaccccagtcacggacgttgctgttctctgtgtctgtgacttatccccagcacagtgtgacatcaactgctgctgtgatcccgactgcagctccgtggatttcagtgtcttttctgcctgctcagttccagttgtcacgggcgacagccagttttgtagtcaaaaagcagtcatctattcattgaattttacagcaaacccacctcaaagagtatttgaacttgttgaccagattaatccatctattttctgcattcatattacaaactataaacctgcattatcctttattaatccagaagtacctgatgaaaacaattttgatacattgatgaaaacatctgatggttttacattgaatgctgaatcatatgtttccttcacaaccaaactggatattcctactgctgctaaatatgagtatggggttcctctgcagacttcagattcgtttctgagatttccttcgtccctgacatcatctctgtgcactgataataaccctgcagcgtttctggtgaaccaggctgttaagtgcaccagaaaaataaatttagaacagtgtgaagaaattgaagccctcagcatggctttttacagcagcccggaaattctgaggtgggcccttcagaaagaaagctgcagctctactggggaggcaagagcttgtcattgaggaggcttgggccagaggcaggaagaccagttaggagtctgtggaaatcgcctgggcaagcaatggtggccttccagcaaggacaggtgcagtgagagtgaccaggagtgcaagaactgtgctttccacagtgctattggccgga

SEQ ID NO: 63285 - DNA, 1368 bp, Homo sapiens
gccaccaggccaaggaatgcctgcagccccggattcctcctaagccgtgtcccatctgtgcgggaccccactgaaaatcggactgttcaactcacctggcagccactctcagagaccctggaactctggcccaaggctctctgactccttcccagatcttctcggcttagcgactgaagactgacactgcccgatcgcctcggaagccccctagaccatcacggacgccgagcttcgggttactctcacagtggaaggtaagcccgtccccttcttaatcaatacggaggctactcactccacattaccttcttttcaagggcctgtttcccttgcctccataactgttgtgggtattgacggtcaggcttctaaacctcttaaaactccccaactctggtgccaacttagacaatactcttttaagcactcctttttagttatccccacctgcccagttcccgtattaggctgagacactttaactaaattatctgcttccctgactattcctggactacagctatatctcattgccgcccttcttcccaatccaaagcctcctttgcgtcctcctcttgtatcccccgaccttaacccacaagtataagatacctctactccctccttggtgaccgatcatgcaccccttaccatctcattaaaacctaatcacccttaccccactcaacgccaatatcccatcccgcagcatgctttaaaaagattaaagcctgttatcactcgcctgctacagcatggccttttaaagcctataaactctccttacaattcccccattttacctgtcctaaaaccagacaagccttacaagttagttcaggatctgcgccttatcaaccaaattgttttgcctatacaccccgtggtgccaaacccatatactctcctatcctcaatacctgcctctacaacccattattctgttctggatctcaaacatgctttctttactattcctttgcacccttaatcccagcctctcttcgctttcacttggactgaccctgacacccatcaagctcagcaaattacctaggctgtactgccgcaaggcttcacggacagcctccattacttcagtcaagcccaaatttcttcctcatctgttacctatctcggcataattatcataaaaacacacgtgctttccccaccgattgtgtccaactgatctctcaaaccccacaccttctacaaaacaacaactcctttccttcctaggcatggttggatactttcgactttggatacctggttttgccataacaaaaccattatataaactcataaaaggaaacctagctgaccccgtagatcctaaatcctttcccccggacgcgtggg

SEQ ID NO: 63286 - DNA, 1544 bp, Homo sapiens
agatacgccagcttgcacgaggcgcttgactgccgaattcaatggcctgaccctgaccggtcgaccccgtctttcccgacgtcacagcaccgaaggccctgaggacccgcccccatgggcggagaaagtgactagcgggggtcctctctctcgccgaaacacagcaccagaagctcaggagtctggtcccccttcagggctgaggcagaaactgagccgcatggagccagtggagctggacacccctggacacctttgccctgactcgcctgagtccagccgcctgtccctggagcgccgccgatacagcgcctccccgttgaccctccctccagccggctcggctccctctccgcgccagtcccaggagagtctgccaggggcagtatctccgctaagcggaaggaggcggagtccggggctgctggagcggaggggctcggggacgttgctcctggaccacatctcgcaaacgcggccgggtttcctaccccctctcaacgtcagtccccaccctcccatccctgacattcgcccacaacccggaggtcgggcgccttcgttgcctgcccctccttatgccggggcgccaggctctcccaggaccaagcgcaaattggtgagacgccactccatgcagactgagcagatccgcctgctggggggcttccagagtctaggtgggcctggggagccagggcgctgagaggagtgagaggagccaaggagggtggggattaggaccttaatgggataggtgggagaaccagcttacacacacaccacgaacaaagggatctcttgcatgtgctcatgggtgcacagtgcacccacacatggttaaacatgtgtccataagcacagtactcttattagcaagaaagaataagtactctatttactgggtatatacacacatgtattcatgccctggtcatttcacatgcatatgggattacttgtgtacctacaggcacagcatatcaataaacacacagggctagggtcccaaactctcttgcatttgttcagaagcagtagggaacccttacttatgggcagtctccgatgtctttgccctcctgcagaagcaatcccttgctttccatgtatgccctgaaacacagcctatcatgattttgcacactctctccgtggacatcccagcccattctgcaggtcttgcttctttctccaggcctggctccttattcacaccctgcttctaaccccaaccacttttcaggatatctttttcactcttcttgggggttcctgcagcaacccccagcctcagttctgctgctgtctttactgctctcaacttcacttctcaacttcctgctttttattcccaccctgttcctccaacaactacaacagattgtctcattttcccagggggtgggtcatgggctctaagctgctcttctgtctgtctgagcttatgaacacccccacaggtagaagtggggagaaaccctaaatcactcctctctccacttgacatatcaaataaatgtgttcagaagtcaaaaaaaaaa

SEQ ID NO: 63287 - DNA, 765 bp, Homo sapiens
  misc_feature (1)...(765): n = a,t,c or g
ttttttttttttcacagcggtttcaggctttattaacaaacggtgtaaaaaaccagacggatctggaggaagggacagggctgcccgtctcagctctcaaccttcccagagaggggccaggcctggcagccctgtgcgtcgcgcctcctaagcagtcaaccttgtcccctccaaggacaggcatctgacccaatccaggtcccagggaggcggagtcgcaaaccctaactctggggtgtattctgctcggcctcctctccccctccccagatagctctcccagcctggggcacggacagcacagactttgcagacatcacccggggaggtttctcagtgcagacaggagctgaggtaggggttggagaggctgacctcgagaggcccccgagggccaggaaggaaaaggagtcattccactctgagaagctcaaacacaacagacttcacactgctgacgggtggacagaggccaggctcctcccctcggcaggcctctgtttctgggcccagggtggttgaggactcactgagggagagcaggtaaaagaacccgcagacagtaggcgatcatcaggtgctggcgcccctccctcctcccctgccctggctgtcagtctgtagcttcacaggtctttgctgaattccctcaccagcgtgtagcccaggcagccccagcccccctcggcgtggtagccacagccctccggacgcgtgggtcgacccgnnngnccngccgatgcgatgatccaaaannnntgcccc

SEQ ID NO: 63288 - DNA, 943 bp, Homo sapiens
ccgagggatgagccggcagtgggcaggggaccacgcacctggttgaagggactgggagcccgcactggggaactgccggacgcaggccctcgggcaggagcatctggcagagtggggggcgtggcaggcaccctcctttgcagggcgaggtggggcctctgcagccatcctggacaggccggggtggcggcagctttgcccacgtggaagcggggtgggtctcacttgcgtggtggcccctggccccatcttgcctgctgcggcctggggagcaggcgctgggtggaggttctgcctgcttgctgctcgttccccgggcatgcgtgggcagcggggggcatgcgtgggcagcagggggcgtgggcagcgggggcatgggcaggaccacgtgggtcgtgatcgtgggttgccgagaggacctgagcgctgcggctctgctgaatggagccgggtccctcaggccgtggacgccctcgggaggggggtgactgtggcttgtgtctggacaggaatgtgtcatttcccacatcttctagagggctgccagctgggaagacagttatcagggcaagctgtgctctgagtttcgggttctgctcctacaaagaacgtgcggtgctgcgggcgagggccccggcacggacaagggccactgcagagtgtgtttctgctcgtcagctgccctgggcagcggatgggctgggcgatgcagctggatgcacatctcattctgtcatgaatgtccagtaaaaatctgaattggttgcaaaaaaaaaaaaggggggggccctttttaaagaatccttggggggcccaaattttacgggggctggggaggtattatttttttccttatggggagcctattataaaccctacctgggatttttggaaaggaacctttctttgtggggggggacataatggaccaacctccctacaa

SEQ ID NO: 63289 - DNA, 720 bp, Homo sapiens
  misc_feature (1)...(720): n = a,t,c or g
agtgcaactgcatttttttttgccttaacagttaaagaatcccacagggaatgatcataggctactctggttttcaatttggggaaaccctatactttaacttgaataaaataacaaagtcctccaaaataatatgtgatttctgcccagagctctgaaagtcaaagtaaagaaattcaataaagtgagggtaacagggagtaaagatgnctttcaaggtagccaaatgcctcaccatctaaataatgacgcccatcaatgaacaaacaagattcccactgtcccatctcctatccagtgaaacacagccaacttgataatttgggcagggaaagactctgtttagcttataccttgaacctaagggaaattaaattgcacattttctgttcctggctaatcttctgaataatgtactgaacacagtaggagttaagaattaaaaatacctgtctgcagtttcagaaacaatcacacacaaaatatttgtttatttccagactgatgaaagactgaatttttggtctcatgtatttactgtattgtttcatatatttatctatatgctttggctgtattaacttgttgaaatagtttgtggttctttatatttagcttttataaataattgaaaatctaatgaatgcttacttaataaccaatctaaactggggacttcaaacatagggagtcaagtaatctggctgtgtaataaataaa

SEQ ID NO: 63290 - DNA, 1806 bp, Homo sapiens
  misc_feature (1)...(1806): n = a,t,c or g
ttttttttttttcaccaaagtgtaagctccactagagctgggactttgccttttttactgctatagcccaagttcccaaaatacagacagttcccaacttaagatggtttgacttatgatttttcgactttacaatggtacaaaagtgacattcagtaaaaatagtactttaagtactcttacaaccattctttttcacttttagtacagtatgcaataaattacatgagatattcaacattttattataaaacaggctttctgttagatgattttgctcaactttaggtgttctgagcatgtttaaggtaggctaggctaagccatgatgtttagtaggttaggggtattaagtgcattttcaaattaccatattttcaacttacaatagtttcaacgggaggtaaccccatcgtaagtggaggaacatctagtgcctggcacagagccggttctcaataaatataactcttctccatcttcttcaaacctcaggccaggtttcagtgacctcctctcactttctaagattatttttgcttgctggtgggtttactgtcatttttaaccacatctaacctaccttaaaaaagtgtatggatgggggtgccaggtacaaagacttagcataaagaaaacgaccatttactttgaaacataaacaaaggccaattaataatttatgagtctgttccttgcccctcgagtttttagcaggcatggaatcattccacaggtcattatttcagtttggtctctgttcctaaggggtgaaggttttctgagggctgtggatcccaaactcacctggctcagaggctcaaacagcctctctttgtccatcaacccgatttagacagcatcctgggcctgaaaaccttctgtgctggcttcaagtgaaaatagttcactgggtcaaaagtaggctggtccaagacgcaggacggtcagtaaacgttggctgtgttcagaaactgcggcttggctgtttcttacattgatttatggtttgtttccatgaaaccgaaaatgattggtccacctggcagctggctggctggctggcaactggaggcctttctgtcctggctgagggccctggccccttggtggcctttgggaagcagcatctcatcgggccgttttttcgttctggcgggcggccggcttggcccgcggggtcgggctctccgcgcagtgcagagacgtctccaccctcagggacgaggctctgacgtggcgggaggtcgtttccgtgcgctgcgaggaggattccacgtgccgggaggacgcctcgaggatgcgagggagccgcttccccgagggggagagggagggcccctcgctgcggcgctgggaggtctccacccgccgggacgacgtctccacgcggtgggacgaggtctccacgcggaccgtggacgtctctgtgtagcgggtggtccccacccggggcgaagactgcttggcccctcgggctgaggccattctgccggcgtgagggggccagggaggcctcggggcaccctacagcccaatggtcaccgcaggcagaagagaggaaaactacggtactgccatagccgggagcgccacaacacgatgacgtggaagcaccatggtccttcgaaggctaaaacactggactcctgcccctcaggcgctcccacggcccgggccccgccccctcgttattttggagccagcgcgggtggagccatcccaggcctggtcggggatgggcggaaccgctccgcccccctantncnntgaanttcgncggtctcagggtcccagggcgcaatc

SEQ ID NO: 63291 - DNA, 1992 bp, Homo sapiens
attagtccagtgcggtggaattcggaagagaaagggtctgttgtttttctctcctgtttctcgctccctctctgctgatcacaaagctgctgaccgggtcagaaagtcctgatggaaatccaccagcgctgggcaggcccctcctcctccagggagcttgtccttgcctaatttttcttcgtcctgatgagaacaaaaaagagagagagaagaaaagaaaaaccacaaacttcctttgaaaaccagcttgtagtcagggcccggagcgcatgccatagactcggcgactcaggaatcctgaagactctctgagcgacctggagcaccttggctgtgtccctgcctgccttcaccctcctccagtgcccccagtactgggcgtgagtccggaagtggccacaacccagcctggaccgtcgcttataaagctgtgtaaacctgtataagctcaggcgttgacagctggaaggcagctggcactggcagcccccttcattgcacctatctcccccatctcattgccacggctgaaccctccttctcaatcttggaacagcacccccttctttaaggtgaagctccccccgcagaaggaagtgatcacatcggatgagctcatggcccatcttggaaactgcctcctgtccatcaagccccaggagaagtcagagggacttcagcttaattttcagcagaatgtggatgatgcaatgacagtgctgcctaaactggccacaggtctggatgtcaatgtgcgattcacaggcgtctctgattttgagtatacacccgagtgcagtgtctttgacctgctaggcatacctctgtaccatggctggcttgttgatccacagcagagtcctgaggctgtgcgtgcagttgggaaactgagttacaaccagctggtggagaggatcatcacctgcaaacactccagtgacaccaacctcgtgacagaaagcctgattgcagagcagttcctggagaccaccgcggcccatctgacctaccacggactgtgtgagctgacagcagctgctaaggagggtgaacttagcgtctttttccgaaacaaccactttagcaccatgactaagcataagagtcacttatacctactggtcactgaccagggctttctacaggaggagcaagtcgtatgggagagcctgcacaatgtggatggagacagctgcttttgtgactctgactttcacctgagtcattccctgggcaaggggcctggagcagaaggtgggagtggctccccagaaaagcagctgcaggtagaccaggactacctgattgctctgtccctgcagcagcaacagccacgaggcccgctggggcttaccgacttggagctggcccagcagcttcagcaagaggagtatcaacagcagcaggcagcgcagccagtgcggatgcggacgcgggtcctgtcactgcaggggagaggagccacatctggacgcccagccggggagcgtcggcagaggccgaagcacgagtcagactgcattctgctgtagctctgccccagtgccaggctggcctgccccttcttccagaggctatggctagttggcttgctcccccgcctccacccctgagatgtgctggataacttatttatggactgttggggatgagagcaggcaacaaatgccaaggtcagacttggtaatgtccttgacctcacgtgctgctgccttctctgcctcccacccagggcaacactaggattggtgggtttctggttctcaactcccggtccctgaatagtcacacgtatgtacagactgaggctctggggtgaggtccctatccagaatgcatctcttctgcttcccatccctgctgcctggatgctcctgatcacctaggcaggcctgtctccagttgtttcagagcttaatttgggtttctatctcttatttgtaatgccttcctggggtttggaaataaaacttctggccgggaaaaaaaaaa

SEQ ID NO: 63292 - DNA, 1111 bp, Homo sapiens
accgtcgtggaattccggacccacagaacgaccgacggaccgagggttcgagggagggacacggaccaggaacctgagctaggtcaaagacgcccgggccaggtgccccgtcgcaggtgcccctggccggagatgcggtaggaggggcgagcgcgagaagccccttcctcggcgctgccaacccgccacccagcccatggcgaaccccgggctggggctgcttctggcgctgggcctgccgttcctgctggcccgctggggccgagcctgggggcaaatacagaccacttctgcaaatgagaatagcactgttttgccttcatccaccagctccagctccgatggcaacctgcgtccagaagccatcactgctatcatcgtggtcttctccctcttggctgccttgctcctggctgtggggctggcactgttggtgcggaagcttcgggagaagcggcagacggagggcacctaccggcccagtagcgaggagcaggtgggtgcccgcgtgccaccgacccccaacctcaagttgccgccggaagagcggctcatctgaacgctggggcctgctgcagccaccaacactgcccaggactgcgggttgctggcttgtacaccgcagctgccaccgagacaccagcctctgatggctcaggaggacttgtggggagaggctgggggcacccatgtggtgggctctgtgcagcatgttgcctctgcttggctgtgcctgcagctcagggtgctggggctcgggacccacccccctgcttgcggaaccaacttttctctgtgtgtccagcaggccccacaaccccctctcctttctttcagttctcccatgcagccgaggcccgggcccctcaggactccaaggagacggtgcagggctgcctgcccatctaggtcccctctcctgcatctgtctcccttcattgctgtgtgaccttggggaaaggcagtgccctctctgggcagtcagatccacccagtgcttaatagcagggaagaaggtacttcaaagactctgcccctgaggtcaagagaggatggggctattcacttttatatatttatataaaattagtagtgagatgtaaaaaaaaaa

SEQ ID NO: 63293 - DNA, 1320 bp, Homo sapiens
actcgtgccgtggaattcctgcattaaagaaaaagctcctggaggactcctgaagcctgaggcagccttggggcagcagtggctcatggtttacattggaaagacggtgcctcccatcattctagcccctcactgcctggggagctggaggcttaaatgcctgagaggagtgaggtgttgaagaattgcctgcatcccagggatggagcgtggtggaagaccaactcagtgcctcacaggggtaattgagtcatgaggggtggagaagagggcgagagggagagaggataaatagcagcgtggcttccctggctcctctctgcatccttcccgaccttcccagcaatatgcatcttgcacgtctggtcggctcctgctccctccttctgctactgggggccctgtctggatgggcggccagcgatgaccccattgagaaggtcattgaagggatcaaccgagggctgagcaatgcagagagagaggtgggcaaggccctggatggcatcaacagtggaatcacgcatgccggaagggaagtggagaaggttttcaacggacttagcaacatggggagccacaccggcaaggagttggacaaaggcgtccaggggctcaaccacggcatggacaaggttgcccatgagatcaaccatggtattggacaagcaggaaaggaagcagagaagcttggccatggggtcaacaacgctgctggacaggccgggaaggaagcagacaaagcggtccaagggttccacactggggtccaccaggctgggaaggaagcagagaaacttggccaaggggtcaaccatgctgctgaccaggctggaaaggaagtggagaagcttggccaaggtgcccaccatgctgctggccaggccgggaaggagctgcagaatgctcataatggggtcaaccaagccagcaaggaggccaaccagctgctgaatggcaaccatcaaagcggatcttccagccatcaaggaggggccacaaccacgccgttagcctctggggcctcggtcaacacgcctttcatcaaccttcccgccctgtggaggagcgtcgccaacatcatgccctaaactggcatccggccttgctgggagaataatgtcgccgttgtcacatcagctgacatgacctggaggggttgggggtgggggacaggtttctgaaatccctgaagggggttgtactgggatttgtgaataaacttgatacactaaaaaaaaaaaaaagggggggccgttttaaaggatccaagtttacttccccgggcatgcgaggttatagtttttttatagggccacg

SEQ ID NO: 63294 - DNA, 1459 bp, Homo sapiens
  misc_feature (1)...(1459): n = a,t,c or g
tttcgtacagagggaaggaggtggctcctatcagatgacagacacttctcaaaagacagcttttcttcctggagaacagactttttcagcaggattttcctttcagtgaaacataatttggcttgaaaggaacccagggaaaagtgtccaggtgtgagcatgagcgggtagaggtgtgcccttgtttgcttcaggctgtctgcttttcgcccctgactgttttttctgtttctggccatggaggaagagaaagatgacaagcccacaggctgacttctgcctgggcaccgccctgcactcttggggactgtggttcacggaggaaggttcaccgtccaccatgctgacggggattgcagttggagccctcctggccctggccttggttggtgtcctcatccttttcatgttcagaaggcttagacaatttcgacaagcacagcccactcctcagtaccggttccggaagagagacaaagtgatgttttacggccggaagatcatgaggaaggtgaccacactccccaacacccttgtggagaacactgccctgccccggcagcgggccaggaagaggaccaaggtgctgtctttggccaagaggattctgcgtttcaagaaggaatacccggccctgcagcccaaggagcccccgccctccctgctggaggccgacctcacggagtttgacgtgaagaattctcacctgccatcggaagttctgtacatgctgaaaaacgttcgggtcctgggccactttgagaagccgctgttcctggagctttgcaaacacatcgtctttgtgcagctgcaggaaggggagcacgtcttccagcccagggagccggaccccagcatctgtgtggtgcaggacgggcggctggaggtctgcatccaggacactgaccggcaccgaggtggtggtgaaagaggttctggcgggagacagcgtccacagcctgctcagcatcctggacatcatcaccggccatgctgcaccttacaaaacggtctccgtccgcgcggccatcccgtccaccatcctccggcttccagctgcggcttttcatggagtttttgagaaatatccggaaactctggtgagggtggtgcagatcatcatggtgcggctgcagagggtgacctttctggctctgcacaactacctcggcctgaccacagagctcttcaacgctgagagccaggccatccctctcgtgtctgtagccagtgtggctgccgggaaggccaagaagcaggtgttctatggcgaagaagagcggcttaaaaagccaccgcggctccaggagtcctgtgactcaggtactgtcctgcaccaaggagggcaatgtccagccccagagtccgggggatcctgctcccactgcctcaggtcaccccaggtcatcttgcacatgcctgaggccaccacacacatncccnggtcacctcacacggg

SEQ ID NO: 63295 - DNA, 810 bp, Homo sapiens
tttcgtaaggctggagcgcggcggtgattttgtgccagggattcccagagacgcgctgaaaggctggcagggcttaggaagctggggggttagggacacacattcaagcccccacccccgggaggggaagggggctggaggcgaggcttgagggcggcggaggaatggtgtctgctcggggggaaggggcgagccctgcctgttggtactgaggggctgcgggcagtggaggctccgcgggtcgaaagcggctccatgcccatcggtgggtggaacgtgtagaggtcggaacgccgaggtcgagtctggtggcgcctcggtatccttaacgtggtctctgtttaacgtatttcatttagcccccgctgggattgattcattgggagcagtttcgctggtctggatcctccaggagctggacaaccttgacgggctttttgtcttgggttccagccccctttcccttcctcctcctccagatgccttttctctgcccctcctcgcccggtacagacatttccagcgcaggctgctgctcgtggtgtccgtcgtcgaagccacttcttgggatttcggctcgtttcactctggggtgttttttgaggagggagagtgcccccctcctccacgatgggatttttctcccttgccgaaatggactttcattgatttctacttacttccacgtttagtgaccaattccctaggcgtatttttgggggagatccttttttcaaatacatactctgtaaaatggagaacgaaattcttactccccttctggagcagatcatgaccagccctttggtc

SEQ ID NO: 63296 - DNA, 962 bp, Homo sapiens
  misc_feature (1)...(962): n = a,t,c or g
ctcacagtaacagtgctgggaatagactgtgccccagaggaatactgctcagaagagtttggaggtggtgcagacacaggcacataggaactctccaggtcattcctttcactcttaaacttcgatctttccctgtgctcaacattcctatttggatcccggtctttgctgcgccccctacttcggcttctactgcgactcaggcctcgactcttactccgactcttactcctgcctcttctccagtcatacttctcacggtacaattcattccgctcatagtaccggtcatagtctctccatttcccgtcttctctttttttctcacgtgtccttcgttcactagattctgaacgagtcttctggggactaggatatttcttttttctgccatctcgttcttcctctgctggctcctgaaatacctcttctttaatttcttctttttcttggaactagtggttttggctcaggcttttactggttccaaaagtggaaggtagttcttagtatagagactttcaaatagtttgtccacaaaacctgaagtttctttttgtaaaaagacatcaagttgatcagcacaaaaggcttttaattctttctcaggtttgtccttcttgaccagtgctacaacatagttggctaaggctgaaggatcagcatcacatatcggctccagtaacttggccagccaggacttgagggcatccacatcctctatgagcatggtgcagggaaggcgggctcggccgccgctcttcttcaggcctgccgtgggtctccactacgccgccccctcacgttcccttcacagctcccggtgcccgcagcccaccgggcatcttaggagacttcaacctactcccccgaacgggaaatacaggaaaaagnnnagagcccacaaatcccgcccgggnttcaanncngagnnngtgaaagncggaggctcatttccccat

SEQ ID NO: 63297 - DNA, 1236 bp, Homo sapiens
atgaattcccgggtcgacgatttcgtgccgcacgccgcggagcattttctcggaggtcccgggattacggtgctcgagcacgctggtgggaaaggacccgggacttgaacagtgttgtgcggcgccatgcaggtctccagcctcaatgaggtgaagatttacagcctcagctgcggcaagtcccttcctgagtggctttctgataggaagaagagagcgctacagaagaaagatgtagatgtccgtaggagaattgaacttattcaggactttgaaatgcctactgtgtgtaccactattaaggtgtcaaaagatggacagtacattttagcaactggaacatataaacctcgggttcgatgttatgacacctatcaattatccttgaagtttgaaaggtgtttagattcagaagttgtcacctttgaaattttgtctgatgactactcaaagattgtcttcttacataatgatagatacattgaatttcattcgcaatcaggtttttactacaaaaccagaataccaaagtttgggagagatttctcttaccactatccatcctgtgacttgtactttgttggtgcaagttctgaagtttataggttaaacttagaacaaggacgatacctgaatcctctacaaactgatgctgcggagaataatgtttgtgacataaattcagtgcatggcttgtttgccacaggaaccatagagggtagagtggagtgctgggacccaagaactcgaaacagagttggcctgttagactgcgccttaaacagtgtcacagcagattcagagataaaccagtttaccaacaatctctgctttgaaatttaattggtgccttgaccatggcagttggaacaaccacagggcaggttttattatatgaccttcgatctgataagccattgctagttaaagatcaccagtatgggctgcccattaagtccgttcatttccaggattcattagatctgattttgtctgctgactctcgaattgtcaagatgtggaataagaactccggaaaaatatttacttccttggagccagagcatgaccttaatgatgtttgtctctaccccaactcaggcatgcttctgacggccaatgaaacccccaagatgggcatctattacattccagttttgggtcctgctcctcggtggtgttccttcttagacaacttgaccgaagaattagaagagaatccagaaagcaacgaaa

SEQ ID NO: 63298 - DNA, 973 bp, Homo sapiens
tttcgtgacggagctgtagcggcactgtaactgcgagggcagcgccgcgtgtgtaacggcgggggcgtgtcggcgggaaggacaatcgggccgggactcgcggtgtccgggtgaccgcggcttcctgggagcagacctctgtgggcactgtgaggcggaacggagcggcggggcaggagctgttctgggcagccttcatcccgcgtggagtctacccccaagcccttctcctcttcccaattcttgtcaccttcgaggaggccatggaaaccccaacacctttgccgcctgtacccgcctccccgacctgcaacccagccccacggacaatccagatcgagttcccacagcatagctcgtcgctgctggaatctctgaaccgccacaggctagagggaaagttctgtgatgtgtccctcctggtgcagggccgggaacttagggctcataaagcagtgttagctgctgcctctccttacttccatgacaagctgcttctgggggatgcgcctcgtctcactctaccgagtgtcattgaagccgatgccttcgaggggctgctccagctcatttattcagggcgtctccgcctgccactggatgctcttcctgctcatctccttgtggccagtggccttcaaatgtggcaggtagtagatcagtgctcagaaattcttagagaattagaaacttcaggtggtggaatttcagcccgtggaggaaactcctaccatgcccttctttccactacatcctctacaggaggctggtgcattcgctcttcgcctttccagaccccagtacagtcctctgcttctactgaaagccctgcttccactgagagccctgtgggaggggagggaagtgaactgggagaagtgctgcaaattcaggtggaagaagaagaggaggaggaggaagatgatgatgatgaggaccaggggtcagccacactctctcagacttctcagcc

SEQ ID NO: 63299 - DNA, 2174 bp, Homo sapiens
  misc_feature (1)...(2174): n = a,t,c or g
gactgnaaggagtgtcagaaagcgaaagaccggatggagaggattaccaggaaaatcaaagactcggatgcctacagaagggacgagctgaggctgcagggggacccctggagaaaggcagcccaagtggagaaggagttctgccagctccagtgggccgtggacccccctgagaagcacagggctgagctgaggcggcggctgttagaacttcgaatgcagcagaacggccatgatccctcctcgggggtgcaggagttcatctcggggatcagcagcccctccttgagtgagaagcagtacttcctgaggtggatggagtggggcctggcacgggtggcccagccgcgactgagacagcctccggagacgcttctcaccctgagaccaaagcacgggggcaccacagacgtgggggagccgctctggcctgagcccctaggggtggaacacttcttgcgggagatgggacagttttatgaggctgagagctgtcttgtggaggcagggaggctgccggcaggccagaggcgttttgcccacttcccaggcttggcctcggagctgctgctgacagggctgcctctggagctaatcgatgggagcacgctgagcatgcccgtccgctgggtcacagggctcctgaaggagctgcacgtccgactggagagacggtcaaggctggtggttctgtcaaccgtcggggtgccaggcacgggcaagtccacactcctcaacaccatgtttgggctgcggtttgccacagggaagagctgcggtcctcgaggggccttcatgcagctcatcacagtggctgagggcttcagccaggacctgggctgtgaccacatcctggtgatagactccgggggcttgataggtggggccttgacgtcagctggggacagatttgagctggaggcttccttggccactctgctcctgggactgagcaatgtcaccgtgatcagtctagctgaaaccaaggacattccagcagctattctgcatgcatttctgaggttagaaaaaacggggcacatgcccaactaccagtttgtataccagaaccttcatgatgtatctgttcccggccctaggcccagagacaagagacagctcctggatccacctggtgacctgagcagggctgcagcccagatggagaaacagggcgacggcttccgggcactggcaggcctggccttctgcgaccctgagaagcagcacatctggcacatcccaggcctgtggcacggagcacctcccatggccgcagtgagcttggcctacagtgaagccatatttgaattgaagagatgcctactcgaaaacatcaggaacggcttgtcgaaccaaaacaaaaacatccagcagctcattgagctggtgagacggctgtgagtgtgcagagaaacccagttcaggtgtaggaggctgctgtgggcagccctgtctgatggggcacccgtgtggggctgtgctctggtgcctgagaatggctggtgcccaatcgacatgagaagacgagcaaaagacagagggtttggagtctcctcaacagtgttaaaagaggaagtgacctcacagaccagctcagagatgttaccaagaatatcacagcccccagggtagggagacaagcagcagtttgttctgtctcagctcctgtcaaggatcctgcggggtgggccctctgtatagctgctctctgtcactggcccctggagtgggagcagcgtccttagtcactgcaggcccaggcgggcaggtggtcccaggacagaggtggggaagttgtcctgaggaagcagaagtaggccttgctcccgcccaacccaagggcctccagtggaccagcattcaagatgtgagtgcccgtggtgtgcaaggcactcccatggcaccgtatttattgactgatctgtgaaggcttccctgacccctgcccaggaagagttcactggtcgctctgttgtgccccacagcactttgttatacctctgccacacacttcacgcagcgcgttgtaactcatgtgtttacatgtctgtccccccagactgtgagctccttgagggcagggactgtacattctccagctctgtgtccccagggcctggcacattgtagacgcttaataaatgtctgttaaatgaaaaaaaaaaaaaagg

SEQ ID NO: 63300 - DNA, 945 bp, Homo sapiens
ttgcgtgtccccaggagctgggagcgggtgaccggcggcggggaagcggcctgggttggccctcagattgcggggtctgggggcatctcgccgggcaaacccttggcccgcctacaaggacttcccccggccagagcaatggccgctgagaacagcaagcagttttggaagaggagcgctaagctgccggggagcattcagcctgtatatggagcacagcatcctcctcttgacccacggctcaccaaaaatttcattaaagaacgatcaaaagtcaacacagttcctctgaagaataagaaggcctccagttttcatgagtttgcacggaataccagtgatgcttgggacattggcgatgatgaggaagaggacttttcctcaccttctttccaaactctgaactcaaaagttgctttggcaactgcagcccaagttctagaaaaccacagcatgctgagagtaaaaccagaacggtcccagtcaacgacatcggacgtccctgccaactacaaggtcataaagcccagcattgatgcccagctgtgcagaaactctagtgatacatgcctgaggaacccactccacaaacagcaatcactccctctccggcccatcatccccctcgttgcccggatctcggatcagaacgcttctggggcccccccaatgactgtccgggagaaaacccgcctagaaaaattccgtcaacttctctccagccagaacactgacttagatgaactgaggaagtgtagctggccaggggttcccagggaggttcgacctataacctggagactcctgtcgggctatctcccagcaaacactgagaggaggaagttgaccctgcagcggaagcgggaggaatattttggcttcattgaacagtattatgactctcgaaacgaggaacatcaccaggatacctacagacagtgtatt

SEQ ID NO: 63301 - DNA, 2103 bp, Homo sapiens
tttcgtggcggcagcagcaactacggcggcggcggcagaacccagcagtgatgtggaggtggagacccacaggagccccggacttcacctgagctacctcagtggtcaccaagagtggcaagataaagaaaaccctgagttgggcgggaccaggatgcctgaccgggacagctatgccaacggtaccgggagcagcggtggaggccctggaggtggtggcagcgaggaggccagtggggcaggggtaggcagtggcggggccagctcagatgccatctgtagagacttcttgaggaatgtgtgcaagcgaggcaagcgttgccgatatcgccacccagacatgagcgaggtgtccaacttgggggtgagcaaaaacgagttcatcttctgccatgacttccagaacaaggagtgtagccgcccaaattgccgtttcatccatggctccaaggaggatgaggatggctataagaagacaggagagcttcccccacggctgaggcagaaagtagcagctggccttggcctttcaccggctgacctaccaaatggcaaggaggaggtccctatctgccgtgactttctcaagggtgactgtcagagaggagccaagtgcaagttccgtcacctgcaacgggattttgagtttgatgctcggggtggaggaggcactggtgggggctcaacaggctcagtcctcccaggacgacgtcatgatctctatgatatctatgaccttcctgacaggggctttgaggaccatgagccacgcccaaaacgccggcgaggtggatgctgcccccctgatggccctcattttgagtcatatgaatatagtttggctccaccgcgaggggtggagtgcagactgctagaggaggagaatgccatgctcaggaagcgggtagaggagttaaagaagcaggtcagcaacctgctggccaccaatgaggtactactggaacaaaatgctcagttccgcaatcaggccaaggtcataaccctgagctccactgcaccagcgactgagcagactctggcccccactgtgggcactgttgccacttttaaccatggcattgcccagactcacactactctcagcagccaggctctacagcctcgtccagtgtcccagcaagaactggtggcccctgctggagctccagctgctcccccaactaatgctgcacctcctgctgctccaccacccccacccccacacttgaccccagagatcacgccactgtcagctgccctggctcaaacaattgcccagggaatggcacctccacctgtctccatggctcctgtggctgtatctgtggctcctgtggcccctgtggctgtatcgatggcccaacccttggcaggaatcacaatgagccacaccaccactcccatggtgacttaccctatcgcttcccagagcatgcgcatcacggccatgccacactgatggggctaatggacactcccctggtatagcctcgcagggctggggtcagggggcccttgcccactcacctagccttccccatccctgtctgaagggctcccttgagaactaggacaagagactacaaggagtatgtcctgaggaggggttgggatggtgtgttttctctcacctcccttttatgagggtcctcttgtccatcttcaagcctcacagtgggggcttgcagaggagtgcagactgaagccagcagagaggaaggactgactgaggggctgtgtcctcttatgggaatttgggaacatccctcgtcttgtcctctcttctgcacagcacaggttccagcactggttttagaagaaaaaaataccctgcccagagggaaagccaggaaagattgggaagtgggtggtcaggagagaaggcctgataggagccttcagacaatttgggtcctagttgcttgggttggacaatacaggaattgcttctgggccctgggaaagctgggaccatagtgctccagcccaaagactaggggagcattcattaccctagtttgacctgaaaatccatagggcagggcccactactttccaaagaaataaaagaacaattatttttaacaaatggaggcatgtatt

SEQ ID NO: 63302 - DNA, 496 bp, Homo sapiens
  misc_feature (1)...(496): n = a,t,c or g
ttttttttttttaaaaaacagattctcactcagttgcccaggctgaattgcgggggcgctgtctcagctcactgcaacctccgcctcccaggttcaagggattctcctgcctcatcctcctgagtagctgggattacaggcgtgtgccaccatgcccaacctatttttgtattttttagtagagacggggttcaccatgttggccaggcttgtctcaaactcctaacctcaactgatccacctgcctcagcctcccaaagtgccgccgggattacaggcgtgagccaccatgcctggccttcattatctcttttttaaaaatgaaaaagtttataatttacattcagtaaaatcaccctttttagtgtctagtctgtgaattttgacaaatgcatggttttgtaaccaatcgataggacaagttctgcacccaggacattcccctctgttcctctgttcctctcttcttctgcccnctagcaaccactggtggttt

SEQ ID NO: 63303 - DNA, 964 bp, Homo sapiens
ttttttttttttctggctaaaatagtttgcaaaggaccaggtaattggggaggggagagaggtgggggcaagggggaaatgcccccccatctccttggaggcagtggtgtgaatcttcttcaacagcaattaaagaggaagtgattttgtctagggggtgagctgctggtctgttcttggaggcaggtcagggcatggccttggtcaagatggggtactggggttggacagggacaggcagaggtgcctcccactggggctggtggcaggacagtacccatgggcatggaggtggttccatcatgtacaacagttctgggttcatgtagtggaggacgtgggcaggttggagtcagtggggaccctgggaacagagaaggcactgactcttaagatgatgccagtcctgggagagttgggatatggtacttagaggagaggacaggcccatggagaggggtgggaagatgggacagctttgtttaagagcaggaactttggagacagatctgattttgaaacctgcccctccactgcacagctaggggaccttggtggcatctgtttatctgtattctgaacagtatctgttcagagggcacctgaaaggcgctccagctctgaggagggctgccccgagccagcctgctcaccgtgagcactaggtaccagagtagaacatagagtaggggttcctcccctggcctcgtcagggggtgttccagagggaaggggtgggagacctcctgggaaagatttcccagctagctgcagaggtccctggtgtccacaaactcagtgtcagctgatgcaggcatttatccacctccgtgccatcaaagggaccaccaaggccacagcggcctgaagccggtgctgcctccatgagctgcagtgccactaggctcagcacatagccaatcctaccatttctcgagggcagctgaaagtgtttactcaggtg

SEQ ID NO: 63304 - DNA, 1097 bp, Homo sapiens
tcttgttcttcccaacagagaggcccgttgaggcttctctgtcctccatggggaacagcattggcctaaacctgcagacaccattgcaaagggaagtcagctcaggcaaacccgctggtgaagaagaattccagtgtggggacacagagactgacatttcttgccatgggtgatttaattttgggcctcagtttttcattcccccctaagagtatgacacagccgcatccttgccagggccggagggagggtggatggacttataggtgttgcttgtggctgggtgacttgcttctgccaacgagattttcacagacacggcacaagcagaagcctggaatgtgtggcactgccaggcctgccctcttaggctcttgattttccccacgagatatgcgtgccccagggaacggcggctctggctgtggaatgagaggcgtgtggagcaggcatggttcccaccctcagcctagagtcaaggccagactagatcagcctaagcccagccacgccacgggtgcagcagtgaagagcaaatgccaactgtccatgacagtgactttcaaaggggtgtgtcatgtgcctcatcccagcaacagggaaggcatttctctatcagtcagttggtaaatgattattgacaatgtgtgggaaagggggaacgatttggagcagaatctggccctcctctcttcatcggaacctctcctttcttacacgcgcaggccccctccttcggttcgaccctaatccttaacagacctcctacctacccctggcaccaatcacaccctcttcacaccaccgtgcaaactaccctcccatcccatctctctccccatctgctctacacgcctcgcggaccctagaccctccttactcgccggtcataatcctctaccatacgctctccctcccacctccttcaccccaccctcgccactcccccatctctatccgcctctctatctctcctctcttctccccacgactacttacttcacccttccctcttccttcacgccactccgtctccctctccacgcctgccctcataatttacccatcaccctcttccttcagggggaaaaactccc

SEQ ID NO: 63305 - DNA, 3149 bp, Homo sapiens
cacttgattgcagagaaggtctacagagcagtggttagaacttggccctgaggacagagcttttgctccgtatgaggctggcaggtaacgatcttctcagttttctcccaggaattctggaacgatgaaggtgatgattgtgcctgtggccaagaccgggagaaccctggatccctacaccttccccacccctggaatgtcactatacatatctgacttcttctgatgttgcctttgaccctaaagtcaatatgataaagtaacaagaagctgggacagaggaacaaacacagcccactcaagcagtggtggcaacattctgttagaaaggaggggagtcaaagaaaaaaacacccctccgcccatctccttatcacctccctaaagacagaggagaacatggacaccctccatcctgatagacatgccatgtggtcagtttgtgcggtaaacaggaaaaaaaaaaaacctaaagatattgtagacctttattttctttaaatctcctaataaaaacattaaactttcaagaagattccaaactgacattgcatagaccaactcctttccaaaaatatctctgatatactctccaactctctcaatatatagaatttgaagtccaggagctgtgggcacctggtgggaattcactgagctcaaggggacaagagggctgaggacagggctcccacatggggacaaggccaggctttctggcctctggttccagccagcatcaatttggttgtggccaaattctcagtccaatcaccctggcccagggcctggcgtgggaggatgtggcaggctctgtctccttctggggttcctggtctggaggagtctccccaacagcgccaaagctggctgttttccgcccaaagccccagaactttgaatgagaggcaaatctaccctgaatgcacctccctcctaggctgggtgaggtcacgcagacacagaagggcaggacagaactccccatcttctgggggccaattcgtctggacactgtgcggtcagcttcctttttaaagtgccagtatcggtggggcaggaagggactctcagggctgagcagagccttctccagcgcgagcaaacactctgtcccgcctcggcaggcaccttctaacattcattttctaagggttaggtgagtaaaacaacaacaacaaatgctggaaatgctctgttcccaatgccagggagttccaagaccaagaagcccaactctcaccagcgggggcagatggggagctagggaaggaaccctcccagcctggggagggcacctgcacccctcccagagagagaagcccccatcccggccccccagctgggccccagcgctgctggaaccagccggcaggtggggcagaaaagcagcacctcccctcaccagggcgaggaggcaatattgaaccgtgaactcaagaagaaagacggaaagaaaaaatgaaaaaagctacagggctaagtaaacaccagcctgctgggtttatacaaaatgagtgaaatttaaaaggggcaggagagtttgtccagggactggctggcagccagaacccaccttcaagcaagttacaaggacttgggggaaagtgctgagagcagaggctttagtagggggcagggccagactgctccccactgggaaagcacaccccttaaaggagcccttcccccttgcccagaacgggggatgcttccagaggaaggctgaggcttttctggtaaggaagccagctccggaccagtccagccacagcccacctgcctctatggcatccgccccagtctgggcagctgaccctgagggcagagaaggactttgcttgctccaaccttcctgcaggaaaaccagctgctcaggacccagccctgggcagagggcacggtcggtgctcagacctttctcagcacgggtctcagacctgagctggagctaactggaggaagaggcagcacccgttcccgccgggctgctggaccctgggcctctgactgcacagcaggcagtgaccaggagtccttgggaaggagctcagggaaggggaggtgaggggccagtgggactgtgctgggggtgagcatgtgcaaagtgcaggctgcaaggcagcgggaggacatttgccggggggaggcaggggtctcgatctggagtgtgggtggggtctgaggtcatggctcccaggaagaggccgccagcaggtcccccaggacacaaggaagggacagctgaagcactaagcagtcagacagtcacaggtggcaggattccggaggcggtctggcccccccaccaccagggcaagggaacaacggagcaaggccctgctgctaagacgtgaccaaagccagtgctcctggagtgagtggggacacaggtagagaggccccctcagccacaggcatctctacatttaggagctgctgcatgtcctcagccagagggctgggtcagtctccagcagcgccggtccttgccagctccttcttgcccacaagctgcacgggcccgcctggcctgcctggcctgccctctagtggttcagaggagaatattcacagtggtgcctgggccttggtgggccaggagggtcccagcatggatgggaggggcaatggaatgatgctacggggagtgtggactggagtgcatggaggaggcatggatgagatgtggcgcagaggtgatctgaaggggaaagttcctcatggaatgatacaggtctggactccagagaaagcaggactcttctccagcccggacacctgctcctcaatggctttcaatcacaactggctcgtagaccccagaagagaccctggtggcaagctggatgccgctcagcgtggcagagccatcgcggctcacgaacagccggaggttgctgtcctcggtgttgctgccatctgtgaagtcctggctctgcacgatcttctccacgatggcatccgcatcgatccgcgtgtcgtccacccaggtcgggtggctctccaccgagtccttcttccgcctgaaagagcgatcggacagatgcaggggccggggtggccgcggcggcttctccgggggccggtgctcccgctcactgccctcagggccctccacggtcatgccaaggcccccagaggcgctg

SEQ ID NO: 63306 - DNA, 724 bp, Homo sapiens
ggaggcatgagagggcacttgcacagatcttgtgtctggaaaggggaagcgggacagcaggaggctccagggagtaacctgaggaagctgccttgggtgtgtcttggtgccatgccttaggcggccaccaggtggcgccaaacccacacgcccccgtttcaggtgtgctgagctgcaccgccccagccgtgcacctactgcgtgcagagggtgcagagcgcggccggtgctcacccgcagcggacaggatgggggcgtgttccccagctgatgccgtctgggccagactcagatgagaggccttgcttgcctgatggccctaacttctccagcaagctgggggccgcggtatctccttggctgcatgtcccatgctctgcctgccaagggactagggaagaagcctcaggaaggtagacagatgcaccccctatgtctgcagcacagtctccatccccccgggctcaggccagactgctagctcctgccttcccttggccccagaccctcgcagtcccgctcctcagcctctccccaccaatctccagcagatgtccacccccaatgccctctgcagcctcccaccccgcagcccctgctgaggtcagtcagcctgggccttgccatgcctcaaaaaccatcccatggagtaccttgtggccaaacccacctgccccgcctctgaccccacctgtcctggctctgaccccacctgccccggcgc

SEQ ID NO: 63307 - DNA, 1301 bp, Homo sapiens
ggagcaaaaaagccttgaccaagagcttgggtctccttcggacctgcacacgactccccaactcccgcctgcaacggcgggtcttggatcccgggcaggcagcgtccacccagcgtggaaccgtggcagccgcagcccccgcaggttggagggcagacactagcaggagaaaggccacaaggcctgcgtggtgggaaagcatgggagacgtcgctttcctaccgggcgagaaggtctccctacagtctttggagacaagatggagggaggcaccccttccaggaacaaggcggctgctcctgaggcctggctccgcacggaggctcctgggtcccgcgcgccctctccctacccgctgttagccagagctgcttcacacatctcaaccggcctcgtcaggggaggggttggtggattggtcctttcatcattttataacgtccctctctctctctgattagtttatttgttctgaaatatactatatctggcattaatatagccagtcttgctttcctttggctaaggtttgcatgatatatcttttcccacccttttcatttcaacttgcctgtatcatcatatttgaagttagtctctttgtagccagtatgtagttggttcgtgtccattaacctactctgccagcctgtgtcttgcaactggtatacttaggccattgatatttaatgatattgacatggtagggcttaaatctgccattttatttttccttttctgtttgttctccctggtttcgttttctggatatgctttctttttcttaccttcctgtcatgacttgaacatctttgagaatggtgttttgccttatccatagtgcttttgagtatgtctgtttgtatagccctcttggtttttccagacattcgtatatctgtgcatctatatcttaaccacacggtatactggtgtcattgttttaccaatttgagtgaatgatagacgagttacctcccttgtaggtctctttaccctcccagtttataaccatttcaaacattttctttatggagagttagaaccacattgaatggtgctatgatttttttctgaaaccgtcaagcatagtttagaaaactcaagaggagaaggaaggcctattttgctgttttctttctttccgatgtcccaaggttccttctttaatcatttcctttccgtctagagaactccccttagcccttcttttagggtagaactgctggtcagagatgtccttagcttttcttaatctgaaactgttttgatcttctccttaatccctgaaagatgtttct

SEQ ID NO: 63308 - DNA, 361 bp, Homo sapiens
ttttttttttttgagacaggatttaattccctttgaccaggctggagtgcaatgcaatgttggctcactgcagcctctgcctcctggggctcaaagtgattctcctgccacagcctcctgagtagctgggactacaggcgcacaccacccgtgcccagctaatttctggtatttttttttctttttgtagagacagggtttcgccatgttgcccaggctgggtttcaaacacctgggctcaagcagtctgcctgcctcagcctcccaaagtgctggtaatactgcacctgggcctgtggtaccttatttatctttgtatctctagtcctttgcaccattcagcctcaataaaggttggttg

SEQ ID NO: 63309 - DNA, 1311 bp, Homo sapiens
  misc_feature (1)...(1311): n = a,t,c or g
acaaaaccaagatgctggttaggcagggctcttctcttatctggaaagaatcctcttgtttagggtgttggaagaatccccgtcgccccctcagttgtgactgaggtcttggtttccctgctggccgccatctggggcctcagctccttcaagctgcccaggttccttcccatgtgtgtcctctcccccaggtgtccggccaccctctcatccccctcgtatttcaaatctcacttcctattctgtcaccagccagagaaggctctctgtgttgaacactcctgtgattccagtggctgcacccagatcctccgggccgtttcccctcccttaaggattcctatgccatgtaacagcacaggcatgggtgtgatctcacgtgttcacagcttccgggggctaggatgagacatgcttgggggcgggggccacttaaaaatgtgcctgcactgtgggcgtgatgctctgcactgtggaaggaaaaggagttaaatgagaaatgatggtgggcgctgagcctgagcagcgccgctttgtgccgcagcatcaacctgtgggaaatggcggagttcctgctgaaacaggacgtggtcaacgccatcaacctggatgggggtggctctgccacctttgtgctcaacgggaccttggccagttacccgtcagatcactgccaggacaacatgtggcgctgtccccgccaagtgtccaccgtggtgtgtgtgcacgaaccccgctgccagccgcctgactgccacggccacgggacctgcgtggacgggcactgccaatgcaccgggcacttctggcggggtcccggctgtgatgagctggactgtggcccctctaactgcagccagcacggactgtgcacggagaccggctgccgctgtgatgccggatggaccgggtccaactgcagtgaagagtgtccccttggctggcatgggccgggctgccagaggccttgtaagtgtgagcaccattgtccctgtgaccccaagactggcaactgcagcgtctccagagtaaagcagtgtctccagccacctgaagccaccctgagggcgggagaactctcctttttcaccaggaccgcctggctagccctcaccctggcgctggccttcctcctgctgatcagcactgcagcaaacctgtccttgctcctgtccagagcagagaggaaccggcgcctgcatggggactatgcataccacccgctgcaggagatnaatggggagcctntngccgcagagaaggagcagccagggggcgcccacaaccccttnaaggacttaagnctnaaag

SEQ ID NO: 63310 - DNA, 1213 bp, Homo sapiens
gctagcaccatgagcttcaataccctgaaaattcccgtgagaagggagatggcgcgcaaattacccactcccgacccggggaggtagtgacgaaaaataacaatacaggactctttcgaggccctgtaattggaatgagtccactttaaatcctttaacgaggatccattggagggcaagtctggtgccagcagccgcggtaattccagctccaatagcgtatattaaagttgctgcagttaaaaagctcgtagttggatcttgggagcgggcgggcggtccgccgcgaggcgagccaccgcccgtccccgccccttgcctctcggcgccccctcgatgctcttagctgagtgtcccgcggggcccgaagcgtttactttgaaaaaattagagtgttcaaagcaggcccgagccgcctggataccgcagctaggaataatggaataggaccgcggttctattttgttggttttcggaactgaggccatgattaagagggacggccgggggcattcgtattgcgccgctagaggtgaaattcttggaccggcgcaagacggaccagagcgaaagcatttgccaagaatgttttcattaatcaagaacgaaagtcggaggttcgaagacgatcagataccgtcgtagttccgaccataaacgatgccgaccggcgatgcggcggcgttattcccatgacccgccgggcagcttccgggaaaccaaagtctttgggttccggggggagtatggttgcaaagctgaaacttaaaggaattgacggaagggcaccaccaggagtggagcctgcggcttaatttgacccaacacgggaaacctcacccggcccggacacggacaggattgacagattgatagctctttctcgattccgtgggtggtggtgcatggccgttcttagttggtggagcgatttgtctggttaattccgataacgaacgagaccctggcttgaggctgtcatcttcctcatcggcatcatcgtggccaatgtcccagagggtctgctggccactgtcactgtgtgtctgacgctgaccgccaagcgcatggcccggaagaactgcctggtgaagaacctggaggctgtagaaaccctgggctccacgtccaccatctgctcagataagacagggaccctcactcagaaccgcatgacagtcgcccacatgtggtttgacaaccacatccacta

SEQ ID NO: 63311 - DNA, 723 bp, Homo sapiens
tttcgtggcttgggtctggcttgttcccctccggctcgaaccacctcttctctgagccgagccagctaccggggctcctggaattgccacccctccctgggcacccttgaggcctccgtggagggacgtcacggggcagagcgggacgtgagcctgagtttgctgcaggcgtgctctgtgtggtggctgggttctgccaatccccgtgcccaccgggtgggcgcggccgggaagctcctgcccctccctgctggtcggcgtcacgcgtgacgtcccgcgtgatggctgggagggcccggcggcgacagcggaggcagagaggaaggcggttctgagagcttcagagagctatggaaagcaaaatgggtgaattgcctttagacatcaacatccaggaacctcgctgggaccaaagtactttcctgggcagagcccggcactttttcactgttactgatcctcgaaatctgctgctgtccggggcacagctggaagcttctcggaacatcgtgcagaactacaggtgaccacccctcaatctgaccctgtgtgccaggatctcattttctgtgattaatataatatgttttgtacctgcctcctcaagcttgacagtgaccctgtccctcaatcccctcactctctagccccgtctgttggcatcacagagctttaacccaaaggattttagggcatttgggttgagaagatggcattgatatt

SEQ ID NO: 63312 - DNA, 519 bp, Homo sapiens
cccacgcgtccggagcactttattttttttcaagttattttttgcattgttttggagtagcttcgaataataaacacatatttctgctttaaatttttaatagttaactacattcatgggacaaccaaagcaagaaagcctcatgttttgggggaaagtttgatatcagcaatgtccagacaagagccaaagatgtttgtcttgctctatgttacaagttttgccatttgtgccagtggacaaccccggggtaatcagttgaaaggagagaactactcccccaggtatatctgcagcattcctggcttgcctggacctccagggccccctggagcaaatggttcccctgggccccatggtcgcatcggccttccaggaagagatggtagagacggcaggaaaggagagaaaggtgaaaagggaactgcaggtttgagaggtaagactggaccgctaggtcttgccggtgagaaaggggaccaaggagagactgggaagaaaggacccataggaccagag

SEQ ID NO: 63313 - DNA, 641 bp, Homo sapiens
gttgactattgtttgtgctgttaattcttgttcttcttcaattaaggcatggacataatttttttcaatttttttttcaaacgatgtggaaggcttgctgctatgtgcttcatcttcagcatcatctcatcccttcttaaaatgagttatctgtttgcaaactgctgatttcttttggagaatcatccccataaacttctcataaagcatcaatgattttaccattcttccacccaagcttcacactaaatttgatgtttggttttgcttcaattttagtagaatttatgttgctctgacaggtgctcttttcaaacttacgtcttacctttttagtgcctcaaactacatcctgttcaggcatgttataacaagttagtatgagcttattttggtataaaaaatttggactccataattttttcataatatgcatttttcattaccttttggaagacaactcatatcaccttgagcttcttttcatatgcctattttccatatgtatatcttctttggtgaggtgtccttttcagatgtttgtacatttaaaaatcagttattacccactcccaccacttctattcaacatagtactggaagtactatcaagagagagcaattagacaagaaaaagaaat

SEQ ID NO: 63314 - DNA, 2025 bp, Homo sapiens
tcagcactttgttgaacgtggtggtgagagcacacgtcctcgtctcattcctgatcgaacgcggtggtgagagcggaaccgtccctcgtctcgttcctgaatcgaacgcggtggtgagagcacacgtcctcgtctcgttcctgatcgaacgcggtggtgagagcacacgtcctcgtctcgttcctgatcgaacgcggtggtgagagcacacgtcctcgtgtcgttcctgatcgaacgtggtggtgagagcacacgtccttgtcttgttcctgatcttaagggaacgtttgcagtctttcaccactagatgtgatgtgagctgttagattttcaaggatgctcttcatccagctgaagacggtcccttctagtcctaatttgttaagtgtttttatccttaaagggtactggattttgtcaaatgcttttctggcctctattgaaaagatcctgtgttcttctgttaatatgaggtgttacattgattgattttcatatgttgagccagtttccatttgtggaatacatctaactcggtcatggtgtataatccatttactctgctgctgaatgtgatttgcttgtattttggtgcggatttttacatctgtatttataagggatattggtctggtgttttcttatgatgtcttcctttggttttgatatcaggataatattagcctcatagattgggttaggaaatgttctctcctccgttttttttggaagagagagattggtgttaattcttgctagaacctttggtagaatttgccagtaagcctatctggtcttgggtctttgggaggattttgattcgattcaatctatgtatttgttatagatcgttcggattgtccatccttgagtcagttgctagcttgtgtgtttcttggagtttttccgtttcgtccatgttatctcatctgttggcataccgtcgttcacgggattttattgatgtgtgtgaggtctctgagaacgtccctgccttcactcctgcttttagtcactggcatcttcttttaacttgggccatctggccgtgcatggttttgggagagtcctccttgactctgcagatgctgagcagtgatctggctgggaaaggggaccaggagtgcagggcacctgctgaggactcacctaagcccaagagtcagagagtcggagctccaaccacatctgcctgcatgcctttcccaggctctccccaggcggacagccagcaccccctccccaaagaccgggcagttcctgaccagcaccccaccaagtcctcagtaaggcctgtctttgggggagcagggtttcaggaggacagtgggggtggtgtagaactcatggctggcggttccgggcctctcaggaagctttgccactgggcttggggttaagtgggtgtggggctccgaaccctaaatgggtgagagttgaaatgaaagcggcacctgtagtccgtttggggtgcaggtgtgtgccaggggtcttcagccccggctgatggccacatgaaccacatgaggagaggcagggcgtgtcagcagcaaacctaagtgtgtgctcatttctgtgggcccttactctgtgacactgcagctctccagagagacgctttgaaaacaaaacaggaaagaacacacggccccgcgtctttttgcctgagtcaacttgtattcctttaaaaggtgaaggaccctggtcccttgggtttttcgtgcacatgagaaaatgttggcccaaggttagcgattatgccttctgtaatctgtaaccagaagtgctcttatgcccaaacccttgatgttgattctgctgtaatgtaacttcggagccagtctggatggatgtgactgtgcaggtcctgagccccggcccccgtaaccaagcagtgggccgagacactgagccgggcagtcaaacaggagctctctaaggctgctcccgggctgggacctgggtctaggattctcagtaagacctttgaataaaactaacttgaattcttcaaaaaaaaaaaaa

SEQ ID NO: 63315 - DNA, 1816 bp, Homo sapiens
taccgagcttggacgaaggagaggcggaggctcaggccatggtgctggagatgtttcgagaggaggactactacaacgatgatgttctggaccagatgggcgccagtatcctgggcgtggagggcccccggcgccacccagatgagccccctgaggatgaagtcttcgagctcttccccatgttcatgggggggcttctctctgcccacaaccgagctgtgctagctcagcttggctgccccatcaagaacctggatgccctggagaatgcccaggccatcaagaagaagctgggcaagctgggccggcaggtgctgcccccatcagagctccttgaccacctcttcttccactatgagttccagaaccagcgcttctccgctgaggtgctcagctccctgcgtcagctcaacctggcaggtgtgcgcatgacaccagtcaagtgcacagtggtggcagctgtgctgggcagcggaaggcatgccctggatgaggtgaacttggcctcctgccagctagatcctgctgggctgcgcacactcctgcctgtcttcctgcgtgcccggaagctgggcttgcaactcaacagcctgggccctgaggcctgcaaggacctccgagacctgttgctgcatgaccagtgccaaattaccacactgcggctgtccaacaacccgctgacggaggcaggtgttgccgtgctaatggaggggctggcaggaaacacctcagtgacgcacctgtccctgctgcacacgggccttggggacgaaggcctggagctgctggctgcccagctggaccgcaaccggcagctgcaggagctgaacgtggcgtacaacggtgctggtgacacagcggccctggccctggccagagctgcccgggagcacccttccctggaactgctacacctctacttcaatgagctgagctcagagggccgccaggtcttgcgagacttggggggtgctgctgaaggtggtgcccgggtggtggtgtcactgacagaggggacggcggtgtcagaatactggtcagtgatcctcagtgaagtccagcggaacctcaatagctgggatcgggcccgggttcagcgacaccttgagctcctactgcgggatctggaagatagccggggtgccacccttaatccttggcgcaaggcccagctgctgcgagtggagggcgaggtcagggccctcctggagcagctgggaagctctggaagctgagacactggcggcaggcacctagctatgtgaccactggccctaaaccttttccctctgtggcctcctggcttgcactgctccctctagaaagattccttcaggtctggaggcagaggaatgggcatagctgagccagttgccctcctagggcatgtttgaccaggactgagtctggaatctccaagttaaagatggtgaatcaatgcttcgggcttggagatggaacatgcctcctctccattcagctagaaggaccaaagcatgtggcatttggatggccagagtgccctgaagcaccactaccaaccttgcctccccctcctctcaaagagcctctgattgtgtcaccaaggggctcacatcttatgtctgccatgccaggggtgtcgccatccagatgtgttggaagcttcccctcctgccttatgctcacctgtggacaccgaggatgccctcacattggtgctttctcctcatcctcatgccccctttgccacaatggtatgatggcttggtagcccctcgaggcagatgcacctgacttgctgctattaaaaagccgtgtgccttcaaaaaaaaaa

SEQ ID NO: 63316 - DNA, 2044 bp, Homo sapiens
  misc_feature (1)...(2044): n = a,t,c or g
cccacgcgtccgcactgtggtcctgaactgaagagctgtgtttttcaggaagacttggccaggccgtgttccgtgtctctggattcaagtcccaggagtcctgaccagagagcaggcatcagtgtttttctgaccgaagttctcatttcctgacaatggaaatggaacaagaaaaaatgaccatgaataaggaattgagtccagacgcggctgcttactgctgctcggcctgccacggcgatgagacctggagttacaaccaccccatccggggccgggccaagtctcgcagcctgtctgcctcgcccgccctggggagcaccaaggagttcaggaggacacgctctcttcatgggccatgcccggtgaccacttttggaccaaaggcctgtgtgctgcagaacccccagaccatcatgcacattcaggaccccgcgagccagcggctgacgtggaacaagtccccaaagagcgtccttgtcatcaagaagatgagagatgccagcctactgcagccgttcaaggagctctgcacgcacctcatggaggagaacatgatcgtgtatgtggaaaagaaagtgctagaagaccctgccatcgccagcgatgaaagctttggggcagtgaagaagaaattctgtacctttcgagaagattatgatgacatttccaatcagatagacttcatcatctgcctggggggagacgggacgctgctgtacgcttcctcgcttttccagggcagcgtccctccggtcatggccttccacctgggctccctgggcttcctgaccccattcagctttgagaactttcagtcccaagttactcaggtgatagagggtgagttggaatgttctggagcccacaggagctctgatcatggcgctgctgtctcgcttgcttgcggggggtttattttcatttaatgatgcatggagcaacatttaaaggtttcaagattcagggatttctaaatcttgagtggttcaaaccttttactgacactgagaagtttcagcagatcacaggttgaagctgccatgtgtgttgggcagaagtgagctgattctcactctcagaaggcacagaagtgtcggccgggcgcggtggctcacgcctgtcatcccagcactgtgggaggtcgaggcgggcggatcacgaggtcaagagatgagaccatcctggccaacacggtgaaaccccgtctctactaaaaatacaaaaattagctgggcgtggtggtgcgcacccgtagttccagctacttgggaggctgaggcaggagaatcacttgaacctgggaggcagaggttgcagtgagccaagatcacaccactgcattccagcctgggtgacagagtgagactccatctcaaaataaaaagaaaaaggcacagaagtgtgtcaacttgggagaagaaagagccctctgactcccactggcctccctggggtggggcccctgaccccacttgacttccctgatggcattgccctcttgacttcctggctgggaccttcagggaacgcaagctgttgtttcttccgggagttcggcttgaaggttcagggtggttgaagggagctccgggggggaaggaaggacgggccgttgcacaatgggctgggtgagaacggcgtcgcaggctgcaggcctggaacaatggatgtcgggaagcaggccatgcagtaccaggtcctgaatgaggtggtgattgacagaggcccctcctcctacctgtccaatgtggatgtctacctggacggacacctcatcaccacggtgcagggcgacggtaaggcccgcagcacttgtcctgggggccctgagcgttcctcgggcgggagtgacgcctgcgcctgtccctgtcaggagtgatcgtgtccaccccgacggcagcacggcgtatncggccgcggcgnggcctccatgattcaccccaacgtgccggcaatcatgatcacgcccatctgcccccaatcgctgtcntttcgggcccatcgtggttccccgaggttcgaagctnaagatnattgctgg

SEQ ID NO: 63317 - DNA, 2139 bp, Homo sapiens
gagaaggaaacccaggctcggagaaggggcggttcctgctaaagattgcacagccaatggagggcagagcagaattgggacccaaggctgggggcccccagttggaagctccctccagcaagctggccctgacacctggagccccagctgccagcctgggaggggctgggacccaatctcccccaagattaggccggggatgtctcccaccttcactctgacatcccagaccccgaccccccagccacgcaggaagggggatctgagtgtggaacacacgggtgccctcggaggtctgatgtcacccccttccccaggccttgttgctggtggcggccttggcgggcctgggcttgggcctgagcctcattttcatcgctgtctacctcatccgcttctgctgctgccggccccccgagccccccgggtccaagatcccctcgcccgggggaggctgcgtcacctggagctgcattgtcgcccttctcgccggctgcactggcattggcatcggtttctatggcaacagtgagaccagtgatggggtgtcccagctcagctctgcgctgctgcacgccaaccacacactcagcaccattgaccacctggtgttggagacggtggagaggctgggcgaggcggtgaggacagagctgaccaccctggaggaggtgctcgagccgcgcacggagctggtggctgccgcccgaggggctcgacggcaggcggaggctgcggcccagcagctgcaggggctggccttctggcagggagtgcccctgagccccctgcaggtggctgaaaatgtgtcctttgtggaggagtacaggtggctggcctacgtcctcctgctgctcctggagctgctggtctgcctcttcaccctcctgggcctggcgaagcagagcaagtggctggtgatcgtgatgacagtcatgagtctcctggttctcgtcctgagctggggctccatgggcctggaggcagccacggccgtgggcctcagtgacttctgctccaatccagacccttatgttctgaacctgacccaggaggagacagggctcagctcagacatcctgagctattatctcctctgcaaccgggccgtctccaaccccttccaacagaggctgactctgtcccagcgagctctggccaacatccactcccagctgctgggcctggagcgagaagctgtgcctcagttcccttcagcgcagaagcctctgctgtccttggaggagactctgaatgtgacagaaggaaatttccaccagttggtggcactgctacactgccgcagcctgcacaaggactatggtgcagccctgcggggcctgtgcgaagacgccctggaaggcctgctcttcctgctgctcttctccctgctgtctgcaggagcgctggccactgccctctgcagcctgccccgagcctgggccctcttcccacccagtgacgactacgatgacacagacgatgacgaccctttcaaccctcagcaggaatccaagcgctttgtgcagtggcagtcgtctatctgagcccctcctcccggctggactggagcctggctcccctcttcgttccttccctggctgccggaggagaccccactaacccagcctgcctgggctctgaccactaacactcttggccatggacagcctgcacaggaccgcctccctgctcttggccactgtgctcccatttctgtccttggccttgggagtagctgagggggcagactagggagtagggctggcaggggagggggcagacagcctcgcctcgcacccttcatccctggctgccggtcccatccttggagggactaagctgggggtgggggacatgagtccccctgctgcccctgccacatcccagtgggctctgaccccctgatctcaactcgtggcactaacttggaaaagggttgatttaaaataaaagggaagactattttacaagcagctgggtcctccttatttctcctctcccttgattcggcctcctggccagggctgggacatcctccctgctgtcctctctcccccggcctcccagctgccaggaatttctgcgcctgtccaggctcagcaaggggtccaaagacattgttctttaaaaaaaaaa

SEQ ID NO: 63318 - DNA, 481 bp, Homo sapiens
gcccgacgttgcatgctgccgggcgccatggacgcgggattttcccgggtcgacgatttcgtggcttctccagtcgcgtctttctcactcactggggagcccggcggtggcggcacctttcgaggtagacccgctgagctgctagcccgccggccagcgagtgagaggtcggacagactgtggagccgacagactgaaggacagcggcaccgccagacggccagaaagttccgccatgagctggggcacggagctgtgggatcagttcgacagcttagacaagcatacacaatggggaattgacttcttggaaagatatgccaaatttgttaaagagaggatagaaattgaacagaactatgcgaaacaattgagaaatctggttaagaagtactgccccaaacgttcatccaaagatgaagagccacggtttacctcgtgtgtagccttttttaatatccttaatgagttaaatgactat

SEQ ID NO: 63319 - DNA, 1047 bp, Homo sapiens
ttttttttttttcatttgtaggattgactttaataacacgcctctactgaacaaatggcgattaactggggaaaacggaattatggtaaccgaggtaacggggtcggggactctttctccttcgctgcatgctgggtggcggggagagaccgctctgaggaggtttggtctgtcggccaccccgtaggccggggggcattttgggtcctggcaatatggcgtcctccttgatgggctgatgagatgagtttcactgtagctccaaaccagagggcaaagctcccatgacccaataagcccacattgtccctttcctccgtggttccgtgtcgcccgtttctcaggactcgttctcaggcaggagagagcctcggggctgaaggccaggaccagccaggccgcgcggacctgaggttgaggaaccgggtgcaggcgagcacgatgggccggtcgtggctctggttgcagcagctcagacgagtgcgggacccgcagggctgagagtggctggaggagacccagggccctttgaacccgatcccttggccggagacctcagcccagtcggcccagtgggcgaaccggcaccaagagcggcctgcctgtcttcggaactgctgaggcggtggaggccgagagcagggtcatcgtgaggcctgaagtctcttacgcttttggcagctcccctcgcagcccctctggaaacgtacagcctcaggagcagccagtggcttgagacctggggtggtgtgtgtctgcggagcttcttgggctgccccatttcctagcggcccccacctccccacttcccgctcagagttagagataaggatctcagacttttgcctgagtaagggtctccgcactctttatccatttggttttcgatttcccgtttttgtttcttatttcaccaattctgggacacgctagtttttaaggctggaggttctcgagcgcttgctgccaaggactcccccaccccctcccccactgatggagtccgaaatgctgcaatcgcctcttctgggcctgggggaggaagat

SEQ ID NO: 63320 - DNA, 1196 bp, Homo sapiens
ccggccggattcctgggcgacatttccgcactgggcgcgcgagagctgctagggcggtttctctgcctcgggcctgttgggcagggccggctaaggtgcgcgtgctcgctggttctaacccttctgttgggcgtttctgcggagaggcgggaggcgctgagagtctgtgcggaggtccatgcacagactgctttgcctgttgttgctcttcggaggcggcgatccccgaaggcgagctgaaatacggctgcaggctacaatttgcagccgacgattaaggaagacgacgagcgggagaggtggcccaccctcatggagcgcttgtgctcggatggcttcgcatttccccattactacattaaaccgtatcatctgaagaggatccacagagctgtcttacgtggtaatctggagaaactgaagtaccttctgctcacgtattatgacgccaataagagagacaggaaggaaaggactgccctacatttggcctgtgccactggccaaccggaaatggtacatctcctggtgtccagaagatgtgagcttaacctctgcgaccgtgaagacaggacacctctgatcaaggctgtacaactgaggcaggaggcttgtgcaactcttctgctgcaaaatggcgcccgatccaaatattacggatgtctttggaaggactgctctgcactacgctgtgtataatgaagatacatccatgatagaaaaacttctttcacatggtacaaatattgaagaatgcagcaaggtataggtcaaccaatgttattttcaaactatctgaaatgcatttattttaacattgacacatgtaagggtcaatttttcatatttggaagctcaaacattccttgaatgaaaatattttgaaatgccttaactgtctaagattttactttaaatattggaacttttaaagaagcattatagggaacagccttttttcatgcacttatggtaaataactataaaaacaaatgaattacaataaatttataattcatgacaactgaatttgggaaaggtaatagttaagtgtttttcccctaaattactttttttctaatcagtgtgaagtgacacaggaaagtaaaattgtcccttataaataggctttattttaaatgtcaaagaaaattaaagaatttcccaataaatgtacatgttgttgctgttgaaaa

SEQ ID NO: 63321 - DNA, 987 bp, Homo sapiens
tttcgtggcggagcggaggggaggccgtgccaggcagggccggttcgtgcggaaccgccatggccgagccggcttcggtaactgtgacatttgatgatgtggccttatatttttcggaacaagagtgggagatcctggagaagtggcagaagcaaatgtataagcaagagatgaagaccaattacgagacccttgattccctggggtatgctttttccaagccagatttgatcacatggatggaacaagggagaatgctattaatcagcgaacagggatgcttagataaaacaagaaggacaactagccctcctactgatgaacagttgaacatgaagaatactggaaagttgctatgttttgatgacgaaggaactcccaggacaaaagaagaggattgccgtttaaatggtcctcaaaaacaggacttgtgtgctgccttacgagggaaagagagaaagattttattagctcaaacagccaccttccagtctccaagtctccgagaaacagagattctaaataaaaaagtcagcatcacagcatatgatccagacaagaaagacctgcggcataagcctcgggagaccccagggcgcttagaaattcccacagggccaagatgctattcctgctatgtctgtaggaaagtcttccaagtaaggagggatttgctaaagcacaaacggagccactccaagagccagctctgcagatacccaaagtacaaaaactcgtccagagggaagtccgaactcaggcggacgcagaggctcctgtgtcagaagaagcggttccagtgcagtgagtgtgagaagagctacttcctgaagggcagcctcgtcactcatcaggttgtccacaccggccagcggccctacccatgccctgagtgcgacaagaccttccggtacagggccaacctgaagaagcacctgtgtctacaccgcggggagcggccgttctgctgcggggagtgcggccggg

SEQ ID NO: 63322 - DNA, 548 bp, Homo sapiens
cggacgccttgcccccgcttcctttcacgctgtcgctgcccgtaggtggttgtggccactgtgcccggagggaggcggcggtggccagtaatgcctgggaaactcctctggggggacattatggagctggaagcacccttggaggagtccgagagccagaagaaggagaggcaaaagagtgacagaaggaagtcaaggcaccattatgactcggatgagaaatcataaacaagagaaaatggtgttacagatgacctggatgctcccaaggccaaaaaatctaaaatgaaagagaagctaaatggagacactgaagaaggattttaatagactttcagatgaattctccaaatctcataaagtcaagaagaaaagatctaccaaatggagatattagatgaatattgaaaaaaattcaaagccgagtatcatctttagatacttctactcataaatcaagtgataataaactagaggagaccttaacacgtgaacagaaagaaggagccttctccaattttcctatttctgaagagactataaagctt

SEQ ID NO: 63323 - DNA, 829 bp, Homo sapiens
ggtccctttttttctgcctttttgtttccctccggcgggtcggcgcgagggtgaatttccgtttgcggcggtgtccaagcggacctaaggagtcgcagttgtgaacaggttagagttacttgttattggtaaatagccactatggagactaaggaccagaagaaacacagaaagaaaaacggtggacccaaagctgcaaagaaaaagaagtggcatctgcaggatctccagctaggagactaagaaaatgcccagaagagaaatgccaatgcttttgcagttcagtctgctgtgtggatgtctcgatcctttcacaggactctggatttgaagacacaaaagcatcatattccagtggttgatggaactccactagagccgccaccaataccggtagtggtgacggggcctccaaagttggaaagagcactttgatataatgcctcattcggaacttcacctggcagaagttcaccgagatcagaggccctgtgacgatcgtgtcaggtaaaaagcgcagactcaccattattgaatgtgggtgtgacattaacatgatgattgatctggctaaagtagcagatctggtaagtgagcaggggcagcctggggtgctgatggagacttacagcattgtggtaggttatttaccccgtgatgaagggaagagagttttgtgattattaaaaggatcatggtcattatcagggatatagtagatgtgattgaattgatgatgataataatattagtaataaatgttgtcatattaataatacaaatggaatgtgcacaaaaaaatgtgttccaaaatctaacagcatgtatt

SEQ ID NO: 63324 - DNA, 1932 bp, Homo sapiens
gtaggacagcccctgacgccattcccttttgcccttctttctgcgggcctttccggtacttgagcggtgtccagagcgtggccagttctcgtctatctggctgcctttagggagcggtgcctagcgttggccaatagttggctgtcgaaagtgccggcccccgcgccggcgcctgcagcagccgggtgggaaggctcaagatggcgtgcttgttggagaccccaatccgcatgagcgtcctttcggaccaggaatgaaagttactgggagataacttcgaaggattttgcaacaaattcgagctgtccgactctgagaatggaagtaacagctagcagtcgccactatgttgacaggctatttgaccctgatccccagaaagttctacaaggtgtcatagacatgaaaaatgctgtaattggaaacaacaagcagaaagccaatctcattgttttaggagctgttccaagattgttgtacttgcttcagcaagaaacctcaagcacagagctgaaaactgaatgtgcagtggtgttgggaagtcttgctatgggtactgaaaacaatgtcaagtctctactggactgccatattatccctgccttattgcaaggactactgtccccagacctgaagtttattgaagcttgcctccgatgcctgcgtaccatcttcaccagtcctgtcactccagaggagctactgtatacagatgccacagtgataccacacctcatggcactgcttagcaggtcccgctatacccaggagtacatctgtcagatcttctcacactgctgtaaagggccagatcatcaaacaattttatttaaccacggtgcagttcagaatattgctcacctactaacctcactgtcctacaaagttcgaatgcaagcactgaaatgtttctcagttttagcttttgaaaacccccaggtatcgatgaccctggtaaatgttttggttgatggagaattgttaccacagatttttgtgaagatgttacagagggataagcctattgagatgcagctcacatcagcaaaatgtttaacttacatgtgtagagctggagcaattcggacagatgataactgtattgtattaaagacattaccttgtttggttcgaatgtgcagtaaggagagattactagaggagagagttgaaggagctgagacacttgcctatctgattgaaccagatgttgagctacagagaatcgctagcataactgatcacctcattgccatgcttgctgattatttcaagtatcccagctcagtgagtgccatcactgatattaaaaggcttgatcatgatttaaaacatgctcacgaactccgccaggctgcattcaagctctatgcctctcttggagcaaatgatgaagacatccggaagaaggtgagtctgggagaggggcgtcccccagtcctgacagccagcaggcagggagtgacgtcaacctgaaagtcgtggtgaagagcactaacagtgactgtttgaatataataaagcagagtgactaaaggcataattgaagaatgaatgggacccggatttggggggttgtttgtttgtttttagaacatagagtggcatggccgtgctggaatgacaaataactggcgtgctttttttttgtgtcattaatatgaattattatgttgcacatttttgcatgtgttctgataaaaatcaattctagcactgtgaagcttcagacaccttgaaagtcctaacattaaaattgtaaatgttatttatggaaataccttccaatgctattgagaaattcaaatctctattgtatattgttctttgatatgtggcttagttttatgttttgattttttttgctactgggcaagtttaatgtgaataaaatctttgtggaatgatgattttatgtttaaaaaaaaaaaa

SEQ ID NO: 63325 - DNA, 1118 bp, Homo sapiens
ttttttttttttggcttttgattttgtttgtttttttgtttcatttggtagttcatctgccttttaacccattcaccaaaatttaccttgttaacaagcatcaccaatgaacatttcagagcaatctgcatatttaacagacctaaaataaatcctattaggcaagtcagttgaaaatgctcgtgctgctaatggaattagagtgcgttcattttacaggctagtattttaaaagtagaaatcaaaatctggcaccgaagcatgctaattgtttactgtaccttgtgaggttttcactcataaatttaaaccagtgtatttttttagaactggtttgtgtatatatatagtgattatggatactaattcaatgtaatttataattttctatgtcaatacaaaaatacatcacagccttctcaaacagctcaagcaatatattgtatattgccatatcgtctggtgaaagggttaaattacttcacctcttgcacttttagatgcaaatcagtttttcatttctgtaatagaaaattattcacgtatttttacatcatttgtttttcctgaccagtatttaaaaccaaaaggatattctgaaaaatggccaacaatttttttagaagtagcatcccaagcagcgtgcctaaacattacattgcatatggaaataaaagaatcaaacgtctaatgccttatttctgatttcctttttcattttaagtggtgtggagattccagcactcccaggacagtggagtcagcagtaagccctgggacaggtggcaagggtgggtcccttgacctttgcacgccttctcaggaaccccctttcccgggtgagcccctctctgaagagactgtccttgggcctcctctggaagcagcacccccagaggacagggctcctcctgcttgcctcagggctgcctgacttgaatggcgttggacctcggggattactggtagataatatgctctggtctcgcctggtggtgagttttgccagccatggccagggtttggctccactggtggcacacgtggcctccgtggtatggacctggtggcttctccatcccactgtggcctctgtggtatggacctggtggcttccg

SEQ ID NO: 63326 - DNA, 437 bp, Homo sapiens
ttttttagttagattatcttatttttattttattattttatttttgctagtaagatgtaggagtttcttacacattttggaaatttaccaattattaaatatatgatttgcaaatgttggtttctatttcctaggttgccttttcattctgttgtttgctatgcagacagtttttagtttgatgtatttctacttgtatatatatttttttggctgcctgttctttctgtataattccaagaaatcattgtaaagaccaatgccacaaagctattccttctgtttcttctaagagttttacattttcagggcttatgtttaagcctttttttaaattttaatacaattttagttgatttttctgtatgctttaaggcacatgtccaatttctttctttgctttctttcttttgttcctttctttttctctctatctc

SEQ ID NO: 63327 - DNA, 979 bp, Homo sapiens
accgggtcgacgatttcgtcgtttgtgcccggggtaaccccgttccggccaagccgcttcagcgggggacgtagccatgaaggaagagaaggagcacaggcctaaggagaagcgagtaaccctgttaacccccgccggggccacgggcagcggtggtgggacctcgggggacagctccaagggggaagataagcaggatcgcaacaaggagaagaaagaagcgctgagcaaggtggtaattcgaagattacctcccactttgaccaaggagcagcttcaggaacatcttcaacctatgcctgagcatgattattttgagtttttttctaatgatacgagtttgtatcctcatatgtatgccagagcatacatcaactttaaaaaccaagaggacattattttgttcagggatcgctttgatggttatgtattccttgacaataaaggtcaggaatatcccgctatagtagaatttgcaccttttcaaaaagctgcaaaaaagaagactaagaaaagagataccaaagtcgggactatcgatgatgatccagaatatagaaagtttttggaaagttatgccacagataatgagaaaatgacatctactccagagacactgctagaggaaatagaagcaaaaaatagagaattaatagctaaaaagacaaccccacttttgagcttcctgaaaaacaagcagagaatgagagaagaaaagagagaagaaaggaggaggagagaaatagaaagaaaaagacaaagagaagaagagaggaggaaatggaaagaagaagagaaacgaaaaaggaaagatatagaaaagctaaagaagatagacagaattccagaaagggacaaattaaaggatgaaccaaagattaagctgctcaagaagccagaaaaaggagatgaaaaagaattggacaaaagagaaaaagccaagaaattggacaaagagaatctcagtgatgaaagagcc

SEQ ID NO: 63328 - DNA, 1100 bp, Homo sapiens
aaaaagcgccggcaattggggtcgcagctggagatgctgcggccggcagggctctggcgcttatgtcggcgaccttgggcggcgagggtcccagcggagaatcttggccgtagggaagtcacctctggtgtctctccccgcggtagcacctcgcccagaaccctgaatattttcgaccgggatttgaaaaggaaacagaagaactgggcagcccggcagcccgagccgaccaaatttgactacctgaaggaggaggttggaagtcggatcgcagaccgtgtatatgacatacccagaaatttcccccttgctttggatcttggttgtggaagaggttacattgcacaatatttgaataagcttcagttattccattgcaggaaactattggaaagtttttccaagctgacattgcagaaaatgctttgaaaaattcctcagaaacagaaatacctactgtcagcgttttagctgatgaagaattccttcccttcaaagaaaatacatttgacctggtggttagcagtttaagtttgcattgggtgaatgaccttcctagagcacttgagcagattcattatattttaaaaccagatggagtgtttatcggtgcaatgtttggaggcgacacactttatgaacttcggtgttccttacagttagcggaaacggaaagggaaggaggattttctccacacatttctcctttcactgctgtcaatgacctgggacatctgcttgggagagctggctttaatactctgactgtgggaaaagctctgattgacaatgtttagtttgtataacacatcttaattgacacaagaagcaaggggcatgggcaagcagggcccctgatgttggaaaggagcctccagggagggaagaattaacaggctggaggactaggctgggaactgaaaagaaccccggaggcttcacacctgtgactagtgttgatcttttgttaacttttaaatggcctgagtccatagaaactgcatcctgagaggttgctcggctagaaagcggaaaaccgcttcacatgagtgctctactttgtaatgaaaataaacactattaatacaggcaattgtaaa

SEQ ID NO: 63329 - DNA, 2300 bp, Homo sapiens
ttttttttggtggtcacttaagatttttccagacaacaacgtgcgtcatttttgcctttgagatgtgtttctttctgcctccattccagccacagtcccatcctggcagtgagcaaatcccacacgcagttctagcaggacgctgaggctcagctgcaacatggggcagccaggaagatgcctgaggaggtgccaggcacacaggaggcactgggacagactcgggccggggttgcaggctgcagcaacgcccacccctctacttccaggcacagcccctccgtctcacaggacagagacagggccggctcagcggctggtacacactgctttatttgttctttttattattatttttaagttcacctacagctgcagtacacacacaccgctttatttggctagctgctattcagaagacacttcctgaattcaggaaaaatttttttaaaaacctgagaacaattcctgtgacttcttagctttgatgaagtgcatttactttgacattgatatagcttgtaactacttttggaatttttttttccctaacactttgatctcattaagggtattacaccttttccaccagaaaatgcagaggtatcatctttcttggaaaccaattgaaagcgtcccattttaacaaaatgacataaaattacaaacatttacatgtttaaattcaaagcctgatccatctggtggtaagaaatgttaacttattttaaaagatgtatttgcattattaaaatatagtaacgacttccatctttacatcaaaagaaacgggcttgcataagcaatggctcccagctctggggagggtttgagccacgcccttgcgggggccgctccaagctctgacttcaaaagttggagtttcccagctgcgaacagctggtcaaaggcactctcaaaagttcaaggaaatgcccgtttgcggatggccgcagcaggcctgtggggctggggacagcgccaaggagctggccgttggttcctgagatgctcctgctctgccgtgttctaaggacctgcgagctggagctcttctcgggaaaaagaaaacgctggggaggcctccgtgtgggcgggtcaagccagataaccaggcttgtactggcttcagcagaagccgcgctgtttcctccttccccctctatctccttctttcccttctgtctcctccttccccctctgtcctgatgccctgcaggctgctggggaggagcctgccgcctgcctcctgcctccctagaccgctgttctccccacagctctcccccggagctgtcccccagcaggccacacctgggcccaggctccagacctgcccgcccacacaggagtcccctctagccggagctccgccccctgttcccagggcgtcctgggcaggtcagttttcccatctgtcaaccaggaacattccaaggctcttcctgcctcactgctgtggtttcccaccttccacccaggcaggaagagaatttaaaagccccgcaggccctggccaggatgcctgtgagagggagaactggaaagccagtatcaggcagaccctctcccggttggacctgggcgctggctccccgcagggaaggcactgctgtgcctggggcaggggaccagcagtggcagcagttccagattgtcagagctggggagggcctccaagagctgccagagctgattttccagagagggaaactgaggcccagagaggcagtgacgagctctacctcccactgcaaggcagatcagagctggggttctcgctcctcaaagtgcagttggggcttcggagctcgggcctgggctgggagctggttagacgtacagaacctcaggccctgcaagtcaacagcacccccaggctgctcattagggagttaaagttgagaagcactaagctgacccggccccccctggagagatgggcccgagactgagggaacagcgcgggtgcaccttccacagcagaaccttccggaagtgttgtggcgcggatgccaggaggggctcgcttgtgtcacctagtcctcgtgagccctccccactgtggagagcgggcaaccaagaggggcacgcatttcaggctccagaagaactgggcaggctccccgcgttggggaggaggcgccggcggcccaggcccacgcacctgtgggtctacacagctaatcgcccccaccagcaaccatgaccgccagtggctggcccaggtcagcgcggtctgaaagtggatttgaaagggcagaattgaataacgggagtgactgcgttttggaggtgcc

SEQ ID NO: 63330 - DNA, 916 bp, Homo sapiens
gggtaaagatgaggacagaggaagtgggaggtagaaaccattatgatggcacaaggtagagaggaaggaaagccatggagttgtgagcagagcccaaagtagggagagagacagaggatggtatctgaggaccaccgggagctcaccattgtatttcataaaatgctttgcatacagtgagtactttatcagtatccttgaccatatgattaaaatagagtgcatgaataggctagatattgaggagggagttcgaaagaggaaaaaaggacaggaaatgggagatgtgcataaaacccccttgagggcaaaggccccagtctgggtggcagcgccctcaccggtgcacgatgctcttgctgtgcaggtaggcaatgcccagggtcagctgggagaaccacttgccagcaaggggctcagagcaggccccgtagcgctggatccattcaaggacatcaccaccctgagccagttccagaatgatgtatactcgagatgtgctctcaatggcccgatagaagttgatgaggtacttgtgccgcaagactttcattacctgaccccagaagaaggacccatcaaacctgggaagggagaaccctgactgcactcccagccgtctcctaccctcagctactgacttaggactttgcaataggatcagcccctcaaccccagagaactggtggcctgtgggcaaacgctatgttttgtgcctttactttttggggactgaaggtgagtgggtggatgggaaagaggtttaacttacataaagtttcctagctgcttagtgagacatttcagttctggtttaggggtttctggccccacccctcctgggccataccccttctgagaaacctcaagcagcttagtaccaagctccagtttccctgtttccagccccctttcg

SEQ ID NO: 63331 - DNA, 1201 bp, Homo sapiens
cccgtgtggtggaattcggggcggcggcggcccctcgcagcagctggccggcgggcccccccagcagttcgcgctctccaactccgcggccatccgggccgagatccagcgcttcgagtccgtgcatcccaatatctacgccatctacgacctgatcgagcgcatcgaggatttggcgctgcagaaccagatccgggagcacgtcatctccatcgaggactcgtttgtgaacagccaggagtggacgctgagccgctccgtaccggagcttaaagtgggcatagtggggaacctgtctagcgggaagtcagccctggtgcaccgctatctgacggggacctatgtccaggaggagtcccctgaaggggggcggtttaagaaggagattgtggtggatggccagagttacctgctgctgatccgagatgaaggaggcccccctgagctccagtttgctgcctgggtggatgcagtggtgtttgtgttcagcctggaggatgaaatcagtttccagacggtgtacaactacttcctgcgtctctgcagcttccgcaacgccagcgaggtgcccatggtgcttgtgggcacgcaggatgccatcagcgctgcgaatccccgggttatcgacgacagcagagcccgcaagctctccacagatctgaagcggtgcacctactatgagacgtgcgcgacctacgggctcaatgtggagcgtgtcttcccaggacgtgggtataattgactctgctgtcccctgcagtggcccagaaggtagtggccttgcgaaagaagcagcaactggccatcgggccctgcaagtcactgcccaactcgcccagccactcggccgtgtccgccgcctccatcccggccgtgcacatcaaccaggccacgaatggcggcggcagcgccttcagcgactactcgtcctcagtcccctccacccccagcatcagccagcgggagctgcgcatcgagaccatcgctgcctcctccacccccacacccatccgaaagcagtccaagcggcgctccaacatcttcacgatatgtgccactgtttccaacttttcatcaacaaaaaggcctttccaactccttccaaattagaagaccagttggtgacacacagcacctctggacatgccccctgtgcggggccggaggcgggccgggccctgggactgctctcagatgagaa

SEQ ID NO: 63332 - DNA, 852 bp, Homo sapiens
ccggctgaagcggccgggcgccgattggtgtctttgagtctagtctttggtcggggctgtccaaaggacgctagctgttgcacctgttcctccctgcgcgtaagatagaggataaatctcctggcaaagcccagaatgaccacagccctggaacctgaggaccaaaaaggacttctgataattaaggcagaggaccattactggggacaggattccagctcacaaaagtgcagtcctcacaggagggaactctatagacaacacttcaggaagctctgctatcaggatgcacctggaccccgtgaagctcttacccagctgtgggagctctgccgtcagtggctgaggccagaatgccacaccaaggagcagattttagacctgctggtgctagaacagttcctgagcattcttcctaaagacctgcaagcatggggtgcgtggcacaccatccaaagactggagaggaggcagtgacggtactggaggatctggagagagagcttgatgaacctggaaagcaggtgtgaaggggcagtcatctggctgtcccaggcaattcagaaagacgggacatactcatggacaagttggcccccttgggaaggccatatgaatcactgactgtccagctccatcccaaaaagacccagctggagcaggaagctgggaaaccacaaaggaatggtaagcaggaacagttctgagtgtatgagggcagaggtacttccttaggttagaggaaaactttctcactttcatcttctccttttaaagatttcctgcttgtcctccacctcactatggacaattttatcctcctcttacccttgctccatgatggagttatat

SEQ ID NO: 63333 - DNA, 1564 bp, Homo sapiens
  misc_feature (1)...(1564): n = a,t,c or g
tttcgtgccgtcgccgccatttcaagaccgtactaggtagatggtcaattagagttcccagggtttgaagcctgtaactgctgccgccgctcaagccctccagagcattgctacggctgctgcccttgtactactacctccaaatacgttcttgctggtagtggcggcagcaggaccaattacctcttttttgctctccctcgagaagctccagatggcgtcttccgtgggcaacgtggccgacagcacagaaccaacgaaacgtatgctttccttccaagggttagctgagttggcacatcgagaatatcaggcaggagattttgaggcagctgagagacactgcatgcagctctggagacaagagccagacaatactggtgtgcttttattactttcatctatacacttccagtgtcgaaggctggacagatctgctcactttagcactctggcaattaaacagaacccccttctggcagaagcttattcgaatttggggaatgtgtacaaggaaagagggcagttgcaggaggcaattgagcattatcgacatgcattgcgtctcaaacctgatttcatcgatggttatattaacctggcagccgccttggtagcagcgggtgacatggaaggggcagtacaagcttacgtctctgctcttcagtacaatcctgatttgtactgtgttcgcagtgacctggggaacctgctcaaagccctgggtcgcttggaagaagccaaggtaggtgtttgatagaacacatttaaacatcagtattatgaaaacttgtactttttgccaagtcttcaactcttcattgagctatcttcacaaaacagtcctatgaaactgaggaaaactgacggcatgaatcgcctcagactagagcagggccaggctttggcatatctgttctaaatctgggggtaaagcaagaacctgaacattttggagcctttctgctgagctagaccatctttataacactgggctccgtcatgatcttatgtgggaataaataacattccttcaaatctgaggcttgcctgctggtgacaagcagagcgcctgtgatttggctcaagactcctatatgatgcaggtgccattgaaaatgctgctcttctaagtcctttgtggcttgtaagtggagaagaatttcatccaaatgttaccctgtaatactggcatttaaaattcttatttaaccttcctcccttcatcttcctcaccctttttacagtggaagaaaggctgttaaaatgattacaaattaataattggaacatcctgtcccttgtccccactcccttcccaagttcctttttcctcttttccaatcctagttgtctaccttcttttcttcctcatttccttcttttattcctccccaccccaaccccttaaaaaaaaggtcagaaggacaaagctggtttgtttgggaaatggactgatcgaaagaaaacttgccaaagtggaaaggtggcttttagcattctgtgtttccaaataatgaatttgaacgaattccccgcggtnnnnnagtgctatcaatccaat

SEQ ID NO: 63334 - DNA, 561 bp, Homo sapiens
acagagcggcggaattcaaaaagtagtgcgatgagcgccctgttgagagaaagaactgcaaactggccatgcttatttttaagctggagctccacaagtcctactgtgggagccggacagagctctggcaaggctgtggccagctcatcatgcaccgcatgctcgcccagcacagagctgtctgtcggagtgaacaggcccagctcgggaaagaaaccagtcctgatccaggaaaatgtctctccattacggttgctgctgccctgagtgcacatctgtggccataaaggaaatgatgtgggtgattcggccaagagttgcctgtgtggtcaaggatgccggcagcgcaggaaagtcaagaccaggggaaagaatttcagctcctgaaagggaaatctactgtcattattgcaaccaaatgattccagaaaataagtatttccaccatatgggtaaatgttgtccagactcagagtttaagaaacactttcctgttggaaatccagaaattcttccttcatctcttccaagtcaagctgctgaaaatcaaacttccacgag

SEQ ID NO: 63335 - DNA, 955 bp, Homo sapiens
tttttttttaagacagggtcttgctttgggacccaggttgaagtgcagtggcaagatcacactcacggtaaccttgaactcttgtgctcagcctccgaaggtgctgggattacaagtgtgagccaccacacccagcccttttcttagggatatggcagccatcccctgtcccccaagctcctacaggactctctggagtcctgtgattccccccatgcccacccttggccttgtcaccccgctgtcccaagagtggacagacttaccagagggcgatgagtgaaaggagttgaggttgggcttgagatcaggcaagttgggttatcttgacctcttggtttggtgacatgtaagggacgctgctgcttggggtcatgggtggcgtggggttccctggcagtggggaactggggatagcccgggattggaacgggtaagctgtaagggttgaacacaaacagtcaaggcagattgccagggtggatgggagtggagtctgttcacggcgcatccactgggaaccatgataacagaggtggacatggaaggcgccccaggggtgcctgctcggtcgccctctctccatatgcccaccctgtgagcctcccggcccatcctcccggccaggccccctaccccactcaggccaggttggctgtagctgacgctgcccccgttgaagctggcgccctgcccgttgaactgctctgtgggctgcgggagagaaaactgcatgcacctggggctccaacctgacccctgccgggccccctggacctgaccctagaagcccaccatacacggtcttctttacactctcttgcattttccaaataatctacaagtaacactacttaaagcaatcatagccacagaggaaaatgatcaaacaggttggaggggctgaaaagacaaaagcacgctaagccctcctcctctcctttctcctgcctcc

SEQ ID NO: 63336 - DNA, 2597 bp, Homo sapiens
ttttttttttttttgaatgtcaaaaagggtttattatatcatatatatatatgaaaatctatgaaaccaaaagctctcccacaaaagatgatttaatgaagacattcattgttcttgaagagaaatacaaatgatctttgaacaacacaggtttgaaatgctaagtttcacttatatgcaaacttttttcaaccaaacacaaataaaacatatggtatttgagggatgcaaaaccctcaaataccaaggaccgacttttcatatggcatagggtcccatgatctggcaggggcattggcttgggattttgggtatccaccaggggtcctggaactagataccaagggaggactgcactcggtattgtcggtctctccaaatcagtcctataaatgttgtgcaacccatatcaaaacttcaagagatgtgctcaccagcagttaaccaatttttatagaacatgaggaaggctttacccaaatctgagaacataccaaagtaatgcatcatttactaggaatatggaagagctcagtgaaagaatttaacacataatgaaacagcatttcaaatcagacatatgagtggacttttcaataaatgaattttgaacagatattggaagcagcgctgtttcactcttcagaaaaatcaattctaaagatctacatgttaactactcacacagaaacatgtcgtagaggaaaatacatgacgtgaaatgagcacatgtaaacataggaaaacatacactgtaaatgtcttagaaaataatttgctttatatcctgaaataagtcatgaaaattaatcaatttgattgtatacaaatataaaacatttatttaaacagacaccatgtaaaattaaagccaaatggctaagtaggagaaaacattggcaacagacataaaatacagaaaatacaagagaactcctaacaaatccatgagataaaaggacaaatcattcaatagaaaaatgagaggaaaaagaaaattaacaaatgtttatatgttctaaaataaacatacaaaaatatgtccatcttcactagtgagaaatttctgatttaaaaccaaaataattttttcagagtaattaaattacaaaaatccaatagcaagtgtcattaattacatggggaagcagatgctcatatcttgctcaggggaactgtaacttgatacagccattctggaacccaaatggaagtatctcttcaaattaaaaatggttatactctggcctgaaattcaaatcctaagcatataccacagagagagccttatatgtacaaaaagggctcatgtaggatgatgttcctttcagcattgtttgtaattataaaggaataaaaagaaggaaaccttccttaagtgtctattataggcaaagtactgttggacagtgcacaagagattaggtaaatgtgaatgtaccaaaataaaaaactcccaagtagaaatagcaagttgtacaataatatacatacacgtatgtaaaaatcgtaactatacatttcctgtggctgtagataatatatacacattcctacattaaacactcataaaaacactctaaaagaagatctaggagagttaaaactattacttctacagaggatattgggactgaagatggttttcaaaaagcacacaagcaaaatgtagtcatatattacatgagtaattaaaaaactgaaagagtgtgcacagattgatatattttaaggaaaatatagataaaattatattttctatttctttccctcccttgatggaaacagtacatgaaaggttctagaagattacctgccaaaatgatgtatactatctaaatatatctctggtaacaatacacttaagtctttatgctcactttaaaaagagaagaaaattcagttcatgatttctgtaagcaatacaatttcagttcacagctcttatcattttgttttagttatttacaatctttactaggtatagaattatatattgggattttgccatattccaatttagaatatagtatttaggaaagaggaaaatagttttttaaattagaacttaagtcatgattaacatttctgtcagtggctttaataagtcaatacacatttctaaaagaaaaacgaaattgagtacaataaccacattggcttatttccttagtagtttattaattctatcttacatcattaaataaaaacatgaatattaaaagatatcactggtaaatgccttttgaggactgcttcttttggagatcattctacaaaactctcttaccctaacaacgaacgagaatgctactggtgttcatattcaaaccactgtgtttcatgaaagacccaacttttgagggtataaactaagaatagtttttagagcgctatgctttaaagaactgcttatttttaattcatgtattgcaaaagtcttgaaccataaaaaaaacaaaacaatgatgatgagaaaaaaagaaaactccagggctacctgggtttgcaatggttgtgaaagaaaagtatactcagcattttcttcccaaattaaaaggtcccccccaaaaaagtgtagccaaaaaaaacaaaac

SEQ ID NO: 63337 - DNA, 384 bp, Homo sapiens
actggttttctcagagttttaatcatatatagctatggaaccttataaaaaaaatcaaatgactgactttctgtctaacaccatatatggagattaaactgacagatttctctgactttgagccatccttgccttccaggataaaccctaactaatcattataaattatttttaatacactgttggatccagtcagcaaataccttacacaggatttttgcattcagtagcctgtaagtggcatgaactgatcattttctgtaattatctttatctggttttggaattcaaatttcactgccctcataaaaagagctgggcaggctgtgtactttttctatcttctctaacaacttaagataggaattagtagactggtgagca

SEQ ID NO: 63338 - DNA, 778 bp, Homo sapiens
ggccagttacttttatgataagagcttgtggctgtttttccacaatttcagctctttctctacaggagataagactctcacttagggcaatcttagcagattttaggttcaatatctgcttctgaagcctgggagctagaatccctgagttcatcattttctttcatgactttgtccactgaacttaggagcaaccaactagcttcattatgttccttggttttccacgtatgggtcaattgtattatgtatagtcactgaactccttgcctctcacgagcgatgattcaggtgtgtccaaatgcatttattttgcataactctctaaacagttcacaccaaggactatcagtgttccctatactattagaagtagagtccttagcattttgggttctaatcatattaagcagccaactccagaaaccccaaaaccaacaaaagaactccatccttaatattctgttcctgtagaatcactcctggtaccaaaatctgtattaggtttctctagagggaaagaactaatggaatagatatatatatttatatataaaggagagtttattaagtagttttaactcacaccatcacaaggtcccacaatagggccatctggcaagctggcaaggaaagggaaggccagtcccgagttcctgaagaacttggagtctgatgtttgaggacaggaagcatccagcataggagaaaggtataggctgggaggctaagccagtctaatcttttcacgttttttctgcctgctttatattctgac

SEQ ID NO: 63339 - DNA, 1477 bp, Homo sapiens
  misc_feature (1)...(1477): n = a,t,c or g
ttttttttttttgacggtcttcaggtttatttcttaaatcaattaggaaataaaaccacagtgcccaggaaagttcacatgagacgccacggtgtctcttgccatggccccaccactccaggggccagggggtgctgctggagggaggacagacggacaggcggcctgggtggccggccccagaaaggctggcgtggatgttcgagatgagccaccagcgaagccagtagggatgtctgggccgtcctggtgggattgtctgggacatcgccaccaacacggtgtcagagccatcagtggggacatcggaggggccaccaccaggtggggtatattcaacaggctagaacccctgaggcttgagaggccaacccccggcaggagacctcccctgacccctctgctgcctctcctgtgggaccctccagtagacacaccagatgaggacacccaggaggcctcctcccaggacaggaggcagctggctgggcagccacgcagtgcagggttcagggccctccagcaggagctccatggagatggctaaatggggacatcaaggcaggggctgacagtggtgacatccaagtggtcacagtcaattccggaagctttcagggcatcaggaggggaaggtggggctggggaaatgtgacaggaacggggaagtgcaaaaggcaattggcctagcctgggagattttccagttggcctgggggacccccggctcctccattcagcagggagggcggagggcctgcttggaagtcacatggagctgcagcatctggaacccaacagccacaggaggcctggatcggggctccgtaaggcacagccgagagggaggtggggaggccccagtccgagtccagggcccaggggagatgattcctgcagtccccaaaagcagctggaccctacacaagatgcagctcccaggacacgcgtgttccactctcggcaggagaggagaggaaaaaggaaaggccgggccagaggctcacgcctataatcccagcactctgggaggccgaggccagcggatcacctgaggtcaggagttcaagaccaacctgaccaacatggtgaaaccccgtctctactaaaaatataaaaattagctggacgtggtggcgggtgcctgtaatcccagctactcaggagggtgaggtgggaggatcccttgaaccccaggaggcagaggttgcagtgagccgagattccccccctgcactttaggccgggcagcaaagtgagactttatttttaaaaaaaaagaaagaaagaaagaaaagaaaaagagggaagagttaaggccagacagggacagggatggaaggagccagaggctgaaaagcagggagaggaggcagacacaggggcaccaaggcagcagagaggcacgggttcctctgaggttccagtttctcgnngtccnccgcnagggctntaggtcatcaatnnggncacgcct

SEQ ID NO: 63340 - DNA, 2034 bp, Homo sapiens
ggcacgagttttgtttgattattttacatagacaaaagaactcatattactttacttgctacatttcaacatctttcctcagcttattagctctatttcttttctgtctgtaaatggatattgctgatttgttctttgagacagggtcttgctctgtcaccaggctggactgtactggcataatcatgcctcactgcagccttgacctcccaggctcaaacttccgcattccgaatagctgggactacaagtgtgcaccaccacccccagctaacttttttcttcttttggatagagacagggtctcactgtgttgtccagaccggtctctagctcctggccttaagcaatcctcctgcattagcttctcaaattgctggaatttcaggcatgagccaccgtgcctggcctgggctagtcctatattctctagagttctctttactttgtgctagtcaatctctcattatgctgttcacctgttataatgaataattctctgtattaaattttaccactttaaacttttgagtggtttatgcttcctgattggactctgactaatatgttaggaagggtcccaggagataaacccacacagatgggatttgggcagtgctgagctctttgccagtgggaaatgggatgctggtgatttccagtaggtgacctcacagtgactcaagctaccacttactgttgattgtgacgaaatgccagctgaggcacatgccttgggagctaagtggttgctgcacttgaccactgtgaagactggtgtgggaagaagggtcgtttctgatgcacttgagcaggggtccccaacccctgagccatggagccgcaaggagccacacagcaggaggtgagtggtgtcgagtgagggagtgagggaagcttcgtctgtatttacagccactcccctttgctcacattcccgcctgagctccaccttctcagatcagcagcagcattagattctcataggagaacgcaccctgttgtgaactgtgcatgtgagggatctaggttgtgctgtccttatgagaatctaatacctattgatctgtcactttctcccatcacgctcaggtgggaccatccagttgcaggaaaacaagcttaacatgcccactgattctacattatggtgagttctataattattttattatatattacagtgtaataatggaaataaagtgcctaataaatgcaaatgtgcttacatcttttggcccagctcctacctcccggcagcctctccaggcccagaactttctccagtcagcctctacagaccaagctcatgactcacaatggcctatttaggcccataccctacgtcacggcagtctccgcagatgagcctactgcctcacaacagcctccacaggcacagctccatcgttacaatggcctctttagacccagctcctgcctcccagccttctctccaggccctgaactttctcaagtcgacctcaccaggcccagctcatgcttctttgcagcctctccaggcccagctcctgcatcttggtggcccctccaggcccagcctctgcctcccgtcggcctctacagtcccaacatctgcctcacagcagattcttcacgcccagcatctgcctcactgtggaccccccaagccaagctcccaacctttcagcagcttctacacacccagctcctgccacccagtggcctctttaggccaagctcatgcttcacaagggcctttccaggcccaacttttgtctcatggcaaccttccctggccagattcctgcctgtctcccagcagcctagacaggcccaggtcttgcctcacactggcctctctacatgcagcttatgcctcacggtggcctctccaggcccaactcctgtcccaggacgtcatctccgggcccaaaacttactcaagtcagactctctagtcccaactgctgcctcctggtggcctatgaaggcccaaaatctcctcaagttgacctgttccaggtcccagctcctgcctcctgtcagcgt

SEQ ID NO: 63341 - DNA, 492 bp, Homo sapiens
gcggccgccaggaggagcctcccggactcggcttctcccgcgggctctcctgaggttcccggaccctgcagctcctccgcgggtttggacttgaaggacagtggtttggagagtcctgctgccgccgaggcgcctctgagagggcagtacaaggtgaccgcctccccggagacagccgtggccggagtgggtcatgagttgggtaccgccggagacgcgggagcccgcccggatctcgccggcacctgccaagcagaactgaccgccgccggctccgaagagcccagcagcgccggcggcctcagcagcagttgcagcgacccgagccctcctggggaatctccgagcctggactctctggagtcgttctctaacctgcattcttttcccagtagctgcgagttcaatagtgaggagggagcggagaacagggtccctgaggaggaggagggcgcggcggtgttgcccggggctgttcctctgtgcaaggag

SEQ ID NO: 63342 - DNA, 1564 bp, Homo sapiens
gatcttttggttaactggctgcacatataccttaataaccaggattcgggaacaaaggcattctgcgatgttgctctccatggaccattttactcagcctgccaagctgtgttctacacctttgtttttagacacaagcagcttttgagcggaaacctgaaagaaggtttgcagtatcttcagagtctgaattttgagtggatagtgatgagccagctaaatcccctgaagatttgcctgccctcagtggttaacttttttgctgcaatcacaaataagtaccagctcgtcttctgctacaccatcattgagaggaacaatcgccagatgctgccagtcattaggagtaccactggaggagactcagtgcagacctgcacaaacccactggacaccttcttcccctttgatccctgtgtgctgaagaggtcaaagaaattcattgatcctatttatcaggtatgggaagacatgagtgctgaagagctacaggagttcaagaaacccatgaaaaagttgttctggagaatcatgtagcgacagatgaagacgaacctgctttgaaacgccagcgactagaaatcaattgccaggatccatctataaagtcattcctgtattccatcaaccagacaatctgcttgcggttggatagcattgaagccaaattgcaagccctggaggctacttgtaaatccttagaagaaaagctggatctggtcacgaacaagcagcacagccccatccaggttcccatggttgccggctcccctctcaggacaacccagatgtgcaacaaagtgcgatgggatctgaagggagccgagctccttctgcagaagggcgctgagaagggagctggaaggaaaagaaggaaacattccttcctcaactggaggaagacaacgcggccacacacagaaccagcggccccaggaccgtcaccctgcgtgcccgggcctgtccctcctgaccccaggattatagtggcgaggcagggtgttagccaagcggattgagccaggacacaacaccgcggagccctgcaggcgagtcctccggaggctgagagcaaacggttgcactaggaacccagcagtcagaccggcccccaccctggagtgaacacatcgccactgccaggcatcgcagggaggattaccccaatggcacctggctgggcgacgagaacaaccccgagatgcgggtgcactgcgccatcatcccctccgacatgctgcacatcagcaccaactgccgcacggccgaggagatggtgctcacgctgctggactacctcttccaccgcgaggtgcaggctgtgtccagcctctcggggcagggcaagcacgggaagaagcagctggacccgctcaccatctatggcatccggtgtcaccttttctataaatttggcatcacagaatctgactggtaccgaatcaagcagagcatcgactccaagtgccgcacggcgtggcggcgcaagcagtggggccagagcctggtggtcaagagcttctcgcggagaatgcccaactcatcctcctactgcccctgtatt

SEQ ID NO: 63343 - DNA, 929 bp, Homo sapiens
aaatgcgaccaaggtctctccgaataagaatatgacatgaataagattatgacacaaagccggagagttgatacacccctgaggtatgacagtgaaggtatattgctggccttgccagctgaagacaaattgcttctggtgggccttggaacaggaatggagaaaaaggcatttgtcaagtcagtggctacataccaggtaccaagagatatggtaatttgctcaagcaatgaaaccacatctggtacagcagctgcaaattggagtcaccacttggttaaacttacgataatccgctgccgttcaccaagatccatctgtcttctgcacaggccaaatgggagagttgaaccgggatgtggtgggaatcaccaccccgcgtctcaagtttttgatggacactaatctctgcaatccctccgggaatacgatattgtttttgatttactggttttctaggtagaggcagctctcatggcttccatttggcctttccaaccataaaagccctcaccctaccagtcagggagccagtgtgggggttctgccagctgctaagtatgtctctgccaattctgcattctggcactgggaaaatgaccacaggatgagtccggggacccactggacccactgtaagtcagacctgagctaaaactccattaattacctgacttccataagcccctatttaactggaggactacagtgacgttttgggtcccctggaatcagcatcagctcagagccagtatcctgtagtccctgaaatgtctgatcatttccctttccccagtgcacagttaccctggtaaaaggccagaggtcttggggaaggatgggagaaagattcactgcataaattgttggtaatgtagtgggatccttcctcaaggggacccggcctccccttcattcaaggggttctg

SEQ ID NO: 63344 - DNA, 1164 bp, Homo sapiens
aatacacctgggcgactatgactttaaacatgaattgtaataggggaggagaggcagtcagattctcagctgcctgacagcagaggcctggaagtgtgcagcttagctcctctgaagtctgtgctgggggcactgtacatggaagatccctcctggttggcctggcacaacaggaccgtgcctgcatagaattcgggactgtagactgcacccacaactggattcaatttccagccatttgtataagggttgacggtctttttatttgtcattacacgtgctgtggcattaatttacctccaattttacggccctctaaccacggtgccgtgtaaatttctccctcgccctgtccgcatcggcactattttcgaaagttacgaaaccaaatccctttgagcctcgctcattaaaaataatttcaacatctaagattttaccaaattgaccaaaacatttgtctgaggtccggatcccggaaccctgaaggggatattggagacatgcagcccgcttgggctggagacttgttttccgtgttttcaagaagtttgtgtcttggggcttggccatccgtcggtgctgcgtcaatcttgtttgttgcgggtgccagagacggtctgagcgctcgtgtccgccgggctctgctcggagtgcgtctgggcgggagggtacaggtttaatgtgtgctcgggaaccgtggtctggcctgtgtactctggcgcggggtggggatgaggggccgtgtattccgcggggataccgttctgcgggggagcaaactgggccgaagcgtaaggctgagccattgtgtcaggggcagcggctgcttcctgattaccctgaatcagtccaggaaggtaaggagctgccggtacaatcataggcacgccataaggatgcaggagaactccttgagacgccagcatgctttacgtagagttattattccctctgaagctcaacacatcaatggagagttagggggaaatctatagacccaacttcttccgaactacaaagctgggagccaaatcccttctgtcaggagccaagcactcatcaacgccgggagaggaaagaaagaaaatccgcatcagcaactcttaatgtgaaagttttcttcccagacgacgaagagacacagcagctcggacgcgtggg

SEQ ID NO: 63345 - DNA, 1597 bp, Homo sapiens
atggaatcactcgggcgtcctcctgggaaagagctgcctgcttccccgccgccgccagtacaccggcgcccatgccccgggggctggagagagcagccaggcacaggtaactcaagaactccagtcccctcacgggtgccgtgctgtggggcgccctcacccccacactttgggtccctgggcctcctcatcaaagcaggggcctgagtggcaggaacacccctgtgtgcagaatagtgccccctgcagcccccacaggtcacctctttgaggacctatgtggggcctgccctggggactggggtgaagagggcaggtccagccttcagcagcccctcccccatgacttcagtggaattacaaggggaacacccagggcagctcccgtaggctgcacaagggaagaggggagggcttctactgaggtgaaacagtgacccacccctcccacaccgtcagcctccctcccctctccacccttcagtgctgggaccccagggcccatagacagctgggggagtggggagacaggaggaactcaagctcagcttctgcctcctgtctcctgggaccctcgggcagcccctccagcttcctgggagtccaatttcccaaggtagaacggtggcggcagagcctggccctgtggtggggcagctgcaccccgatgagtggcttgcagttcctggagccctgcaggttgttggagaggcagggagcccttctccctcctgcctgccctcttgcacttcctctcccagaacccagcactactcccagaggctctgagctggagccctagaaggtaaccacctcctggctggacacagggcaagttggggccaggcgtgaggacaggtgccccaggagccacctgctccactcatccacaaaggccttaactggctcaggggccgctagctcccagtcaagccctgccctcctgaccttgtcctgccctggtgctgccagtcgggtggagatgtctaggggccagctggtctcctggcaactgaagtccgcgcttcccttccgttcactcattccttcctttcctcatgcaggaggcgctgcaaggctccgtgctcctggagcttcgagtctatggtatgagttaaacagaagggtatctcctccatcagatctacaggagggtgtctgctccatcagacctggagcttccaaggcattttacccgaagctccagcacctggcccaaggctgggctgtgctgtgtcctcagtgaaagaatggatgagtcacagctgaatgactgaagagctgaaccagtaggtttccctggggtttccacaggcagtttcagcccaggggaagacccagggagatgagggccaccttgcaggacgctgtggtgtggaggcagcagcctggggcagggactgtgctgagtgtctgaggccgagccacccctctgtaacctccataatccatcaggtctcagagggccgtcctatgttcagtaagccaatgctagcaccatgtgacgaggacacagcagtgaggcagctgcccagggcccctttgcactgtgttttggaaaaggaagctggctttgtttcagggggttcccagcagg

SEQ ID NO: 63346 - DNA, 420 bp, Homo sapiens
tttcgtgggccctcctggggacctgctggacctgctggacctgggtgcgacgagtgggcggccacgctggtttggcgcggggaaggaagggggtgtgccgacttgtatttagttgggggttgtggaagtcacggctgggggaaaagcgtccggtggtttgttggtaaagagggtgcgtgatgggctctggggaatggaggagggcgcaacggctgtgggtggactgtggaaacgggcggtggcagtgccggggtagttgtcctgctggtctggttttgggatcctgggctggagaaatgcgatccaaaagagctcgggatgggctcagagcgacccacgaaaataccaggggccaagtaaaatgaacccaccctttaacagtgcacaaagcgctggcacacggtccacgtctggtgaccc

SEQ ID NO: 63347 - DNA, 983 bp, Homo sapiens
gtggggggcggaagtgcagtgggctcagcgccgactgcgcgcctctgcccgcgaaaactctgagctggctgacagctggggacgggtggcggccctcgactggagtcggttgagttcctgagggaccccggttctggaaggttcgccgcggagacaagtgagcagtgagtcgcagtgaccctacaagtggttcttttacccgagcggctcgtaggcgcgttgcggtttttcgaaactacagctcccggcaggccccaagccgccctcggggccgcgggtcggcggattggccgcgctgcattttgggacctgtagtttcctgcgctcgtggcgctggcgccgcggcgttggctgagcccttgaccggggctggagggaagggccgacattcagtgtgtccgcgtctgttctgttagtcccagttcccgggcgggattgaggcttagagaagttgagtgatttgctgagggctgcacgggttggcatcccggcatgctctttcgctactttggctgcatctggttgcccacccgggcggatggggaatggactccagccagccaggagggcagagggctggagaggcagggccggaggttcagaccctccgctctgacgttgcgcctggtgaggccgggaggggtgccgcttgcctcttcagccctcacgctcttgtggaagtcgcggaattactgcaggcggaacttgcagcactgtgggcgtcttttccagagaaggacggagttgtggggcgggaggataaggcaaggcccagccacttcgcatcttcgccccgccagctcttcgagatgggatataccagggttgctctccaaccctctccgcaggagggactgatggaaacgcctgggaaagtagcccggtacccacaaaggctgtctacaaacagagtcttactgtctttcccaggtctgtgccatagggattctcgaagagacagcgttgtgtcccatgcacatgct

SEQ ID NO: 63348 - DNA, 1399 bp, Homo sapiens
tttcgtggcgcgtgtgcggggagttgaatctcccgctcccttgaggctggggttgcgtctgttgacgcggccgactacaatcccgagggagactcacattgggacttgtcctcctcctcctggacattttgggggctcgtcagcatggacagcgagtcagccatgggtggaagggaggctttctcacagctcccttgtgcttcccacagccctgccagccgggaacacggaggggaaggaggaggagcttaaaagaggctactgaaccccagttggccatggctgaggaatttgtgaccctcaaggatgtcggcatggacttcaccttgggagactgggagcagctcgggctggaacagggggacacgttctgggacacagcgttggacaattgccaggacctcttcctgctggaccccccaagacccaacctgacctcccacccagatggcagtgaagatctggagcctctggcaggaggaagcccagaagcaacaagccctgatgtgactgagaccaagaactctcctctgatggaggatttcttcgaagaaggattctcccaggagattatagagatgttatccaaggatggcttctggaactccaatttcggagaagcctgtatagaggacacctggttagatagtttgctaggcgatccagaaagtcttctgaggtctgatattgccaccaacggggaaagtcccacggaatgcaagagtcatgaattaaagagaggactcagtcctgtgtccaccgtttccacgggagaagattccatggtgcataatgtttctgaaaagaccctcacaccagctaagtctaaggaatataggggtgagtttttctcctactccgaccacagccagcaggattctgttcaggaaggggagaaaccatatcaatgtagtgaatgtgggaaaagcttcagtgggagttaccgtcttacccagcactggatcactcatactagggagaaacccactgtccatcaagagtgtgagcaaggttttgaccggaaggcttcccattctgggtatccgaaaactcacacgggctacaaattctatgtgtgtaatgaatatgggacaccttttagtcagagtacatacctgtggcatcagaaaactcacgctggagaaaaaccatgtaagagtcaagatagtgaccacccacccagtcatgacacacagtctggtgagcatcagaaaactcacacagatagtaagtcctacaactgtaacgaatgcggcaaggcttttacccggatcttccaccttactcggcaccagaagatccacactcggaaacgctatgagtgttccaagtgccaggcgaccttcaacttgagaaaacacctcatccaacatcagaaaactcacgctgcaaatgtatt

SEQ ID NO: 63349 - DNA, 652 bp, Homo sapiens
taaatctgcgcgaagaaacactcgcccaatcatgtttctttatcgatgtgccataagaaacactcgcccaatcacgtttcctcatcgagcttccgtaggaaatattcgtctaatcacgtttccccatggagctgccgtaagaaacactcacccaatcacgtttccccatcgaggtgctgtaagaaacactcgcccaatcacgtttccccatggagctgtcgtaagaaacactcacccaatcacgtttccccatcgagctgccgtaagaaacactcgcccaatcatgtttccccatcaaggtgccgtaagaaacactcgcccaatcacgtttccccattgaggtgccataagaaacactcgcccaatcacgtttccccatcgagctgccataagaaacactcacccaatcacgtttccccatcgagctgccgtaagaaacactcgcccaatcatgtttccccatcgaggtgccgtgagaaacactcgcccaatcatgtttccccatcgagctgccgtaagaaacactcgcccaatcacgttttccccatcgagctgccgtaggaaacattcgtccaataacgtttccccgccaccttctaccttcctccagctgccgtaagaaacactcacccaatcacgtttccccatcgag

SEQ ID NO: 63350 - DNA, 723 bp, Homo sapiens
gagaccaggggagctgtcaaggctgcggcggggaccagagaggagcctggcgggggtggctgggtggctgggggaatccccccaacttcccatcgcaggcgcagctctctcggccgcctatttcctccgaaacccgcgctgcggagcagcccagtgcatagagttcaacacttccccttgttgtggaaagtaaaggagcctcactaccacctttttttctttgcgttttcttactgctggtcctgggagccttttccttcggagcagcagccctgtccggcatctgtcttgagctcccagcaaggaaagtccatcagcttgataatggaggagaacaatgactccacggagaacccccaacaaggccaagggcggcagaatgccatcaagtgtgggtggctgaggaagcaaggaggctttgtcaagacttggcatactcgctggtttgtgctcaagggggatcagctctattatttcaaagatgaagatgaaaccaagcccttgggtactatttttctgcctggaaataaagtttctgagcatccctgcaatgaagagaacccagggaagttcctttttgaagtagttccaggaggcgatcgagatcggatgacagcaaatcatgaaagctacctcctcatggcaagcacccagaatgatatggaagactgggtgaagtcaatccgccgagtcatatggggacctttcggaggaggcattttc

SEQ ID NO: 63351 - DNA, 983 bp, Homo sapiens
aattcccgggtcgagtgctgccaagtgctccctgctgctgcgcccaccttcccggggagaggcgagcccctggctccctgagttcatgacccaccctgtccaccatcagcagctggcttgtgtctctgggtggctgggcaccagcctcctggaggccacgtgcctgggtccacatggagggtcctggtgggggcatcatcctgggtcccgggagtgaggctggcaggtgcccatcgggggtgtcaagtccagggggatcgaggctctggaagctcaagggggctctggccttggggaccagctgagtttccagctggcagccaggtcctcgagggaaggggtttggacagaatccgaggccccctaagctgatggggtcccctgtctccccttccagccctgacccactggacatggggactctttccagtccggagagctccttgtctgtgtccccagcagaaggtggggtggctcctgcctcaccctctgcccagccctgatccaggccacagccatctagggccctgaaggaggggcaggaggcaggggtggcttctggaacctgaggcttggccccggttgggtctgttcttgcgggctgcactgctggatcccaggagcaggtgtggaacagccccatggccagggtgacggaaatcctcggctgcatgcagacatagacccaccctggactgggctgtctccggagcctagacacatcgccctgggaaggggcagctgggcctgcagtgtgctgggcaggggctggcggccctggtcgtgggctctccagggtccctcaggggattgggcctctccccaggcaggaaggtgggaagtgcaggcatgacccggggttcctgaggctggtccaccaagttgcttctgagacgccttcgcttctgtcctggctggctgttaatgatatccctgttctaattccactctggctaaactgaaagtaaagatccttaagctta

SEQ ID NO: 63352 - DNA, 1396 bp, Homo sapiens
  misc_feature (1)...(1396): n = a,t,c or g
ttgaaaccagcaccttccctttctctgagtcctgcctccttctgcagaagggagctcaaaagaactttgttgttttgccttttactctggggtgaaagcggcaggaggtatgtgagatggtgaaatgatttgcttctgccatgctggggtcacgggtggatcgccctaaactctcggtggccccctcagtagttttggaagaggaccaagtccttgtctctccagcagtggacctggaagcaggatgccggctcagggacttcactgagaaaataatgaatgtcaaaggaaaagtaattctgtcaatgctggttgtctcaactgtgatcattgtgttttgggaatttatcaacagcacagaaggctctttcttgtggatatatcactcaaaaaacccagaagttgatgacagcagtgctcagaagggctggtggtttctgagctggtttaacaatgggatccacaattatcaacaaggggaagaagacatagacaaagaaaaaggaagagaggagaccaaaggaaggaaaatgacacaacagagcttcggctatgggactggtttaatccaaacttgaaggaatccgaataactaaactggactctggttttctgactcagtccttctagaagacctggactgagagatcatgcggttaaggagtgtgtaacaggcggaccacctgttgggactgcgagattctcaaggggaaggactgggtctcatttctcccatctcagcgcttagcaggatgacctggtatagagcagggaactgggaaatgtgggtcaggggatcagacactccagttgggtcttttatataaattaaatggcaaaaggctccatacccttctccttctttcctaccctccactttatctgcaaaatgggaatgatgataacacccacttcatagaatggtcatgaagatcaaatgagagaataaaagtcaagcacttagcctctggtgcacaataagtattaaataagtatacctattcctccttttcctttttttaaaataatattaccaaatgtccagcttatacacatttacaagacttagctagtgggctatgttagagctactaaaagatctttgacaagctaaaactaagatgcaatgaatgaggtgtaacgaacaagagagttttaagttcagaaatggttacagaagtataagacagctgtgtgggtgttttttggtttttggtttctggtttacaatctcgtcattcaacaaagatgggagttttatagaactaaaagcaccatgtaagctactaaaaacaacaacaaaaaaggctcatcatttctcagtctgaattgacaaaaatgccaatgcaaataaaaatgattactttttattttaaaaaaaaaaaagnaaaaaaaa

SEQ ID NO: 63353 - DNA, 788 bp, Homo sapiens
ctggacacttcgtggagggctccaaagccggcagatcccggggccgcctctgtctctcccaggccctgcgtgttgcggtgagaggagcatttgtgtctctgtggtttgctgctggagctggtgaccgggagagaaacaagggagacaagggtgcccagacaggtgcggggctcagccaggaggcagaagacgtggacgtgtcccgggccaggagggtcacagatgcaccacaaggcactctgtgtggcactgggaacaggaattctgggagtcagtctgcaagggtggtgggcgttgctcacctgggagaagcctttagagtgggcgttgagcaggccattagctcgtgccctgaggaggtgcatgggcggcatgggctctccatggaaattatgtgggcgcgaatggatgtggctctgcgctcacctgggcgaggacttctggccggtgccggggcactctgcatgaccctggcagaatcgagctgccctgactatgaaaggggaagaagagcatgcctgaccctccacctgcaccccacccctcactgctccacctggggcctgcctctgcgggtggctgggtcctggctgactgttgtgactgttgaggccctgggggggtggcgcatgggagttaggaggactggccaggtggggcccactatgcacccacccccagtgtcaggtgcttctcctctcctcctccaccacctcctcctcctcctcctcatcatcatcctcacttgttgaggacgtcctgtgtgccaagtggtttatatgcccagc

SEQ ID NO: 63354 - DNA, 447 bp, Homo sapiens
ataaaatccagcattccttcatgaagaaaaccctcaagaaactgggcatcaatggaacatactccaaaataatgaaagccacctatggcaaatacacaaccaacagcaaactgtgtgtgcaaaagctggaagcattaccattgacaactggaaaaagacaaggatgcctactgtcaccactctgtttcaacataatactggaggtcttagagcaatctggaaagagaaagaaacaaaagtcatctgaatagggaaagaagatgtcaaattatttctcttaacatatgatatgcttctatacgtaaaaaaccctaaggactctgccagaaggctcctggaaccaataaacgacgctagttaagtttcaagaaacaatatcaaagtacaaaaatcagtagcatttctgtacaccagtaatcttcatgctgagaaccaaatcaagaatag

SEQ ID NO: 63355 - DNA, 588 bp, Homo sapiens
tactgtgggggggtccctgtgctgaggggccctgtgctggggggatccctgtgctgggggggtccctgtgcttggggatccctgtgccggggggccctgtgctggggggctactctgtgctgtgggtctctgatctgggggctctgtgctatggggggtatctgcgctgggggctctgtactgggggactctgtgctgggggtgtctgtgcaggggggctgtgtgcaggggagctctgtgttgggggctgtgtgctgggggactctgtgctgggggcgtctgtgctgggctcctctgtgccgaggctggaggcaaggatttaccattcatacttggggagcctcagccaaggtgcctgcaaaggcctgggccagtgtgaagggtcacccttggcttgggtcttgggactgggtctaaaaagagaaaaagcggctcatccccctggacttgggtagagacatgatgccctgggagtctcccttccaccccaggagtcagaaccctggctgcactctgccccacgttctggcccccaggctgaggtgcacccaaaggcccgacgtgtgcctcttcggcccctggggctcc

SEQ ID NO: 63356 - DNA, 829 bp, Homo sapiens
  misc_feature (1)...(829): n = a,t,c or g
tagcatcatcttttataaaaaagaccacactgatgtgattgaacaccaaataggggtatatgcatctgaaagtcacttttggtatgttgaccttgtatcctgcaactttgctaaactcatttattatatgaacttttatgtatatttcttggcattttctacatacagtggtgtctgtatagtttactatttacatgtgaatatggatagtttaatttcttcctttccaatttgcttgccttttatgtcttcttgaaatactgcgttggctaagacttgcagtaagaagttaaaagggaatgtttggagcacacgtatttgccaagtctctgatcttagtgtggctggggggaagcatttagtatttcattaagtatgatgttagctataggttttttgtagatattctttatcagtttaagaaaatttcctatgattactagattgttcagaattgttttaagatcatgagttgatatttcaattttgttaaatactttttctgtatccattaagataatcatgtgtttttcttagtcagtcattgtagcccattgtattgcttgattttctttattaaggtatattcattcccatagaaaattcatggcnnnnnnnnnnnnnnnnnnnnnnnnnnnnnngggaggggtggtggggagaagaannnccacnntattccnnnnnnccnnnnnnnnnnnnntactttttaannncnnnncctnntctacccnncccccntttnnaanncccntcttnaccccncnnttttnnncatttncccnnnnnnnaaacancatgcnctnaatccccatcaactttgctaggctgg

SEQ ID NO: 63357 - DNA, 1099 bp, Homo sapiens
aggcacaaaaatagaagacgacacatagaagagagagactaagaaaagataatcaaaacataaataacagcgagtccaaaacaggcatatcgaaatttcacacactaagaatgcaaagttcataaagcacaagattacaagtaaaggctggacaagattgagaaaccccattataatgtagaaaaaaaaaaattcaaaattagccaggcatggtggtgggcacctgtaatcccagctactcgggagactgaggcgggagattctcttgaacctgggaggcagaggttgcggtgagccgagatcgtgccattgcactccagcctgggcaacaagagcaaaactccatctcaaaaagaaaaaagaaagaaagaaatgctaggggaaaatgttttaactagtcattcttcccagtagctaatgaagctgacttttaaaaagaaggctgtgagctttgcagatgctgctgccgcccagggccccctgcttccagccatggtcaaccccaccatgtttttccacattgctgtcgatggcgagcccttgggctgtgtctccttcgaggtaaggggcctggaaagcaagaagtgactgctcatctaatccataaaactatgttaacagattggagctgtttgcagacaaggttccaaagacagcagaaaatttccatgctctgagcactggagaaaaaggatttggttataagggttcctgctttcacagaattattccagggtttacgtgtcagagtggtgacttcacacgccatacagcattggtggcaagtccatctgcagggagaaatttgatgacaagaacttcatcctgaagcatacgggtcctggcatcttgtccatggcaaatgctggacccagcgtgaacgtttcccagttttttatctgccctgccaagatgccaagacagagtggttggattgcaagcatgtggtctttggcaaggtgaaagatggcatgaatattgtggaggtcatggagcacttggggtccaagaatggcaagatcagcaatcagcaagaagatcaccattgctgactggacaactgcaataaatttgacgggtgtttctcttaaaaaaaaaa

SEQ ID NO: 63358 - DNA, 1062 bp, Homo sapiens
tccaggtcaaaaaaccctccccaaccctcacacagccctggtttgctcgtgagcttgtctatgatatgtgactcccaacagctgcacaacactgcgtcctccctgagagctgcagcagcagtcaccgtccacacggtcagcagggaggataggtaaacacatacaagatcaaccgcaaagtagcattcgtgtttctagctgggacccacagctgtctctgctgctcttctagtcttcggaagtgcctgtctcacatgcactgccaacatctacacaccctgtcacaagagacccccagaccacagccttccagacgtctccatctacacaccctgtcacaagagacccccagaccacagccttccagaagcctccatctacacaccgtgtcacaagagagacccccaggccacagccttccagaagcctccatctacacaccgtgtcacaagagaccctcacactacagccttccagaagcctccatctacataccatgtcacaggagaccctcagaccgcagccttccagaagcctccatctacacaccatgtcacaagagaccctcagactacagccttccagaagcctccatctacataccatgtcacaggagactctcaggctgcagcctcccagaagcctcctgaggaaagcagggcttcatctgaagacaggtcactggcattaagcttacttgtttttttgagacggggtctctgtctgtcgcccaggctggagaatggtggtgtgatcacggctcactgtagcctcgacctcctcaggctcaggtgattctcctacctcagcctccccagtggcagggactacaggtgctcaccaccatactcggctgattttgtgttttttgtagagacggggtttcaccatgttgcccaggctggtctcgaactcctgagctcaagccatccacccacctcggcctccccaaatcctgggattacagatgcgaactaccgtgctgggcctaatcttactgttttaatgtaaaaatggacagtcttgaggaagacagattgggaagattcatatcttcatgag

SEQ ID NO: 63359 - DNA, 1475 bp, Homo sapiens
attcccgggtcgacgatttcgtggccgtccggcctccctgacatgcagatttccacccagaagacagagaaggagccagtggtcatggaatgggctggggtcaaagactgggtgcctgggagctgaggcagccaccgtttcagcctggccagccctctggaccccgaggttggaccctactgtgacacacctaccatgcggacactcttcaacctcctctggcttgccctggcctgcagccctgttcacactaccctgtcaaagtcagatgccaaaaaagccgcctcaaagacgctgctggagaagagtcagttttcagataagccggtgcaagaccggggtttggtggtgacggacctcaaagctgagagtgtggttcttgagcatcgcagctactgctcggcaaaggcccgggacagacactttgctggggatgtactgggctatgtcactccatggaacagccatggctacgatgtcaccaaggtctttgggagcaagttcacacagatctcacccgtctggctgcagctgaagagacgtggccgtgagatgtttgaggtcacgggcctccacgacgtggaccaagggtggatgcgagctgtcaggaagcatgccaagggcctgcacatagtgcctcggctcctgtttgaggactggacttacgatgatttccggaacgtcttagacagtgaggatgagatagaggagctgagcaagaccgtggtccaggtggcaaagaaccagcatttcgatggcttcgtggtggaggtctggaaccagctgctaagccagaagcgcgtgggcctcatccacatgctcacccacttggccgaggctctgcaccaggcccggctgctggccctcctggtcatcccgcctgccatcacccccgggaccgaccagctgggcatgttcacgcacaaggagtttgagcagctggcccccgtgctggatggtttcagcctcatgacctacgactactctacagcgcatcagcctggccctaatgcacccctgtcctgggttcgagcctgcgtccaggtcctggacccgaagtccaagtggcgaagcaaaatcctcctggggctcaacttctatggtatggactacgcgacctccaaggatgcccgtgagcctgttgtcggggccaggtacatccagacactgaaggaccacaggccccggatggtgtgggacagccaggtctcagagcacttcttcgagtacaagaagagccgcagtgggaggcacgtcgtcttctacccaaccctgaagtccctgcaggtgcggctggagctggcccgggagctgggcgttggggtctctatctgggagctgggccagggcctggactacttctacgacctgctctaggtgggcattgcggcctccgcggtggacgtgttcttttctaagccatggagtgagtgagcaggtgtgaaatacaggcctccactccgaaaaaaaaaaaa

SEQ ID NO: 63360 - DNA, 708 bp, Homo sapiens
cccacgcgtccgggagggcagtatctctgaaaaacctcatatacctgaaactgaggtcacagagtactgaggctgaaccagacagtagagaatgcttttccttgactccccaacccacatccccctcaccatcaggctaggaagcacatcaagcaacaagtaaccacagcctaccactagagaggaagcaagagcatagactctgaggtgaacatgcacagtgaaggcctaaagcttgggatggaacaataccattgaggaaagtactcgagcaaaactgagtaacctatgaattatagtggaactcaaaaggaaagttaaaacatattttgtattgaacgaagatgaaacatggcacacgtggaatacagctaaagcttagggggatatttacagcattacatgttatactagaaaagaaaaaagtgccccaatttagtactttaagctttcacattaagaaactaggaaaagaagagcaaactaaatctaaagcaagcagaaggaagaacactgtaaggataaaagtgggaaccagttaaattgaaagaaggaaataatagagaaaactaataaactaaaagctagtcctctgaaaagatcaagattggtaagtctctagccagactgaggaaaaagaaaacacaaagtatcaacatcaggaatagcacttaggatgtcaatggagatcctaaagacactaaagtg

SEQ ID NO: 63361 - DNA, 1749 bp, Homo sapiens
ttttttttttttgttttaacaaacatgtttattagaaaagtaaaaaatattgcataggtcttaatacttgaacatcaagtgtattcatgaacagtgagtatcttatcttcatgtaaacagttctagatggaagacccagatggcactcctcccggggaggggttccagcccccaccctctcagcccctcccctgccagctcaactctgcagtacacgatgggggaaggcttaaacgcagctgccaggtgtaatttttcaagtgtcaaagatcccaagtgatccctgacacccaccccttcctactcttacattcatgcgtctgtaagatagctgcctacaacaggtcagtagtgatgctccgatcagaaaaacaagatacaaaacaaacaacaaacacacttggtcccttcagaccagtaagatacacaaaccacctccacgacctccgacctcccccctccctccggctgctctgaggagcacgtgcctcttccttcaccctgggccgggctggggcgggagcagcccagctgctctctggatgtcacaccactgttaactgtcagtaacaaaaataataaggtacatgctacacacacatccagctggaagccttgttggcccctaagcctttgtttcatgctacagtactgaggggtatgtgtccccaatgcacagccacccgcacacaactcaatgagcttcctgggaaacactattcccccacctccaccttaggtggctgcctcagttttccaaccactggaatcagtccctcagctcctgcctctagtctccaccccaaaagttcagtcgtctctgtcttggagggcactgtcggccccctcaggttgaagttcaacactcctcaatgagcagctgttccgagctgtacagcttcttcttgatgactcggaagccagtgctcagcgtcagggactggctgaagccagggaggaagggagagttggcggagctaaacagcccctggatcttgggccagagtcgtgagtccaggcgcagcacgagggtcagctggaaggtgggcaccaggctggggtcgagtgccagctggcccacgctgtggcagctcttgccctgctccacgcagacgtccagcagcgccccccgcaggccgcacggctcgctgtaggccaggcgcagtagttctttgcccacctggcttaccaactggctaggcatcagcaggcgcgcagggcgtcgagagcccagccgcgcctgggccaggctctcctgcagcagctgcatcaggttggcacacaagtgttcatcctcagggtcactgagcagctcgaagtcgggcaacgacaccccatccaggtaagccgtgtcttcctccggcccgaagccactgttgctgctgtccagggactcgcagtccgagctctccaggctcgtggagcggtcaaacccctcctcccgggtcgccgacccccaggctgagcgcggcggccgatctggggtgggagttcggggcaaggacgagggcgaagaggaggtggacgacgacgagaagcggtcccaaaggctaggcatggtgaggacagacgccagggcgtttgctgatgaactcagagtgccggagcgtagaagccgcagctagcgcggtcagcgagaactgctaagacaagtgcgtcctgccgcttgaatgggtgtgcgaacccgtgccaaccaccgagagccgcccagacccgtcccaggtccacgctcgcacctcccccttggcc

SEQ ID NO: 63362 - DNA, 519 bp, Homo sapiens
tttaggggtggagccggcaggaaatttaaactgaagccgcggccgaaaacgccaagagattgatgctgtagctgccctgagataaccaggactgtggaatcgggaagagctcatggagctcgcgaatgtaatacggaggcctctgaggaaggagtacggaggccgagaaggagccggcatttgatgagcgaaccgggaaagggagacgattgcctcgagctggagagttccatggctgagagtaggctccgggccccggacctaggagtttccaggtgtctaggaaaatgccagaagaactcaccaggtgccaggaagcatcccttttccggaaagtccttttacttggatctgcctgctggcaagaatctccagtttttgacgggggccattcagcaactgggtggggtaattgagggttttctgagcaaagaagtaagttacatcgtgtccagccgcagagaagtaaaggcagagagcagtgggaaaagccatagaggctgccctagccctagcccc

SEQ ID NO: 63363 - DNA, 1685 bp, Homo sapiens
  misc_feature (1)...(1685): n = a,t,c or g
ggaggcaggaggaacattttctcttgttgctctgccacatgttgcctcagctcagccaattcagaaacccagaatgtccctacctgaaaacctgaaacttcctattcctagatatcaaccccctagaaatagcaaagcatcaagaaagaaacccatcctgatctttcctaagagtggctgtagcaaagctcctgcccaaacccaaatgtgtcctcagatgtccccttccccacctcaccaccctgaactcctgtacaaacccagtccatttgaggaagtaccatcactagagcaagccccagccagcattagcacagctgcgctgaccaatggaaatgaccatggggacttgagaccaccagtgaccaacacccatggcagtctgaaccctcctgctaccccagcatcatccacaccagaggagcctgccaagcaggacctcacagctctttcagggaaagcacactttgtaagcaagataacatctagtaaaccttctgctgttgccagtgaaaaatttaaagaacaagttgatcttgcaaaaaccatgaccaatttatcaccaaccattcttggcaatgcagttcagttgatctcttcagtccccaaagggaaactgccaatcccaccctactcaagaatgaagacaatggaggtttacaaaatcaaatcagatgctaacattgcaggtttttctttaccaggacctaaggccgactgtgataagataccctccaccacagaaggctttaatgcagccaccaaggtggcaagcaggctacctgttccacaagtgtcacagcagagtgcctgtgaaagtgccttttgtccacccaccaaacttgatcttaaccacaaaacaaaactgaacagtggagcagcaaagagaaaaggaagaaaacggaaggtaccagatgaaattttggcatttcagggaaaaaggaggaaatatatcattaataagtgtagagatggtaaagaaagagtaaaaaatgatccccaagaattcagagaccaaaagctggggaccctgaaaaaataccgtagcattatgcccaaacctatcatggtcatacccactttggcctccctggcttctccaactacactacagtcccagatgcttgggggcctaggacaggatgttttgttaaataattcactcactcctaaatatcttggctgtaagcaagacaacagctcttcccctaagcccagctccgtgttcagaaatggattctctggcattaagaagccttggcacagatgtcacgtctgcaaccaccacttccagttcaaacagcaccttcgagaccacatgaatacacacaccaacagacgcccttacagttgtcggatttgtcgcaagtcctatgtacgtcctggcagcctgagcacacacatgaaacttcatcatggtgagaaccgtctgaagaaactcatgtgttgtgagttttgtgcaaaagtgtttggccacatccgagtctattttggccatctgaaagaagtgcatagggttgtgatcagcactgagcctgcgcccagtgaactgcagccaggagacataccaaagaacagagacatgagtgtgcgaggcatggnagggatcattgggagaagggaaaacaagtccaacctggaagaagacttccttctaaaccaggcagacgaagtcccaaaaatta

SEQ ID NO: 63364 - DNA, 898 bp, Homo sapiens
ttttttttttttggaattaattactcttttattagcacaaaataacagcaacctagcagccgcacggcccgagaataagttaaggcacagagcaggcgacgggcggctttcccagggccaggcctgcatgccccgaacttcctgagcaaactccctaggggctggggtttcgagggtcctggagggcctcttcccttgagatgaggggaacggaacagggcaagaggggcgcccccatgggcgcaaggggtccacgctgcgccgcgatcacttctcgaagtagggcaggtagaagaactggaagccccggtggcccttgaccgcgcagtagatgaagatcacgtgatagactccaggcaccaacaacaggaagcccggcacgaagaagatggcgctggagacacctggagagggggtcgcctccagtcccacgccgaccaggatcagcaccagccccagcagcaggagcaggaaggaggccagcaccactcggcggttcttctggatcaaagggtgttgggtccagctgcagcaggtgttgtaggagcgctgggtgctgctgctgatggtgctgaaggaccactgggagctgcggatggaagttcggctggaatccctggtgccgactcccccatccggctccggagaggcctgggctccatcctcatcgttctccaggttctggtagcgcagccgggactgcttgtcctcgtcagccacctcgaaccgggcccgacgctcgaagtgcagcggcccaaagcgcgcgaccccgctggactcgggcccagggcccccgtcctccagggacagctcgaaggcatcatcaatgctgaactggggccgggcggcgctcatggccccggcccgctcaggcgccgtgcgccgccgccatctgcgc

SEQ ID NO: 63365 - DNA, 756 bp, Homo sapiens
ctgggagcactggtgagaggggtttttgggaggtgacctgggagcactggtgagaggggttttgggaggtgacttgggagcactggtgagaggagttttgggaggtgacttgggagcactggtgagaggggttttgggaggtgacttgggagcactggtgagagggtggccgaggggcattgcaattgcatgaacgatcccagcagacattggatcttaggaatctggatggcaaatggggcaacactaatgtggcctcagttacttgcttagaagtgaggagagacccgggagatcttgtagtgaaatcttttctggaatcaactcctgaggtataaccagagtagttgtggtgtaacattcaaggtcgtggcagaacagacgaaagaatggtatagggagggcccctcagcccgtagcagttatcaaggaaaccatggttttcctcgctcttttccttcatttcttccttcctttgctgatatttttaagtgccttctgtaagccaagggctatgccaggcatggggattcagcaatgtaccaaacactctggtccccatcttcttggagctcatagtctgaacagggacacaaaagggaggtgataaattggaatgcaatgaccttaaaccttgctttactaatttttgtgtctgtctgctgtttaaagttaacatttgaatgaaacacttttttactaaagtattagaaataggagtgcaggtaaaggctaatcagaggtaaggagtggagt

SEQ ID NO: 63366 - DNA, 3457 bp, Homo sapiens
ttttttttttttttttttcatcttccaaagtttttaattcattggtttctagtatattcacaaagttgtgcaaccatcattccacaatttcatcatcttccaaagaaagcccgtccctgttagctgtcatgcctcttctctcttcctccagtacctggcaaccaccaatgtgctttgtctctgatacacagatttgcctattctggacatttcacataaactcgtgattggcttctttcacttagcgtaatatttgtaggattcactcaggctgtggcatgcgtcagaatttccttcctttttatgggggccaaataatatttccattgtatgggacaggaacacacttcatggtcttaaatttcatctgtggggatgggacatttggggttggttgcctacccgtttggactttttgaggtaatgctgcctatggaacgcggggaccccagggtattgtgtggatggatgttttcaattctcttgggcatagacctgggaaggttatacttttattgatattaatagttctgatattggacatccctgctgtgtggtttcacctctcatggactctgacggctgctgtgccttctctgctcggcaggcggtgccctgaggcacaggtgggcgtctggggctggaactctcgctaggcgctacaacttcctctcctgccctgtggcagagccaagccccttgcagggctgttgccagcatgggatgagtctatgaaaacacgtggcacgcagtaggtccacagttaccactggcagcctggcaagcctggcagggcccggacggcagatgcgcttcggtgctgctgtgagtcttgtgttctgccttaggcagaaagtcctgggtttgtgttttgtgaatgaatgacgcatgagtgtgccaaatatcctttacgtgacagaagaggagagggctggcttgattgagtgtgggggggaagaacctggatcttgtaatgtaatttttgtttaaaaaaattagggaaaaaccccaaatatgaccatttcctgccattagcctgcagatgagcagctgactccccagtcccatccctccgcactgcttttccctgtcctgggtctgttctgttacatggagttcctgggggaagccctggggacggggcatctgcccagggctcactgctgttgaaagtgaataaagaacgtccggatttcctttgggtggacggtgatgatggggcctcctggtggcctcgagggagaggtggtgtcacctctgtggcggccaggccccgtcctccagctccagcggtgcagcatgctcaaatcccaggtccctgtgagcgagcgctcctccactgccaccacggaccccagcgcctgcagcacagcctgcagggagaggagcagagggagagtgagctgcaccaagttccagagctgagcagagaaccaagacagcagcagggcagacacaccacgaactcggtgtcctcaggagcccaggtcctcccctggtgcctgacacagctccctcatctgcttctcacagcacatctgcgaggacaggactggccgtgtactttacagatgaggacactgaagcgggaggtgcatgctttaccaggtggccgagctggaggagcagcccgggaggtgtggcattttgagctgcccaccccaccgcggagttctcctctccccacattgctcaggtggccccgtgcccagtccagggaggaagccagccacagttaccccatccccctttcccaataggccttgtcccagcctcccttacacctaggggaggcaggaggcccttaggggtctggaaaagtctgtggagcaggaggggtgggggtggctcttggagaagcttctgtgtgctgacggagggagagagccacgctagggcaaggcctttctggccactactgccgagccccaccctgccttgaaatttgctcatgagggaggcctgtgccatcttgtgaccgcaaacaagcagacggcaaaagacaaaagccagtctgccggcgatggcgggaagacgacagtgatcgggcccacggtgacagcgcttggggtccatcggacatgcctgttcggtgagaaaacactctgtcctctgttctaagcacatctgttaggtgttttgtgacttgcagccaaactcactgcgttcctaactcaatggtctttccaccccaccaccgtccacgttgggcagggagtcatggtgtccatcccaaccgtctccttgtctcagggccttggtgcttccatctgtgaaacgggggagcatcagatgaccaacttccaggtcccacgccggcctccttgcttcccagggcaggctggccctgtgctgggcactggtacccgccatggcctagacctgctctcaggcaggccagggaccgtgaggaaaggatcctccctggcgaggatcatgaaagaggaggtgggtggcccagtaagacatcatggcgaaaaggtactggggcttctctggattcccctgaagactcagatgtcgaaggaggcccaaggcagaaacacagagattcacagaaattctccatgagcaggaaatgaaatagaaagaatgcaaactgggaaagaaatgaggcggctcaggtcatgccttctggggagggagcgtgggcaggccaggtggcggaagcctcgcctgatagtagagctgagagggcaacatcagccaagaggggaacctggaaggggacgaggcctgggggccctgacactgcacgaggccccttagtgccagggcctctcagcaaccttctgggcaaagaactctcacctctccccattttacatggggggaaactgaggcccagaggcatggggtgccggagatgcccccgtagaggggcctgggtgtggaccctggattgtcctgaactcctaagtcaacctttccaaaagcaaactctatggggaatcctgttttgtttttggattaacacagatgttgtctgtgttttaaaagttttacccacagaataaataagaaagaaaatacaggcccactcacgccctgtaatcccagcacttcaggaggctaagacaggcagattgcttgaggccagacgttcgagaccagcctgagcaacacagcaagaccgtgtctctactaaaaataaaaaaactaggccaggcttggtggctcacgcctgtaatcccagcactttgcgaggccgaggcaggtggatcacctgaagtcaggggttcgtgaccagcctgaccaacatggagaaaccctgtctctactaaaagtacaaaaaaattagccgggcgtggtggcacatgcctgtaatcccagctactcgggaggctgaggcaggagaatcacttgaacctgggagatggaggttgcagccagctgagagcgcaccattgcactccagcctgggggacgagagcgaaactcggtctcaaaaaaaaaa

SEQ ID NO: 63367 - DNA, 478 bp, Homo sapiens
gcggggctgaccgtgcgcttcgcctgcggggtcgtgctggggcggcgggtacgctatttgaagaacaggtttccatgctcttagaggagcatcagaaaatgaacaaaccccagaagtccagaaattaagagacctgataaagggaagccaggaaaatcgagatgcatatttgtggtacacttcagttctcagtaacaacacactgactaagaagagggaatacgtttttgggaaaaaccttaatctgggtgcaaacccagtttcttcaagaaaaatagcctgttagtatgactcatgtggaatgagtttgaatacgtttcagaatcaagtattagtgataaaaattatgccagtaataacactgatgaaattaatataagtgagaagttgccttttgatagtaatcaggaaaacactcatactgggaagaaatctgttgtatatgaccaaagtgggaagtcaccaagtcatagtgagg

SEQ ID NO: 63368 - DNA, 758 bp, Homo sapiens
tcgacccacgcgtccggacgcgggccccacatccctgggtcagagtccggccgtcggggctgctggaacctcggcagcgccccggggccggtcgcgcttgggccccgccgcgggaccggtgtggttgcgctgggtggccgctaacagcggttccccgcgaggctttaggggctggacggagggcgcccccttccccccagctggcaaaacggagaggagaagacaacacgcacaacaaagaaacttaagcccaccgaggcgggagctgcggtccgaggaccgtcggcggatttggggacaaaggagccgtggggctggggtgggttcgacgtcccctttcctcagccccctccaaccgttgcgtggtcggcggcccagccccggggtgggaagctgcgccgctgccccggagccagctcagaacggacgtgccgtctccccgcgcctcctgcccctgcccattaatcatcggatttgtcaccggcacaattaacagccctgcccagagcgtggtttagggttgcttgtttttcttcccttcggggttaacagtccggtggcgcttctcatctccaaagccatcaactccattgtgtgcatctggggtggggtggagaaagtaaacagtttctcgcctggccataggtgccagtggcttcccgactggccgaggctgcgcgcctgattcctgttttggcggctcaacccggtggttcctggagattggtttgtccggtactactggtgtatttctaaaa

SEQ ID NO: 63369 - DNA, 1598 bp, Homo sapiens
ctgtgccccgcccccgcgtctgcacctctgtggttcctgccctcagccctggttcctccctctctggcctgtgccgcctcagcagccctggcagaactgaagagcggcaccgggcccagcaggcaaagagagaggcctccctggcttcgagtgtcaggggagccgcgttccctcccagggctggagcagaggaccacaaggcagcagaaagcgcgggtccagatgagggccaggaaggggaggagagtgagggccaagaacgagccttaagggagcagtcccaagctggagccacccagggctgggtctgggagtcctcagtgtccacttgtcccaggttagggggcttgccttgctctctccagggccagtctgtgtgtgtggggactcagcccgtggccggcagatgccatccaggatgtacaaggtgcagccaaggcaggccatgcaggggccgggcctgtctgcagctggtggatgcctgtgggcatggctttctctggggaccccattcctgtcagtagcaaccctggcagtgtccggagcggctctagacaactttggtcataggaactctggaggtgggttctggtcatctgaggtggctactcaacaggtttgaggccccacagcaacagaagtccaggacccactaggttgcctcagaagccctaagactgatgagctggagcgcgcatttgagagaagcctcgcacccactgtgtactggccccgctcaggccggcctggcacaccgttgcctgctggcggctctcatggggaagcgcctgggcactggggattgcttgtggcccactcaactcttggggcagtggcccgtaaccctagtttgcctgaggcccttatgtccccttatgttcctggtactggagcttgagctcttgcctggaacgctgcagctgcacccaccctgcttgatcccacctgggaggccaggacactgaggagctctgaacccagcccacagggaagcagaggaaggtgagcccccgccgccccccagcccttcccatcccttccctgctccctggtggtctaaggacccaagctccctagacttcctcttccaccgtctgtacgtttcaaattacactggtgtaggcctgtactgctggtggggctgggcccctaaacgccagaaagtgaatcttaagaagctctgccctaaactgagaaccacatgctgagggaagggctgaaaggtgaaggctcagcctccctcacatgggtcctgggttacattaggtaccgggctgattgataggcatttggccatggttccttttcgtctacctttgggggccttctcaggcccagaacaaggctgttgttactatgtggaaaagctgaccagtgctgcacactaggggcacacacctttccatgagcagctcctgccctgtggcgacagccagcgtgcacccagacgctggtgccatggcgaagcaggcgttcaagaccatggagaagacaactcctcatctagaaaatgaggacacctcagtgacaaacacacctttttataccaatcagtatcctctgttcattaaaactggctatccgctacaaaaaaaaaa

SEQ ID NO: 63370 - DNA, 1940 bp, Homo sapiens
cttacgccaagcttggcacgaggcggaagaacccgcagcagctcccaggatgaactggttgcagtggctgctgctgctgcgggggcgctgagaggacacgagctctatgcctttccggctgctcatcccgctcggcctcctgtgcgcgctgctgcctcagcaccatggtgcgccaggtcccgacggctccgcgccagatcccgcccactacagggagcgagtcaaggccatgttctaccacgcctacgacagctacctggagaatgcctttcccttcgatgagctgcgacctctcacctgtgacgggcacgacacctggggcagtttttctctgactctaattgatgcactggacaccttgctgatctcttttttatttccagattttggggaatgtctcagaattccaaagagtggttgaagtgctccaggacagcgtggactttgatattgatgtgaacgcctctgtgtttgaaacaaacattcgagtggtaggaggactcctgtctgctcatctgctctccaagaaggctggggtggaagtagaggctggatggccctgttccgggcctctcctgagaatggctgaggaggcggcccgaaaactcctcccagcctttcagacccccactggcatgccatatggaacagtgaacttacttcatggcgtgaacccaggagagacccctgtcacctgtacggcagggattgggaccttcattgttgaatttgccaccctgagcagcctcactggtgacccggtgttcgaagatgtggccagagtggctttgatgcgcctctgggagagccggtcagatatcgggctggtcggcaaccacattgatgtgctcactggcaagtgggtggcccaggacgcaggcatcggggctggcgtggactcctactttgagtacttggtgaaaggtgccatcctgcttcaggataagaagctcatggccatgttcctagagtataacaaagccatccggaactacacccgcttcgatgactggtacctgtgggttcagatgtacaaggggactgtgtccatgccagtcttccagtccttggaggcctactggcctggtcttcaaagcctcattggagacattgacaatgccatgaggaccttcctcaactactacactgtatggaagcagtttggggggctcccggaattctacaacattcctcagggatacacagtggagaagcgagagggctacccacttcggccagaacttattgaaagcgcaatgtacctctaccgtgccacgggggatcccaccctcctagaactcggaagagatgctgtggaatccattgaaaaaatcagcaaggtggagtgcggatttgcaacaatcaaagatctgcgagaccacaagctggacaaccgcatggagtcgttcttcctggccgagactgtgaaatacctctacctcctgtttgacccaaccaacttcatccacaacaatgggtccaccttcgacgcggtgatcaccccctatggggagtgcatcctgggggctggggggtacatcttcaacacagaagctcaccccatcgaccctgccgccctgcactgctgccagaggctgaaggaagagcagtgggaggtggaggacttgatgagggaattctactctctcaaacggagcaggtcgaaatttcagaaaaacactgttagttcggggccatgggaacctccagcaaggccaggaacactcttctcaccagaaaaccatgaccaggcaagggagaggaagcctgccaaacagaaggtcccacttctcagctgccccagtcagcccttcacctccaagttggcattactgggacaggttttcctagactcctcataaccactggataatttttttatttttatttttttgaggctaaactataataaattgcttttggctatcataaaaaaaaaa

SEQ ID NO: 63371 - DNA, 2011 bp, Homo sapiens
  misc_feature (1)...(2011): n = a,t,c or g
agttcctggtctctacaacatttccttttcttgggatacatggaggtgttgagggaaagctgagagaatgaaggctctaaatccccagtggaagcatgatatggcgaagcagagctggtgctgaattgttctctctgatggctctatgggagtggatagcactgagtcttcattgctgggttttagcggttgctgctgtttcggatcagcatgccacaagccccttcgactggctcctctctgataagggacccttccatcgctcacaggaatacacagattttgtggacagaagccggcagggatttagcacaagatacaagatatacagggagtttggccgctggaaagtaaataaccttgcagttgagagaagaaatttccttggctctcctctgcctcttgcccctgaattcttccgcaacattaagacttttgggacgtcgacctacccttcagcaaatcacagaaaaccttatcaagaaatatgggacacatttcttgctatctgctactctgggaggagaggagtcactcacaatttttgtggacaagcggaagttgagcaaacgagctgaaggaagtgattccaccaccaatagctcttcggtcactctggagacgctacatcagctagccgcttcttatttcattgacagggacagcacccttcggagacttcaccacattcaaattgcatccactgccataaaggtaacagaaacacggactggtcctcttggctgcagtaactatgacaacctagattctgtcagttctgttctgggtcagagtcctgagaataagattcagttgcaagggcttcaagtacttctcccagactatcttcaggaacgttttgtacaagcagctttgagctacattgcttgcaattcagagggagagtttatctgcaaggaaaatgactgctggtgtcactgtggtcccaaatttccagaatgcaactgcccctccatggacattcaagccatggaagagaatcttcttcgaataactgaaacctggaaagcttacaacagtgactttgaggaatcagatgaattcaagttatttatgaaaaggctacctatggaatttattttcctcaacacatcttactattaatggcatttgtgggacaatgggttctaattttcaggcgccgtttatggaaccaactggggaacagcatgaaacaacttttcctaaaggcgcagaaaattgtacacaagctttttaggccttagcaagaggtgtcataaacaacccctcatcagcctgccaagacaaagaacctcaacctactggcttactcgcatccagtcttttctctactgcaatgagaacggcctcctaggcagcttttcagaagagacgcactcgtgcacgtgtccgaatgaccaggtggtctgcaccgcgttcctgccctgcacagtgggagacgcctctgcctgcctgacatgcgcaccagacaaccgcacccgctgcggcacctgcaacaccggctacatgctcagccaggggctctgcaagcctgaagtcgccgagtccaccgatcactatattggctttgaaactgacctgcaagatctcgagatgaaatatctgctgcagaaaacggacagacgaatagaagtccatgccatttttatcagcaatgacatgcgcctcaatagctggtttgatccctcctggcgtaagcggatgctcctcaccttgaagagcaataagtacaagtcaagtctggtccatatgattttgggtctctctttacagatttgcttaactaaaaacagcaccttggagccagtgttggctgtttatgtcaatcccttcggaggcagccactctgagagctggtttatgcctgtgaatgaaaacagctttccagactgggagcggactaagttggacctacccctgcagtgttataactggacattaactctggggaacaaatggaagacattntttgagacagtacacatctacctgagaagtcgcatcaagc

SEQ ID NO: 63372 - DNA, 2273 bp, Homo sapiens
ttcatggtcgacccacgcgtccgctgggggatccagtgacgtgcccatccacttagaccaggtgagactggctgatggtgtctggggctgcatgtgacttagttgggggacctgctcttggcctccagactgggcctgatggcgtgggcgcctgcctgtgtgcaggcccaagggctcagctgcctctgtctgttcccagacccctcctcctgtagagagtggtgctgccctctcgggatgtacctgcaggtggagacccgcaccagctcccgcctccatctgaagagggctccaggcatccggtcctggtccctgctggttggaatcttgtcgattggcctggctgctgcctactacagcggagatagcctgggctggaagctcttctacgtcacaggctgcctgtttgtggctgtgcagaacttggaggactgggaggaagccatcttcgacaagagcacagggaaggttgttttgaagacgttcagcctctacaagaagctgctgactcttttcagagctggccacgaccaggtggtggtcctgctccatgatgtccgtgatgtgagcgtggaggaggagaaggtccggtacttcgggaaaggctacatggtggtgctccggcttgcgacgggcttctcccaccccctcacgcagagtgcagtcatgggccaccgcagtgatgtggaagccatcgccaagctcatcaccagcttcctggagctgcactgccttgagagccccacagagctgtctcagagcagcgacagtgaggccggtgaccctgcaagccagagctgacagccccactgtgcctgagcccgtgcaccgcccacaggacccatggcacattcccggtgtgcctgagcccgtgcaccgcccacaggacccgtggcacattcccggtgtgcctgagcccgtgcaccgcccacaggacccgtggcacattcccggtgtgcctgagcccgtgcaccgcccacaggacccgtggcacattcccggtgtgcctgagcccgtgcaccgcccacaggacccgtggcacattcccggtgtgcctgagcccgtgcaccgcccacaggacccgtggcacattcccggtgtgcctgagcccgtgcaccgcccacaggacccgtggccttggcttcagttggtgcctccagccgagttggcctattgcctgctcatgctgctgcttgcacactgcatgaaacagcaggccagaccaggacatccagactttctccatcgtgaggcctgggcctgcctttctgcagccggaggtctcgccagccctggactcctgctttgggccacagcaagacctcgggcgagtggagaggcggggccaggccgggcccttgtgggtgctgatgctgcatgttgtccccgacacagcgtcctctccctggtggacatccccagcggtcaggtgcttccccaagggcagtgaggggtgaacatccagggcctacctggctgtgcacgctgcagccacactgtggaagctgcccctccccgaggacccgcctcccttgctgatgccaggatctcggcgcatagaccactctgccccagcggtcgtcacagaaaggtctctctgttcctcacactcagcttcagcataagctgtgaggccagaaaaaaggtcagctcttctagtatcgtgcagtgcttaaaaaccgggagctccagccgggcgcagtggttcatgccagtaatcccagcactttcggaggccgaggtgggaggattgcttgaggccaggagttcaagaccagcctgggcaacacagcaagatcctgtctttgtaaaaaaactaaccaaacaggaaaaactgggagattttctgcagaaattgagttccagcctctctcgaacctgggaagacctggcaggagggggctgggctctcggctacagacttctccccaccccgtaggagctgaacgccaaccatcctgacccgccagtgctcttggtctcctgagtgtacccaggtcctcccaggtgcggtgtgcaccgagcgcgcctggcctgatgccctggcctgtgagctggggactcctgggccctgtgagcccctaggcggcaggcccaggaatggctgggtaggacagggaacacctttgccccacgtctggctgtgacctcggtgaaagccgacaggagagagatgggaccctcctcctcagtagtggctgccagtccctcgttgcaggacagggtcatcataaccataaataacccttcacgtgtcacctgcaaaaaaaaaa

SEQ ID NO: 63373 - DNA, 984 bp, Homo sapiens
  misc_feature (1)...(984): n = a,t,c or g
aagggacatgaaagtatcctttgagataatctttccattcatcagtgtttatctagcatctgctcaagagtgtgctgcagtggagggaaatcagatgacctcccagtctggttgtgttacatacaatcatgtgtaagaagtgccattcaagccgtgtcactggaggggactgacagtgagtgagtgtggataaagaggacctcctggggtgggcaatgtgagccctcagactctgtaggtattgcattttgcagtgaacactggtagacatgttttgtggctcaagccagcatgtgtgtgatggtttaggattcagtgacttttgatgatctggctgtggacttcaccccaaaagaatggactttactggacccaactcagagaaacctctacagagatgtgatgctggagaactacaagaatttggccacagtaggatatcagctcttcaaacccagtctgatctcttggctggaacaagaagagtctaggacagtgcagagaggtgatttccaagcttcagaatggaaagtgcaacttaaaaccaaagagttagcccttcagcaggatgttttgggggagccaacctccagtgggattcaaatgataggaagccacaacggaggggaggtcagtgatgttaagcaatgtggagatgtctccagtgaacactcatgccttaagacacatgtgagaactcaaaatagtgagaacacatttgagtgttatctgtatggagtagacttccttactctgcacaagaaaacctctactggagagcaacgttctgtatttagtcacgtgtggaaaaagccttcaagcctgaacccagatgttgtttgccagaagaaccgttgcacaaggaagaagaaagctttttgattgcagttgactctggggaaatccttccattaatccattcacaccttccagggacatttaagaactccacnatgggagaaagtctcccatggaaatgggaag

SEQ ID NO: 63374 - DNA, 488 bp, Homo sapiens
aacaccagagtttttaagagatgttagaagccctgggagcactgaacaaaccagaaagctcccgacccttgatccctgagctccacctagcaagtaccgcggcagctaacctgggagaataccccaaccaacagagactgaaattcgcctcccgagagagtaagtggataattctaacctgtccctaaacatggcctcacaaaggaaaactaaccgttgcgaacggaaacaactgaccggacagaacacagccacaaaacacgagcccgcaccctgaattacaaaaacacttacggctcatctactattcgcaccacaaaagcgccaggggaaagcacgaacgcagccccccactatcacaaattatgcagtcgagtttcccacatttggggaaatcgcagaggtcagcacatctggaacgcaatggataagccgcgaccatgagaaaaacgccttcatgatcatggtatctcccgtcgacgcggccg

SEQ ID NO: 63375 - DNA, 819 bp, Homo sapiens
ttttttttttctgttcaagaagattttattcctggtgccctctggggtcccttgactcagccaacgcccttccctgactcctttggtgctggctttggtacttgtgagggcctgggcaccagaacggttccatgggtcctcacgtgccccactctgtgaccctcctccatgctagtgcctgacccagtatgtaccacggaggacctcctccttccccactgcctggtccttgccaggaaggaagccaagtccccgagtcccaagagtaaagtgcggtgcctatttgccgggctggcatcagccatcaggcaattgagactgggggacactaagtccatggtcctctcagaagcgggtgtccaggaaggaggtggagcctcgttggggcctggggggcccctcgatgggggggccccgggcccgagtcaggagcccatggaaagtcttgccgcgggtctggggtttccgccgcggtggtctgggctcctccgggggctgcaccacaatccgaggcacctcaggcttggcgcctcgtcgcactcctgccagctgctgggcctcaaagatggcttgggccccggcgaggcggacctgtggccggggcgggggtcccggcgcggaatcgggcagctgggccagctgggccttgatctcccgctgcaggtcccgctctgacagcaccacgctgtgcacctgtgacatgaaggcctcctcctgcagctgcgcgggggggatggctcgaagggctcccagtgtctccaggaggccagggcaggcccctcgctgctctgcagtgcccagcgccaggcgcaccagtgt

SEQ ID NO: 63376 - DNA, 906 bp, Homo sapiens
gtggcactcggccggaactcccgggtcgacgatttcgtggaagcctcgcctggggggcggcagtggcctgggcggctctccggctgctgttgtatggctgcacgttggcgctaccggacgggatgctgtatccccgagagagcccgtcgtggcagcgcaagcagctggacggcctctgaagcttccgcgccgacttctccgacaaccgacgccggggcttcgaggagcagaggtaccggcgaccgctgtcggaggcgcggactcggggcagggccaggagtcgcccggaagcccggcggtgggaatgggtcaggccccaccgtggacatgccggttccctccagcttcaacgacatcggccagggctggcggctgcggcattttgtcagctggttgtggtatgaacgggaggtgaccctgctggagcgatggatccaggacctgtgcacaagagtggtgctgaggattggcagtgcccacttctatgccatcgtggtatcccaagggttactttgtccagaacacagactttgacttcttcagctacgcaggactgctgtggtctctgcttctatacacgacaccccccacctacatcgatgacgtcaccgtcaccaccggcgtgaagcgagacagtggtgagggcttctggactggatggaggacctgaagacgtgaggtggaggcacaggtagaagagaagattctcaccatcgctgattcacacaaaagcatttctccaagtggttgcagatgacatgatttcccaaagtgttagagctgaagtgtgtttccttgtgtatatatactgtggttcctttatcccttcatctgtggatagacagacagagtcttgctcttgttgcccaggctggagtgcagtggcgcgatttcggctcaatgcac

SEQ ID NO: 63377 - DNA, 771 bp, Homo sapiens
gagcgcggacggcggcgggagcgcgcgagaagctctaggacccagcagcggttgtcgggtttggggctggaggtgaagccctgtgtgaatggggttgattgtccggcgccacttccccgcgctgcccggcagccgtcttccccagccgagggactgaactagccatgatcgcctcatgtggagggcaaagttgcgccggggaacttgtgagcctgcggtgaaagggtccccttctgcttgttatagccccagtagtcctgtccaggttctagaagactccacctacttttccccagactttcagctctattctgggaggcatgaaacatctgctttgacggtggaggcaaccagtagcatcagggaaaaagttgttgaagatcctctttgtaacttccactccccaaacttcctgaggatctcagaggtggaaatgagaggttccgaggatgcggcagctggaacagtattgcagcggctgatccaggaacaactgcggtatggcaccccaaccgagaacatgaacttgctggccattcagcaccaggccacagggagtgcaggaccagcccatcctacaaacaacttttcttccacggaaaacctcactcaagaagacccacaaatggtctaccagtcagcacgccaagaaccgcagggtcaagaacaccaggtggacaatacggtgatggagaaacaggtccggtccacgcagcctcagcagaacaacgaggaactgcccacttacgaggaggccaaagcacagtcgca

SEQ ID NO: 63378 - DNA, 1258 bp, Homo sapiens
  misc_feature (1)...(1258): n = a,t,c or g
attttgcgggaagaggaggcgctgtacctgcagtgctgcttttcttgcctagactctaggaactatccgagctccactccccacaacatactcaaaggaacggagagaaccgggaccccccctgcggggacccggaactgatctgacaggatggcatctgatgactttgacatagtgattgaggccatgctggaagctccctataaaaaagaagaggatgagcaacaaaggaaagaagttaaaaaggattatcctagcaataccaccagcagcaccagcaacagtggcaatgagaccagtggaagcagcaccatcggggagacaagcaatcgtagtcgagatcgggatcggtatagacggagaaatagtcggagccgaagtccaggtcggcagtgtcgtcaccgtagccgtagctgggatcgtcgacatggtagtgagtcgcgaagtcgggaccatcgtcgtgaggatcgtgtgcattacaggagtcctccacttgccactggggagccagttgataatctgagtcctgaggagcgtgatgcccgcacagttttctgtatgcagttagctgcccgaattcggcctcgagatctggaggactttttctctgctgtaggcaaggttcgcgatgtacgtatcatctcagatcggaactcacgtcgttctaagggcattgcctacgtggaattctgtgaaatccagtctgtgccactggccattgggctgactgggcagcggttgctgggagtgcctatcattgtacaggcttcacaggcagagaaaaaccgactggcagccatggccaacaacctgcaaaagggcaatggtggaccaatgcgcctctatgtgggttccctgcacttcaatatcactgaagacatgctccggggcatctttgagccctttggtaaagtgagtagaagtgagagaaacctctgaagggaattggaagaagtggggagggtgagtgtttgagtgtacttctctgttgtgcctggccgtgattaacttgctgcatacgtcatagtgggcatatgagtctatgctgtgaaagtttggctccatctctgttcatgtgcttggtggacaaataagttagacacaaatcaaataataggccaggttaagaaagattaaaaaatacaaaaattagccaatgtggtggtgcacgcctatagtcccaactagtcgagaggctgaggtgggagggtcacttgancctgggaggtcaaggctgtagtgagcctcggaaaaaaaa

SEQ ID NO: 63379 - DNA, 596 bp, Homo sapiens
tttcgtggaaaagagctggctggaagacacatactctctgaagatcaagggggaggccgtccgcgtactacatagcagtcacgtgaggctgggacaattcctgtttacagagaactataaaagccctgccccctcctcacttggggctgatgccattctaggcctcagtctgtctgcatccaggtgcttattaaaacagcgtgttgctccacaccgcctcgtgttgtctgttggcgcgctctccgggttccaaccaatgcaagagccttggggctggccctgaaacctgcgaggggcttccgtccacgtccccagtggacctaccacccctccatctgggaaagcaggccacagcagccggacaaaggaagctcctcagcctctagtcgcctctctgtgcatgcacatcggtcactgatctcgcctactggcacagacgtgtttatcggccaaactgaccctcacaaaaagctaccaccgaagtggacaggcccctacactgtgatactcagcacaccaactgcagtgagagtccgaggactccccaactggatccatcgcaccagggtcaagctcacccccaaggcagcttcttc

SEQ ID NO: 63380 - DNA, 417 bp, Homo sapiens
tttcgtaaataaacaaataaaccccacatccattcctggtaagggaaaacattcttacgcatccagggataaaagaagatttattttatgacagaatactataagaaaccagtagtaaatatcatatatgatgtatcatttattgataagaaaccaatagcaaacataatacataacggcataaccttaccagtgtcctcattaaagtaaaaaaaacgagacaaagatgtccactgtcatctccactattcaaccttgttctggagttttcagccaatacagtagaagaccaggaaaaagaaaaaagaagtacacatattggaaaagaagagttaaagttggcattaataacagatgatctgattgtctacctataaaattcaagataattcatgataactaatactagagttcaga

SEQ ID NO: 63381 - DNA, 635 bp, Homo sapiens
gctgaagagacctggagccgacagacgggtctgggtctgccgcccaggatggagtacaatggtgtgatcttggctctttgcaacctctgcctcctgggctcaagccttcctcccacctgaacctcccaagtagcgggactgcagggtgaaggccatgccgcctcctgggaaagttccccgaaaggagaatctgtggctacagtgtgagtgggggtcctgctcctttgtgtgctcaaccatggaaaagttctttgagcatgtcactcagcacctgcagcagcacctgcatggctctggggaggaggaggaagaggaagaggaggatgacccacttgaggaagaattctcctgcttgtggcaggaatgtggcttttgttctctggacagttctgctgacctcatccgccatgtctacttccactgctaccacaccaagctgaaacagtgggggctgcaggccttgcaaagccaggctgaccttggcccctgcatcctggacttccagagccggaacgtcatccctgatatccctgaccacttcctgttgtctgtgggagcactgttagaattccttcgacaatcctgagtggttttatcggcatgtggaagcacacagtctgtttctgtgaatacga

SEQ ID NO: 63382 - DNA, 461 bp, Homo sapiens
cgggtcgacgatttcgtggagcagtctgggaagaaggtgagaggtcagatggttcagcagaataggattattcacaagactcagcgacgctcgtggttgggactgaagggacaggtgtgagggaaagaaggaggatttgggacgagtcgcattgggaacagagactatggagggaacgaagtgtgaaaaatgcctggacgtaagacacctcagaccatttgcccatttttcaacaaaaattatctatgtcttgtaggacggagaaatgaaaagtgccattttctggccatttagaaccattgttagtttgtattggggccaagaggagttgcagaagaaaataagatgcttagattttaggtcaggtgagagttgaagaggttttaagttcttgagaacataggctaagggagaagaaggaggaatggagggtggaagtttgcccatagtgaaagaggcaa

SEQ ID NO: 63383 - DNA, 1039 bp, Homo sapiens
cggatcgaccacttcgtgcgcgggagccgcctgtggggtgtccccggcgcgttatggtgctctggttcaggcaggttcccgttgcggcggtgttccctcggttgagaggaatgcccctgccgagggtatgctccggctggagggggtgtccctaacggcgggaatacctggactggctggggtgtcccactggggagggtttcccggtggggaggtgtctggcgggggagcggctccggctaagcatgggtgttctgctaggaggatgtgtctggctgggggcggtgtcccaatcgggagggttgccctgatgggggaggttctacagttgtggagatgccaacctggggggcgctccggttggggggtgtgccctctctggttaccccgctctcgctgccactcataggcccgctgcccaggtatgcacaagtcaaggccttttctgcagaccaagtagtcttccctggagagcgcccccagcaccacggaaactacctacatgccccgcggtggtcagccccgccttatcccagccccgagacccaaaacaagaagcatggactgaatttgaggtttctggatggtcgtgtgaaccgaggggacgggtactggactgacaagaaatgagccttgaaggtcaatctgggtgacacccgagtctcctggtgagtcggactccggagaattatctcaagtccagcatagacagcgcacatagacagaaaaggaaacggacaatcccaagtgccaagggaaccttcccaggtttctttagggcagctaaactgctctgtcaaagcctaagtccatttatgacaggccgagcaccctgagccctcgcaggagacacgagcgccttcatggccctcctgccccgcacccacctctccgccacccctgctgtctgtcccttccctgaaacctttatttcgagtgtctttgtggcttccctctttaccatccttgagttgaaatatcacctcttaagggaagccttccctctcctccctagttaaaatgatactgcccccccaaa

SEQ ID NO: 63384 - DNA, 825 bp, Homo sapiens
  misc_feature (1)...(825): n = a,t,c or g
ggtgctgcctgggctgggctccagctcacaccctccctaaaaggaaatgggagaaaggaccggccaaacaagagggttaaggttagagaagggggacacaaatgtcttcaggcttaggtccctgggggctcccagtcctgcccctgttcctctactcacatcccagctcctcccagtttcttttcggacctcctcctctccccttccttctntattccaggctgggttgggctctaagcaaggggagggattagagcctccttcctctctgcccctccccatgggtctctagggggctggtgcaggcagcagcagaggcactctgggcagctgggtgagggcccatctgggcaaggcccccagcgcctgccttctctcccggggccctgtgggcaagcctcctgcttcactttcaggtttctcgaagtgccttcttgctcctgtctgtttccccatcctgccagatttctgtttctcttgctgggcttttggcagtagggggctgtgttggtgggccctacgaagatgctcagtgctcgagatcgccgggaccggcaccctgaggagggggtagttgcagagctccagggcttcgcggtggacaaggccttcctcacctcccacaagggcatcctgctggaaaccgagctggtaacagctgcctcccaacctggtgcctccatctccctgacccccggctcctggccagccttatgccagcccccagctcacccttcagtagcctccttccccaagccctctggacacctctcctgcccgcagctgccccttcttcgtctcctactctgccttcttgctgcctca

SEQ ID NO: 63385 - DNA, 1131 bp, Homo sapiens
atacatgggcggcaaatgggcttgggcggctcctcggcgggtggcggtggtggccgtagcggttcctcctggccctgttaatgtcggggccaggccgggggaggatggcgccctagaacccggccttgctggggtaggggcgggaggggacggggtggggaccggccatgtcggaggtgacccggagtctgctgcagcgctggggcgccagttttaggagaggcgccgacttcgactcttggggccagctggtggaggcgatagacgagtatcagatattagcaagacatctacaaaaggaggcccaagctcaacacaataattctgaattcacagaagaacaaaagaaaaccataggcaaaattgcaacatgcttggaattgcgaagtgcagctttacagtccacacagtctcaagaagaatttaaactggaggacctgaagaagctagaaccaatcctaaagaatattcttacatataataaagaattcccatttgatgttcagcctgtcccattaagaagaattttggcacctggtgaagaagagaatttggaatttgaagaagatgaagaagagggtggtgctggagcagggtctcctgattcttttcctgctagagttcccggtactttattaccaaggttgccatcggaaccaggaatgacattactcactatcagaattgagaaaattggtttgaaagatgctgggcagtgcatcaatccctatattacagttagtgtaaaggatctgaatggcatagacttaactcctgtgcaagatactcctgtggcttcaagaaaagaagatacatatgttcattttaatgtggacattgagctccagaagcatgttgaaaaattaaccaaaggtgcagctatcttctttgaattcaaacactacaagcctaaaaaaaggtttaccagcaccaagtgttttgctttcatggagatggatgaaattaaacttgggccaattgtaatagaactatacaagaaacccactgactttaaaagaaagcaattgcaattattgaccaagaaaccactttatcttcatctacatcaaactttgcacaaggaatgatcctgacatgatgaacctggaacttctgtgaattttaccactc

SEQ ID NO: 63386 - DNA, 716 bp, Homo sapiens
tttcgtcgagtcctccccgcgcgccgcttcccgggtgggcccttccaccagaaccccctagtagatcctcccctggtgccctgggggtagaggggagatcctccacaagggccatttccctggtgatccctccctgtgccccacaggtgagtcctgccgtagctctccaggggttcctcctgatgctggggtcctccggcattcctccctgagccccccaagggccctgaagctcagcggcccagccctggcctcggggtccccaccccacacctcccttccaggcctaacctttgcccccgacaccaggcagggcgtgtccttggccttcgccgcccagcccgcgtggcatctctggacaggtggtcgtgcgcgccttggtgtgggcaggctccgtagccggcaaagcctccctgaaccgtgacctggtgagaaggccgcagaggaggtgcctgtgcccagaggccacctccaaagaccccacctgaggctggaacccagcgcctgctgaccccgccagccccaacagggctggagtccaggagcggccgtgctctttccgcagtgaggcagctgccttctcttcccaccacctgtcaggatgccttcccgtgtgtgcttgtgcacaggtctaaggagaggagagtccagtgagtgacccagacgccccagccaggaagagcatgaggaaagcaaagctgcggcctgagatctct

SEQ ID NO: 63387 - DNA, 876 bp, Homo sapiens
attcccgggtcgacgatttcgtcatgagtgtactgctgaggtcaggtttggggccgttgtgtgccgtggcgcgcgcaggtaagcgtcagtcccctcgaagcccggttgccgtggaagccgcgtggggcgccttcctcagctcttcagttgagggtaccgggggatcaagggctcgggggctcacttccaccttgaaggtaccctgggctggaaacgggtccggtacaaacgcaatagggctgcgtagtcgtgggcaagtgggtgctgtctctgcgccccgtgggcgtgctaagcacagtagcccgcggtctgcggtggggcgaggttaagggttcacgaagctgttttgaaaacgctcaggcggcttgcgctcgtgaatggtcagatttatcatggggtctgtttaatttgtgtttttcgcagccattccttttatttggagagggaaatacttcagctccgggaatgagcctgcagaaaacccggtgacgccgatgctgcggcatcttatgtacaaaataaagtctactggtcccatcactgtggccgagtacatgaaggaggtgttgactaatccagccaagggttattatgtgtaccgtgacatgctaggcgaaaaaggagatttcattacttcacctgaaataagtcaaatctttggggagctactaggtatatggttcattagtgaatggatggccactggaaaaagcacagctttccagctggtggaactgggcccaggtaggggaaccctcgtgggagatattttgagggtgttcacttgacttggatctgagctgattaaacgggacatttctggacatttgtctgaagtagttcatatcaatagtggagagtcatacatttactctg

SEQ ID NO: 63388 - DNA, 1091 bp, Homo sapiens
tttcgtgggagagtaggcggagcagggcggtgcggtgtggcgtagagctggagggcgatggtggcggagctgctgggggcggaggcaacgtagccccctcggaaaaggagcccggcggcgcctgagcccagccgaggatggagaaccggcctgggtccttccagtacgtccctgtgcagctgcaagggggggcaccctggggcttcacccttaaggggggtctggaacactgtgagccgctcacagtgtctaagattgaagatggaggcaaggcagctttgtcccagaagatgaggactggtgatgagctggtgaatatcaatggcactccattatatggctcccgccaagaggccctcattctcatcaaaggctccttccggattctcaagctgattgtcaggaggaggaacgcccctgtcagtaggccgcactcatggcatgtggccaagctgctggagggatgccctgaagcagccaccaccatgcatttcccttctgaagccttcagcttgtcctggcattctggctgcaacacaagtgacgtgtgtgtgcagtggtgtccactctcccggcattgcagcaccgagaaaagcagctccattggcagcatggagagcctggagcaaccatgccaagccacctatgagagccatctgttgcctattgaccagaacatgtaccctaaccagcgtgactcagcctacagctccttctcggacagctcaaatgcttctgactgtgccctttccctcaggccagaggagccagcctctacagactgcatcatgcaaggcccagggccaactaaggcccccagtggccggcctaatgtggctgagacctcacgaggtagtcggtgcaccaatgggggccacctgacccccagctctcagatgtcatcccgtccacaggagggataccagtcaaggccccgcccaagcagtcaggggcccaccacaaccttccatgatgcggttacagccttcaagcctccagaacccaacttctcaatggagagcagcgcacggcaatctgaacctgtggtccccttgcccagaaggagaaactgagcttaaagcctgggcttc

SEQ ID NO: 63389 - DNA, 1191 bp, Homo sapiens
tttcgtgtgactccgtgggcctggcgtggaggcgggggcgctaggctgcagctggctcggaatcggggctggtttcctgtctggaagggaaggggcctgcagaagggagcggggacagcagcagacaggcacacccctgccttcctctctccctctcctcccttctctggaaaagcgaggacacggagttgcagaggaagctagaccatgagatccggatgagggaaggggcctgtaagctgctggcagcctgctcccagcgagagcaggctctggaggccaccaagagcctgctagtgtgcaacagccgcatcctcagctacatgggcgagctgcagcggcgcaaggaggcgcaggtgctggggaagacaagccggcggccttctgacagtggcccgcccgctgagcgctccccctgccgcggccgggtctgcatctctgacctccggattccactcatgtggaaggacacagaatatttcaagaacaaaggtgacttgcaccgctgggctgtgttcctgctgctgcagctgggggaacacatcccaggacacagagatgatcctagtggacaaggaccctcacagacatctccttttcagagcaaatgtgctcttcgctgaggcgggggccagacttttgaacttgcggtttagagctgtatggggcctgtgtggaagaagagggggccctgactggcggccccaagaggcttgccaccaaacttcagcagctccctgggccgctcctcagggaggcgtgtccgggcatcgctggacagtgctgggggttcagggagcagtcccatcttgctccccaccccagttgttgggtaaggccttgcacaccgacaccaccctcagctgcctgtattctgcccacaggtgacctttgaactgtgttgagtgtgcagaacccattttgcattgctgccaggatgtgcagacagatatgaatgagcagtggccacgtagctgggaggcattccagcccacgccccagagctgggctgaagccagtccagaagaccagtgggaaggcagggagacttaggccctggggtcttacctttttagcagcagcaaatacattttatttttagagacagggtctcactatgttgcccaggagttcgagacctgcctgggcaatatagcgagaccccgttctccagaaaaaggaaaaaaaaaa

SEQ ID NO: 63390 - DNA, 762 bp, Homo sapiens
tttcgtggcgggagccaacatagagccctcagtgggatgagggtgaaactgctattgccggcggctcctgttttaccgcgtcagcatgctggtgcatttatttcgggtcgggattcggggtggcccattcccaggcaggctgctaccgcccctccgcttccagacattctcagctgtcaggtaaaaacggaaaaacctactcagcgcgggccattgaccgcccggcagggcagtgccggcccgccgggagatggagtccacgagcttgcgcgaggcttgctgggagctgtaggccaggcctaccggggtggaatgtcactccgcgggtgttggcctcaattatttatagtgacactccagtcgccagcaggaggctcctgcgtctgcagccgcgtgtcagccagaaggaggggacgctcggggtcagtgaccacgcccagtccgcactcccgaccgggggtcccctttcctggccctggaggtgattgcgcgatttggacgaaaattcttattagtatgaagagacatttaatgtagtggtgcttccaggattcaaagtgagtcgaagaagaactagagatgttcagcagggataaagagccaatctaataggccgggcgcggtggctcgctcctgtaatcccagcactttggaaggccaggagttcgagaccagcctggccaacatggcaaaacctcgtctctactaaaaaatacaaaaatttgccgtgattggtggcacgcgcctgtaattacaactact

SEQ ID NO: 63391 - DNA, 704 bp, Homo sapiens
tcccgggtcgacgatttcgtcggtgcgacccggagctccagcgcccgagtctccacttcgtttgctgaaacttgctttctaccagctaagaaccatgctgcgagtgattgtggaatctgccagcaatatccctaaaacgaaatttggcaagccggatcctattgtttctgtcatttttaaggatgagaaaaagaaaacaaagaaagttgataatgaattgaaccctgtctggaatgagattttggagtttgacttgaggggtataccactggacttttcatcttcccttgggattattgtgaaagattttgagacaattggacaaaataaattaattggcacggcgactgtagccctgaaggacctgactggtgaccagagcagatccctgccgtacaagctgatctccctgctaaatgaaaaagggcaagatactggggccaccattgacttggtgatcggctatgatccgccttctgctccacatccaaatgacctgagcgggcccagcgtgccaggcatgggaggtaagctgacccttctgaaggcccagccacccccagggggaggctgctaaagacacacaggagagtgtctggagaaaccctgccattgatcacaagcctgtagctccctgcccacccagacaggggccccgcgaggcaggtggggctgcctgaattgagacattgcaattgtttatg

SEQ ID NO: 63392 - DNA, 759 bp, Homo sapiens
tcccgggtcgacgatttcgtgggggtctccgcggaggaggtggaggaggcggcggcggcggcggaagagggcggagggtagtgggatgggggtcccgcggcagcggtgaaactccgggtgggcgtccatggtgctgctgcgctgacagggctgtgagcagccggccttccgctctcaccagttccgcgtcggaatagacggtccttccccggggagtcagttcctccccgggcccctgagccatgcccatcgcagccgccccgaaggagccaggtgtaaattaattatttgaaagcaactgaacaatggagccagacatcattcgaatgtactcttcatccccaccaccattagacaatggagcagaggatgatgatgatgatgaatttggggaatttggtgggttttcagaagttagcccttctggtgtagggtttgttgatttcgatacaccagattatactcgtcccaaggaagagtttgtaccttcaaaccattttatgccagttcatgaattctcagaaaatgtagatagccttgcaagctttaagtccattaaaaagggtaatgattagggcgtcggggatgagctttaggctcgtgagaaaggacagtgtgatgttttactttctgccgccagcaaagaaataacctaatctgctctgttagctgcttccgttgatgaaatggaaagaaaaggagatgtaaataaagtagtggagcagaggctgaatcgaagatcgtctacccggaatttca

SEQ ID NO: 63393 - DNA, 2601 bp, Homo sapiens
gcgtcgacgatttcgtctggaaagggcagagcaagtccactgtgggcactgtgtttagtcttgagtcagaggaggaggaataccctggaatcactgcagaagatagcaatgacatttacatcctgcccagcgacaactctggacaagtcagtcccccagagtctccaactgtgaccacttcctggcagtctgagagcttacctgtgtcactgtcagctagccagagttggcacacagaaagcctgccagtgtcactaggccctgagtcctggcagcagattgcaatggatcctgaagaagtgaaaagcttagacagcaatggagctggagagaagagtgagaacaactcctctaattctgacattgtgcacgtggagaaagaagaggtgcccgagggcatggaagaggctgctgtggcttctgtggtcttgccagcgcgggagctgcaagaggcacttcctgaagccccagctcccttgcttccacatatcactgccacctccctgctggggacaagggaacctgacacagaagtgatcacagttgagaaatccagccctgctacatctctgtttgtagaacttgatgaagaagaggtgaaagcagcaacaactgaacctactgaagtggaggaggtggtccccgcactggaacccacagaaacgctgctgagtgagaaggagataaacgcaagggaagagagccttgtggaagagctgtcccctgccagcgagaagaagcccgtgccgccgtctgagggcaagtctagactgtcccccgccggtgagatgaagcccatgccgctgtctgagggcaagtctatactgctgtttggaggggctgctgctgttgccatcctggcagtggccatcggggtagccctggctctgagaaagaaataggaggcttttcagaagagaaagacagaaggatgtaaggttggagttgtattggctggaatttgaacctccagcagctgtctggacatttgtggaacactctgggataattggggacttctgctcaacatggcagtggcatgttaggcatgttagggcttgaggtggggcattcacattcatctgactgtaaatcccaagggcctccgctcatgctaaattgagaatcttaggggtaaagcaccccctccaggaccgggtttctcagccttggcactagtgctgttctgaccattctctgtgttggggctgtcctgtgtgtggtgggctccacccactagatgccagtggcaccccctcccagagatgacaaacgaaaatgtctctagacattgccaaatgtcccgtgtgaacatcccctattgagacccactgctttagcgagagagggtttacttaggaagaattgggatagaaattcccagctgagagaacttagctgtgggctcctcagctactgacttcttagctcttaatccccttagaatttcatctttctcgatgagcaggctctgcacccactctttttttgccccccgccctcatcctggagtgtgagggtgctcgcccgtactctcagctgcctctcagggactgcactgttcctcttcacccccaggttcctgctaagatcccacgggcgagggcttgctctggactcagtctgtcaagtccccgaagcttcctgcagctccaccttgtaaaaatgctgcctttgggaatcttcgaaatatgtacacagagaaaatcacatgaaggagacctggggtccccacttgtgagtgcaactgcaagtaactctggctagagagacacatgtgtcttgtgtcaaggcaggaggataacccggatgaccttctgaggtctcttcagcccttttcgctagtggtcacccaccaccatggttacttgccagcaacatctctattgctggatggtccctgtctataaccttgggctagtatattttttccaatatgggaccttagtcttactactgatgagttctatgggtctcttgctagggggtaaggatttttattcttgggcttatagagccagttagatcataattcttatgaaatagagagtgtcctaaatatcactgaaataaaaagtaggaaaaagaagcttgaattttaagactgaggctgctctgcagattctagtttggctttcagagttcaagagtggtggcatcttcacctgaattcttcaatgccagggtaataaaccaaaatagtcctaatcagtatatgctagttgagcatcggcataattttctttcctctggctgatcccagccctaaaggaagggtagacccgtgtctttccagccctaaaggaagggtagacccgtgtctttccagccctaaaggaagggcagacccgtgtctttccatgcccgagggccacgacgtcactatgcagggcacacgtggcttggtttaaaaaggtcatcttagatttatcttagtaaatgtaataaattattttttagatcttgaaatttataataaaaatactttacctaccctgatcaccaaaacctgatgttttaaatgtgctttctttttgaaatttatgttttccaaataaaatctccctaaagcaatattttaaaaattggtcaaaaaaaaaa

SEQ ID NO: 63394 - DNA, 743 bp, Homo sapiens
tttcgtggcaggagtctcggcctcccggggagcgacgtgccgggaaaggcatgagggccccagcggtgggggcgggggttgcgcgccggggagggcggcctcaggctgggagcctggcagatcgtctgactctccccgagccccatcccaggccgagccaggacccctctgatgcacaggcgtctcaggagcccgtttctttcttgaatccggggcccagtgcggcttgaacctagcccccgacctcctcctcgccctctcagagtccgctggggtgggcgctgaaggagcccgggtcggagaggagccctccccttctctcctgcgtggaagccctgcagcctccgtttcttttgggactggggtccggggccttctgcctgacccggggtgagaaagggagccctgatcaggacccggtgagagggcgctggagcccgggagcggcaggagccttgagcggcagcccgggaagaggatggggtcaccttctgccccaggtcccccactgccaggatctctgtcaccttctgggggtcctgtcccctggggtcccaccctccgggctgcctttttgcctgcactctccctggatgctggaggctggaggcagtgacgcaacaacagcgcgaggcgactttggagcggcctcatatagcgacctcgccttccgctgcgcgtcctcccagagcccaagaagcccggaacctgtggcatccatctctgagaggagaagacggcag

SEQ ID NO: 63395 - DNA, 700 bp, Homo sapiens
tgtaccgcccccgaattcccgggtcgacgatttcgtgactcacgttgccggcgaagtgggagagagaaaagtggtaacctggggctgggggccggcgcggcggagctcggagtagtagagcggagtgaagacacgggggaggatagagactggcattcctttgggccgggggattggcgggagtcgtgctgggtgctctcgccgtgttgaggtcccagtgaggggaaggagaagcggaagagggtctctagtcggggcctagggcaaagggactacaaaaaggatgcagatgactatagaaatgaggacgacgaggagatgctgtggaggagcagtagaggtgagaagatgatgcaaagaaactgtgtcagtgaggaactgtatagagggtcatagaggtgaggtggcggagagaaactaactaacggaccatagaggtgggggagccattgtagaaggacgtggacgcgaaagggtcgcgtagatgggcatatgcgtgaagcaacaacgtagaggggctgaagaggagaaattcatggatagaaagaatgcacctatagtgagctctgcagagtgctgcgtgggatatccctagagtttggtctagtgaaggcacgctaaccaggcacctaaggcatttcaagtagtgacttcccacatttggctaggaatgtgggtcctcctgcgaagtgggtacccc

SEQ ID NO: 63396 - DNA, 901 bp, Homo sapiens
tttcgtcggaggccgcggctcgtcccccagcggatgagctgccgcggacggggcgcgggcggacgatggaactccacatcctggagcaccggctgcaagttgccagcgtcgccaaggagagtatcccgctgttcacctacgggcctgatcaaacttgccttcctgttctccaagaccaggtgcaagttcttcagtctgactgagacaccagaggattacactatcattgtcgatgaggaaggattcctagagctgccctcctcagagcacctgagtgtggcggatgccacctggctggccctgaacgtggtgtccggcggtggcagcttctccagctcccagcctattggcatgaccaagatcgccaagtcagtcatcgccccactggctgaccagaacatatccgtgttcatgctgtccacgtatcagacagacttcatcctggtgctcaagcgggacctgccctttgtcacccacacgttgtcatcagagttcaccatcctgtggtcagtggctagactgtagcagccgagaacctcggcatcaccagtggcttcgtgaagcccaagctggtccagatgccggtcatccacccactgtccagcccgagcaacaggttctgtgtcaccagcctggaccccgacacgctgcctgctgttgccacactcctcatggatgtcatgtcctacttcaatgggtgaggatacaactagaagccagcagtctacaggctggaagaaggccctcaccagaacccaacccttggacttcagcctccagaactgtgagaaatacatacctgctgtttgtcagacaccagtctatggaattctgttacagtagcctgaactcagacatagcccttttccatttataaggtggttttaccttatattttatg

SEQ ID NO: 63397 - DNA, 746 bp, Homo sapiens
tttcgtgtgggagtacgaggctgacgcggcggccctgtccccgtaactgtgacacgggtgcacgcgagcgtcattgggggcgatgggggccgtgctgggtgcgcgtttgcgccagtgacgcagccgctgcatctccgccagtccgcgcaggccagcatccttcagaaaaagcatccccgaggaggaagacgaatcgttaaacatctgaaagggtcaggccagcatccttcagaaaaagcatccccgaggaggaagacgaatcgttaaacatcttaggtcagctctagcctctcggaatttgtcttcttcagtggaaaccccgagaagactgatcagttcttcagttctaaaacaatggcccagggtttggtgacgttcgccgacgtagccatagacttttctcaggaggagtgggcctgtctgaactctgctcagagggacctgtactgggacgtgatgctggagaactacagtaacttggtctcactgggtgagttgcacgcctcagataacttagactgcctcctggaatatccgctctcccctgtgaatttcaggaccgcctttcaagaaactagttgaatttcttcttcctgtccccaaggaatgtattgagccttattgatgtgggccgtgagcaccacaaccttcccctcccatccatcggttaccttcccacctttgtcgactcccccgtaatcatctcacttccttaatgtccgtggaatgagtgggaattctgggaa

SEQ ID NO: 63398 - DNA, 878 bp, Homo sapiens
ctgtgcagtgtgctggaattccccggctcgagcgatcaccacctgcacagtaattcagtgcagcccatgcagctttccagcgttatccatcaccacctgcgcagtaattcagtgcaggcctgcgcagcttcccagcggggtccatcaccacctgcacagtaattcagtgcagcccgcgcagcttcccagtggggaccatcaccacgtgcgcaataattcagcgtagcacgtgcagcttcccagcgggatccatcaccacatgggcagtaattcagtgcggcccatgcagcttctcagcggggtccatcaccacctgggcagtaattcagtgcggcccatgcagcttctcagcggggtccatcaccacctgcacagtaattcagtgcagcccatgcagcttcccagcgggatccatcaccacctgcgcagtaattcagtgcaggcccgcgcagcttcccagcggggtccatcaccacatgggcagtaattcagtgcggcccatgcagcttcccagcggggtccatcaccacctgcgcagtaattcagtgcagcccgtgcagcttcccagcggggtccatcaccacatgggcagtaattcagtgcggcccatgcagcttctcagcggggtccatcaccacctgcacagtaattcagtgcagcccatgcagcttcccagcggggtccatcaccacatgtgcagtaattcagtgcaggccatgcagcttctcagcggggtccatcaccacatgtgcagtaattcagtgcaggccatgcagcttctcagcggggtccatcaccacatgtgcatagctctgggtcactttaaagatcgcattacctgagtgctcagtgttgctgtaaggaaatgtcctgctgaa

SEQ ID NO: 63399 - DNA, 926 bp, Homo sapiens
ggtacgtatgttaggatgctctagaccgggcgccccggaacggttatggtgtctcgatacccatttccttctttcagtatgaagagagggagaatggaaagcggggaggaagcacggtcacgggaagttgttatttaaagatggcagatattaccaatgggcgtttgtggacggagagatcacgggagaaggccgccggcactgggcctggtcaggagacaccttctctggacagtttgttctgggagagcctcaaggctacggcgtcatggagtacaaagccggcggatgttatgaaggggaggtctcccacggcatgcgggaaggacacgggtttctggtggaccgggatggacaagtgtaccagggctccttccatgacaacaagaggcacggccctgggcagatgctctttcagaacggtgacaagtacgacggcgactgggtccgggaccggcgtcagggacacggggtgctgcgctgcgccgacggctccacctacaagggacagtggcacagcgacgtcttcagtggactgggcagcatggcccactgctcaggggtcacctattatgggttgtggatcaatggccacccagcagaacaagctacgaggatcgtgatcttgggtccggaggtgatggaagtggcccaagggtctcccttctcggtgaacgttcagctgctgcaggaccacggggaaattgccaagagtaagcatctccagggggagatgacctaacgtttccaaaagagaaacaggcagcaggttcttaagcagtgaagatgcggacgagatgttgcatgtggctcctgaggcacagcagtgacttcgtgcccagagcctggcagagaggtcgcaggtgtgccagcttccctgccagtcagggcagccttgggtgtgtgtgcaagcatgtgtgcacatc

SEQ ID NO: 63400 - DNA, 2454 bp, Homo sapiens
ggcacgagggcactctcagcagtaggcgcaaccgtgctcaccccgtgcctaacagccttgcttagtccgggctccgaggcagcagcagccataagaaaaaacaggagaggaaggcgatgtggcgcttctgccgggccctcagactggggagtgtgaggaaacctgtaggaagtgtcagggactctggaaagaacataatggcctcacctgtgaagagctggctgaaaaagacgacatcaagtaccgtacctctattgaagaaaaaatgactgctgcccgcattagaaaatgccacaagtgtgggactggcctcatcaaatctgaaggctgcaaccgcatgtcttgccgctgtggtgcccagatgtgctacctctgtcgagtttctattaatggatatgaccatttctgccaacatccccgctcaccaggagccccttgccaggagtgttcaagatgctctctctggaccgatcccactgaagatgatgagaagcttattgaggaaatccagaaggaggctgaagaggaacagaaaagaaagaatggagagaacaccttcaaacgcattggacccccgctggagaagcctgtggagaaggtgcagagggtggaggccctcccgaggcccgttccgcagaacctgccacagccacagatgccaccctatgccttcgcgcacccacccttccccctgcctcccgtgcggcctgtgttcaacaacttcccactcaacatggggcctatcccagccccgtacgtgccccctctgcccaacgtgcgggtcaactatgacttcggtcccatccacatgcccctggagcacaacctgcccatgcactttggcccccagccgcggcatcgcttctgatggccccgaatccccattgagcagcacaaagcccgtttggggtaggagtgtggatggagaaccctcccccaaggctggtgtctgtaccattgcatcctaagtcagcttgaagggtaggctggttttcttcccacccctttcctagaagggctactgctcctggaagagtggacggatccataataaagacgtcccaaatggtggagttcggagagagctgcgatgtgaactgcccctcccctcgcatcccccaggccaccaacggcagtccttctgccttgtccatggcataggccatagaccaggtccctgctgctcacacctgggcctctcctcggagccgacccctgggtagcaaggcagccgagagcatctccctggaggggcccacggttgggccaagggcagagggggctgcacctgcgggcctgggaagcattgctcagggtggggggctgggaccatggcccgcagaggcactgccacagctgtgagggccaagatgctgtccccccatccaaaacccgtgcgccactgcagtgagtgttgagggcacctctcctcccctcttacacctactcagatgaggcagcagcagacccatctcgcggcgggggttttgttctgttgccgcctaactttctcatcctcggtctctggaaagtcaggctgagaaatcctttcccaggccaggccgctgcggtacactggatggttctgaagctggcccattgaaagagcctcttaaggcagctgggacagaggcctggtggccctgctgggcagcccaactgctgggggagacgtttctgccaccctgggtgatgagcagcttttcccccctggctttctgggggaggagtgggcctccttagggagacaggtgaccctgggtgccacccctgccccgtgtgtgccccgggtgttctcagtggttgctgaaggcaggtagagggtgctgtccagtatcccccatgtgaaggtcacttcccttctcatggagtcagctgagcatcagctcagccctgccatgtccccactcaccctcctcgcctcctgtccggccctgggtttctagccgtgcctgaggcatcactctggcccattgacagatgagaggtctgaagccttcctggccacaggcatcactttctcctcctcctcatgccctgccttgtccttgtcgtgttgccatggggttctgagaggctgggagttcacagacctcagacacagctgagtccgacaaccattggggttggggctgcatcagtctccggagtggcccgccacctcctgaagcagggcctggcccacccaaggtgcctgggggcaggcggggcaccgtcattcggttgccattggtttctcagatgtatttcaaggactaaagtgggctctaagatctaagatggcccggcgcggtggctcccgccttgtaatcccaagcactttgggaggccgaaggcgggcggaatgagtttgaggtcgggaattttgagtcccccgtctctaactaaaaaatacaaaatttagccggacaaaggtgggcgcatgcctaataaatcccaggtacttcaaggagg

SEQ ID NO: 63401 - DNA, 1182 bp, Homo sapiens
ttttttttttttgtattcagaacctgtaggtttaatttcagaccctcgggatgcatctaaggccaatctgtgagccattacaacctccaaaaggcatttaggactaatctgatgatctttgcactgccaataattaaagatggcaaccaatgggctaaatggtaacaacactcatatccttacattcatagtatttctccccagtgtgaattctttcatgcatacttaggcatgaggaaagagcaaatgctttcccaaattctttacatacaaaaggtttctctctggtaggagttcacaggtggggtgaggaatacagaaattctttcccacatatcttgcatttacctttctccactgtgagttttcaaatgtttactacgatgggaagaagtaatgaaggtcttcccacattcaacacattcataaggcttctctcctgtgtgaattcttctatgttgagtaagcgttgaagatctattgaaggctttcccacattccttacactgatagggtttctctctcagtgtgatttcgtatgtgtatagcaaggcccgtgtactgagtgaaggcttggccacattccttacattcatagggttttattccagtgtgagttcttacatgttgagtaaggtgagttgacctagtgaaggctttcccacattccgtatatttgtgtggttttattccagtgtgaatttgaatgtgaacattaaaggatgaggaatttctaaaggatcttccacattctttacattcaaaggacttctctcctttatgaattttcacatgtgcagaaagttgagaaaaattagtgaaggatttcccatgtttcttagtctttttagatttctttccagtatgaactgttacacactgctttaggtgtgaggaatgagtgatggctctcctacattcctgaaattcacagaatttctctccaatgtggattcccatgtgattatcaaggcttgcaaaatacttaaagccttttctacattccttacatttgtatggttgtcttgcattgagaattccaagatgtgcagcaagatctggagttaaggtgaagacttttccacatggattaaatttggaaagttcctgtccaatagaggcttccttgtgcacactgaggatgtcttttccataacaattaccctcaaagatgttccctcc

SEQ ID NO: 63402 - DNA, 913 bp, Homo sapiens
cgaactcccgggtcgacgatttcgtgtcccggatggcctcggggactgccagtgtgtggaggtgagctccgggattgccggcattcccgcttctgctggttgcttcatgctgcaggctgcggccgtcagccctcgctcgcattggtggcgctgaggtgccggggcagcaagtgacatgtcgtcgggcctccgcgccgctgacttcccccgctggaagcgccacatctcggagcaactgaggcgccgggaccggctgcagagacaggcgttcgaggagatcatcctgcagtataacaaattgctggaaaagtcagatcttcattcagtgttggcccagaaactacaggctgaaaagcatgacgtaccaaacaggcacgagataagtcccggacatgatggcacatggaatgacaatcagctacaagaaatggcccaactgaggattaagcaccaagaggaactgactgaattacacaagaaacgtggggagttagctcaactgggtgattgacctgaataaccaaatgcagcggaaggacagggagatgcagatgaatgaagcaaaaattgcagaatgtttgcagactatctctgacctggagacggagtgcctagacctgcgcactaagctttgtgaccttgaaagagccaaccagaccctgaaggatgaatatgatgccctgcagatcacttttactgccttggagggaaaactgaggaaaactacggaagagaaccaggagctggtcaccagatggatggctgagaaagcccaggaagccaatcggcttaatgccagagaatgaaaaagactccaggaggcggcaagcccggctgcagaaagagcttgcagaagcagcaaaggaacctctaccagtcgaacaggatgatgacattgaggtcattgtggatg

SEQ ID NO: 63403 - DNA, 1316 bp, Homo sapiens
ttttttttttttcacgctctctctttctctctttaattttggtttctctcaagcttccaaatggtgctcagtgctccaaggaaaggaaggaaggaaggaaaaggaggggagaggaggggaaggggaggcagaggaggaacatctggaaaaaaagcagcctgacagtccagctgtttgcaaactcatagcacatcctccagttacatggcagaagagggagggagggagggccaaaaagaaaagggagaggaggaagaaaaataacttaaataaacacacacacaaagaaaagagaaggcaacatgacgtgagctggtgatccatgaaggcagggagggaggggaaccgttttacctgtgctgaaccaagggaagaatgcggagagggagggagggaaaggggaaaaaaaaatcagaagaaacactgggggcagagggaggaggggacacggagacaactttatacaacttgagacgaggcggcccggccggcgtgtcctcagtgcggtgtggcggcggaggatctggtgctggtggtgctggcacttcagggtggggggccgaggacgggcacagtctctaagcagctcccccaccccaaacacggaggccccaaggggctgggaacaagagtctgtggcgaagcaggtgaggcagcgggcggtgggcgggcttgctgggtgcccccgccgcaggcgggcacgggctggacggcctgtcttctttccactggccccccggcatgggatgggccagggcgccgggtcgggtaccggagtgcaagctcgaaagagagagagagaaaacactgagacagcattagtggagtgaaaggcggacacagatgagcctgcagaccatgcccccaaccctccgctgcccatcccctcctccccaatcccatccctctgaggcaaaaaataaaaacgtagaaaaatctctgtacagactccccggtgggaaaacgggggcagggatggtggctcttcctggagcgcactccccacaaataaatttacaacccaagtccacggctcaaaaacagaatccgcaaaggcagcgctgggggctgcagcccctgcccccgcccctcctcgctgggtgctcagaaggctgacagctgcgccaggctgaggcggcagtcgatgctggagttgtccgggcccgtgtaggccaggcccaggggctctaggaaggcccggcaggcggcctcgccctcgaaggccagctcggcctgcaggtaggagactggcagcgcagggcggaagctatggagacaagaggagaaggtgatgaggcgggcgggcgggagggcag

SEQ ID NO: 63404 - DNA, 1441 bp, Homo sapiens
  misc_feature (1)...(1441): n = a,t,c or g
ttttttttttttgctgttgccaactgtttattcagggccctgaacgggtggtgcgtggacatgcaacacactcgggcccacagcagcgtgaccggccgctcccaagccccgggcgcacaaccacagccaggagcagcccctgccaccactgggccaccgtccagggccccacaggaccagccgaaggtgccccgggccgaggccagctgggtcaggtgtacccctagcctggggttgagtgaggagcggcacccccagtatcctgtgtaccccaagttgcccaggaggccgagggggccttgggctccatctgcactggccaccccgtgccaagcatcacagctgcgtgagcaggtttgtgtgtgagcgtgtggcggggcctggttgtccccttcctaaggcgtaactgctataagcatctccacctctcccgctcgggaaaaagccacagagcctggcgatgtcctcaaggggtcccggtggctccagtgcacccagcacacctcagcgcctctggctggcaagccaggagaagaaggtgcgaggccgtgggcgaggtgcctggaggacgcgcatggtgcgtggggagcgccaggctttgatggtggcgtcgtcgctggccgtgagcagcagctcctgctcctggggactgaagaccactgagttgaccacatcctcgtgccgcagcctggccagacagatgttgtagtggcggtcccagatgtagccgtgccggtcctccgccccgctggccacgaagtccctgctgacgtccaggaagatgaagaagcactcgtcgttgggcgtgtaggcgcggtgcgcacgcagagcccgcctcacctcccgcatggtcttgaggtcgaacaccagcaggtcaatctcctccgcgattggtggcggctgcatggggtcggccaccaccgcaccgttgggccaggcgcggctgttcacgtacaggtacctgttgtcgggcgacaggcccatgccgatgatgtgtccgtgtatgtctatgacgtggtccagcgcgtcgaagaaggcatcggagccccggccctcacccagcacgggccctgccgtggtcatctggtgtggcaggatctgcttgatgcctgcagggagggctacggtgagggtccctgtccaatgccccaaggacatcactccagggcagcttcctacctcagtggtgtctctggggctgtgagcaccacagaggtccgtgggcactgcctgctccgggggccccagacctgaatcaggcccgtcggttgcttgctggccagcggccctgcgtgcgtttgttttcactgctcatcccacaggccccaggtttgagcttgtgaccccaggggcgagtgaacgctcccagctttgcctgtggacttgcttgctgtctgcccctcaggacccctgcccggcctccnccaagctcctaggaccg

SEQ ID NO: 63405 - DNA, 712 bp, Homo sapiens
gtccagcgtggtggaattcggtaaggggaaacgcctgcgtggatgtaaacggggcgggaggctcggtgcaggtaaggggaaacgcctgcgtggatgtaaacggggcgggaggctcggtgcaggtaaggggaaacgcctgcgtggatgtaaacggggcgggaggctcggtgcaggtaaggggaaacgcctgcgtggatgtaaacggggcgggaggctcggtgcaggtaaggggaaacgcctgcgtggatataaacgggaatggaggctcggtgcaggtaaggggaaacgcctgcgtggatgtaaacggggcgggaggctcggtgcaggtaaggggaaacgcatgcgtggatataaatggcgcggcaggcttgatgttggtactcgcttctcagttctgtcctgtggctactcggccctgacactggtcaacgcggcgagcttggcacttcttttccccgctgcttctcctcaggtgctgactgcaaggggcagaatgagtaaggtctttcccacggggttcccttcccttcccttcccgcgtctcgggcctatttcccggaaagctattattccccccgctgactaagtggtgccgaaagcgtctgagggactccaaactcctcttcaggcttatcgtgagctggtgtagacagaggtgtttccatgctttaacccaacccttctactcatgtaactttcccagcagctccaa

SEQ ID NO: 63406 - DNA, 745 bp, Homo sapiens
actgttcagttgctctcctggatggctttatgtctccgcggtgtttcctagagtctcggcgtttctacctcttcgcaccctttcctgccaccctttgtcccctggaagcccggagacatcagcggctgcaattttgctactcgctgctcggcgtggaactgtcaggacaaaaaataatatccaaagatattttggcactaacggcgctatctgtagcaagaaagttgagcagtgtgaactgttgagacttccaaggagacttcagacaaccaagacagtgtaaaggaaaacagagaaaaagacttgttagacattattaagggcacgaaagttgaattgagcacagtaaatgtacaaacaacaaagccacccaacagaagtccacttaaaagctacaactggcccgcctcaaagagctacagagcatgctccaaagaagagaaatgagcccgtgagtcctgagttggtggcagctgcatctgctgctctgttttgacaagcaaacaagccagaactgctcaggcagctccgtagcatgaggaagagtcaggggcacagagagatggagagagacctagttagagagcgaaccatgtgctggatttagccagtcctgcatttttctatacttcaaatcaaaacgggccatgcttcacatctacccatgatgaataggggtactttgattaagaataaatagagctgactgaattctgaacaagataaacatattcaaggggaagag

SEQ ID NO: 63407 - DNA, 447 bp, Homo sapiens
tactagcacagtgcggtggaattccccggctcgagcggccgcttttttttgccaaaattaaacagtacagcaccatcattttctcagtaatcttcatctatcaataaagggttttgcagctaatccaaaccatggagctactcttctgtaacatccagaaggaagagctatctgaatgtccattttccctagagctttctccataggtggtattgtatcatcataggcaccgttgaggtcatagcctgtggcctgtgtggatccctgagtcagggttgtggcctgctcagagaatggggcaaaacggagctgcatgctgccttcctctgcaaaccagcctgtttgctgtgggtaacggtgggtgtctcttcagagcagggcatggcagagtgaaaatgcgagcagaggagagagcaacaatttttaagtgtccattttagtagtgca

SEQ ID NO: 63408 - DNA, 1743 bp, Homo sapiens
gagcgccgccctggaggcggtggctgggataaacgtgcacccagcaggactcgccttggctccgggttttgcttgtgctcacatgtggcaccatccttggttgccctcctggagaaggcattcacggcctggggtgggatggctgggctgtagtttagcctgggccttgggccccagtgggggacagggcctgtctgcatgaagtggaaccggagacctgcagaccccaggaaagtgtcactaatgggagggaggggcaggcagtcaagtggctggtgcccatggggtgaagccaccatgggctgggggtgaagagccggcaggaaggggaccagtcacagggagtgtggacagtcaggggtttgctttctgctcctgagttggggtgtgcagcgtggagcccacagcctggttctgggccagggcacagtgccaggggctccgctctgacctccaggagggagactgggcccgggacccctgttttctgctccctggactgcctagccctgagtgccacggatgaccagcgttctgttttctcttctcaataaccctatctcttcacacatccccaggcccagtgcttgccggctgtggtgaccctgcctggtgctggagggcagtatgggaggcaccagtgtgccctgctcaccccattagtgtcatcctgccatcttctgtgtccccttggccctggcacacacccatgtggcaaacacgggccgtgaggctccctgaacagcttcgaggcgggtgggcttctggagccctcttggctctgaggacagccacagtggggtcagacgtcagggattggtgcagccccacgtcaggggtgattgtcttgactttctctccatttgagttctggggtgggtggctcccttcccccttgcttacaggtgctgtcctgggcacaggaggtacgcgcctgggctctgccactgttctcttccctctgctgcaaagcccagttaaggaaatgtcttcaggttcaaagagataggatggtctgggccccacctgttggaagggaacagccagggaagaaccacctgcctgggcagggcctcgcctgagggagggcctggggcagggcacaaggggttgatctcagcccacaagccccaggggcagcccaggaaagcaggcgacggatgtggatcctgacctcctgagaggtgtgaggtgcagggatacccacctctgccttgacggccgcgcaccccttaggaagtggctgtccagcgcctgcctgtgctgggcctgggagaggagctgtcttgccagggctcccaggcagggagaggcaggtgaggttctcagccgatgtgttagaggttgagcatcgcctgtgcccagcttgctggctgtcagtgcttgatgtgcccatcctcagctaaaacccagagctggcatgttggtcatccccacctcagacgggacgcccagtccagagctggtgagccctgggccagcctttgggcctggcctgccccattcaccggccagcgccccacctccctggctggagggtcggggaggggctggcagagatggttggtccacagggctagccctgggtggtgggagaggggcccagggtcagggtgagagagagctgggccagggagctgctgcaggatgattttgaggtgtgggggaagcactcttgaggttggttttggtttgctttttaaaaattgtggtaaaatacataacaaaagtaacaaaaaaaaa

SEQ ID NO: 63409 - DNA, 717 bp, Homo sapiens
ttagtccagtgcggtggaattcctgagcttgaaaaaaaactgaaagagaataaaatatctttagagtcggaatatgaggtacggtatgttaatatagtctctgtcttataacaatcagttactggttttatctgccttaaaagtattagtagtacagaaaaaaattacgttgaatatatatggtatttgataaactgtatattcatttgaaaagaaaataaaaagatggatccatacttaatatactacaaataaataaattccagatggatcaagaatttgaaagtaaaaaacaaaatgctaaaagtactaggagaatataaatggagaattttgtttgttgtcttgagtcaaaaaagcctatttaaatgtgatataaaacccagaagctctaaaagtaaagatcaatgggttcatacatacaaattcaaaagttaagaatgaaaaaagtatataaagtcacagattacatgagaaatcctacagatatagtttaatcttatcatggcacattaatttacttaaatatgaagaccatcttcaaatcaatgtgaaaaagttcaacaattcatttgttcagtaagaacatgggaaagcatagcatgtaaaacttttggacaaaaggaaataagtatcattcttaaacatatgaagagatgctcaatttatcataataggaatgtcaaagtctaacgaggtatcacttttcacccatct

SEQ ID NO: 63410 - DNA, 1844 bp, Homo sapiens
  misc_feature (1)...(1844): n = a,t,c or g
acaattacattttcatcacccccaaagaaatcgcaaacctctgagcttacacacacacacacacaccccacccccccacccccaacaggcttccggtcctgagcaaccatgacctggctttgtctctgcagtgtgccctatttggacttgacttgaacgtgaatgcagccatacaacacgtagacggttgtgtctgaattcgtccacttagcgcgatgttttaaaggctcatccatgctggagcccgtgtcagtgcttcgtttctttttatggcttaaaaattgtctatggtgggccacgcacggtggctcacgcctgtaatcccaacactgggaggccgaggcaggcggatcatgaggtcaggagatggagagcagcctggccaacatggcgaaacctcgtctctactaaaaatacaaaaataagccaggcctggtggcgggcgcctgtagtcccagctactcgggaggctgaggcaggagaatcgtttgaatccaggaggcagaggttgcagtgagtcgagactgggctcactggttatggagccttacctgggcatgccccccgctgacacctgtggaaaggcatgggacagccccggcccatcccctgctgcctgagccctcccctcctctgaccttcctccttccatgaccctgctgccaggggggcttcccaaaaaagatcttgagtcttagcgatgtggtcgacacgcagagaacttggagcctcatgccagggccccctcccggagattcctggcgcccatgtctccttggggggtgactgaaggggatgggtccagactcacttgatcaacaggacatgggcctgcagcttcctgatggaatgcgcacacagctccctgctgatgaagtcaatgctgttctctgcctgcagagacaaaaacatggtgaattctcgtcacaaggcacaggcactctcgtgggcacgaaacccatctctgttggggtggctaagtcctggcaagggcaccttagccacccaccctgggtctgagcccaggaccccacatcactgcctcatcgaaggctctttagcccctggtggccagagactcctgccctctccaagtctgttctcccttcttcctgggctcgtggctacccagcctgactccatttcccatactcctttgccaccgggtatgcctgtgtgattaaagtcagagaagtgagttgggccacttttgggcctggattttaggacttaggtgtggcccttccacacccctttcccagtccataggctgcacctcacgctgtcccctgccagcctgggacaggcttcttgccaggaggaagaaacttgctgggaccacagtgcaggatgggcactccgtgatggcccctgccggcctcctccgcggccctgccagccctgtcttgtgactgttttacgtctggatggcagggatgtggccagcttgagtgagatgtgctgtaggtgtgacacgaagctggatttggaaaacttagcatgcaaaataatgcaatcaagctttatgttgattacatcttgaatcacattgtggatgttaaaatatgagaacaattgttagagccttatttatttgagaccgagttttgctcttggtgcccgggctggaatgcaatggcgcgatctcagtttaccgcaacctccctcctcctgggttcaagcgattctcctgcctcggcctaccgagtggctgggattacaggcatgcgccaccaggcctaattttgtgtttttagtggcgacagggtttcgccatgttggtcaggctggtcttgagctcctgacctcaggtgatctgtctgcctcggactcccanagttctg

SEQ ID NO: 63411 - DNA, 1952 bp, Homo sapiens
  misc_feature (1)...(1952): n = a,t,c or g
tcttcacccatggtcagggaggcgccatcgccctggctttggggctggggcctccggggaggttccggtaggggcgttggagaggccgctctttttgcaaggcccgagatggcgggccctgcgcaggccgccctattccgcgccctcagggcgtcagtatccgcctgaggccggatacccactctgggctcggatacccgcgctgggcccggagcatcctcggcgctgccctcccagagccccgcagaggctgaggtggcgcgggggcggccccggctccgcgagaagaggcggcagcgagggctggaggacccgggctacggggctccggggcgtctggcctgggtgggactgagcccatccagggactgggactccggggttctggtgtaggtggatccggggcaggctcaggaccaagtccctctccttccaccaaggagcgcccagaggccggcgggagctccaggttcacctcctcctcctccaggaaatcccacttccaactggatgtctggatgaactactgaaagctgctgagtgtcctgcagcagggtcggtggacctgggtgtctgtctggacacatcctccagtggcctggacctgcccatgaaggtggtggacatgttcaggagctgtttgcctgcgtgtgctgtgaacttcaagtgacggtaagggccatgtagaattgaggagcccgctggtgctcccggcaggcagccagcctccgcaggaccccgaccagcgacacgatggcttctgggcaatacagcacgtctacggtgaaagcttcaggttactgaaagggacaagtggaaagttccagttcatgctgacctcagcagcagggcgaggccagagaggcagcgttcatatgagactattagatgccatttgaccatttgggccattagatggaaaggcaattacttgggtgaaaaaggagaacccttagtagagaaagctgcaaaagaccgaagcaaaagaaaaaaatctccagactcactggtgttccttaaaaaaccagctctggttcttggcctatctagagggctttgaatgacagaaagcctgaccctgccatgaaattcgtgtttcaggtgtctgccgattggtctgctggcttgcaggggtgggcctgtgtccctggccaccgctggacctgtgggtttcagggctggaacccaggaccacaggcagagctctgttccaccagagaggggactgagtgtgctggcaggggtgaggggttttcggtggcccagccaaacacccccttctctcaagggccctgtcctcatctcagaagtggttgttttcctcctgtggtctctgaaggacacagggcatggctctgggacagagccatgtggtgatgactgaaacgggagtatgcctgtctccaacaagaggtctgtggcttgaaggtcaccttaagaggcacccctgtcctttgatgtcaccctggaggcccagagtaactcttctggaagccccatcatgtccatgcctgacagcatccattgttcccttttcccagagccaagagctgggtagagctgcaaggacaccgcctgcacaggatgcccggggctgggcattacctgctgcaatgacaacatctggctggacggcagagagctgacagaccgtcgcgacgtcccagtccagctgggccactgtcaccctggggccgtctaagttggcagtgatgtctgcctctaatgagaggccattgagaaggacattccctcagagctgctcgaggacccggctgtgacagtcgctgaagatgtacgcccgggggcggcacatcttgcagatggccaggcctgtgaggccggcgccactgccaagctttaggacagtcctgtgaaagaaggctaaagggttctcggcccattctgccggacgcgtgggtgaacccgtaacggcaagnctggccgcacat

SEQ ID NO: 63412 - DNA, 920 bp, Homo sapiens
ttttttttttttgagacagtctcgctctgtcgcccaggctcgagtgcagcggcgtgatcttgcttcactgcaagctgtctcccaggttcacgccattctcctgcctcagcctccggagtagctgggactacaggcgcatgccaccacacctggctaatttattttgtatttttagtatatacgcggtttcaccatgttagccagaatggtctcgatctcctgacctcgtgatctgcctgcctcagcctcccaaagtgctgggattacaggcgtgagccaccgcgcctggcgaagggagttctctcttgacccctgcagggaaaaggactcacctccctcactgcaggctcagccttccagggcaagagggaacaggaaagtatgtgcccatgtgtggcaagatggaaggacggcaggctcccgcctctaggcttggggctctaccccgatggtttcccaaggctgccaagaaggagccctaactttcttcctctcccttcctggaagggtgctgcatccacaggcttttgaccaactaaggcaaagaggggatttgaaaggctgcctggaaacactgggctgggaggagcctttggatatttttatatacgtttgaaaaggggattgagagaagaaaccaaaggtcggttgtactaaatgtatatatatagatacttctataaagtcactgctgaagacaagcatcctattgtggaggtacttgaggatgggctgagacagggaccataactcttcacccctcttcctccctctgtcctgcctcagctcaaggcctcagaatcttctggatgccattgctcatgcccctactcacatttctactcgttgctttattaatagtaaatgctcaataaattgtagctgccagtgccgggcattgctcttggcaaaaaaaaaaa

SEQ ID NO: 63413 - DNA, 2644 bp, Homo sapiens
cccaagttccagccgcgtccctggggcctgggcaggaagagtcgctggcagcccgcgcgccccaacttggagctgggacaccacgtttccagcttggagtgggccttgagcttgggactgacctcgcccccggctcacgtaggcatcctggaaattgattcccccaagtccttggtgggggagccggacttggtcaagactgtacttgttgcaggcgaagagattggaggcgtttggctcgtccctggctagggaggtgagactctccggtcagcgttgctggaactccccccatccagtccctccctcaagactaagggctacagtagtttgttggggctcattgcccctcaccccagatatcaccctggagatcttaaagactctcgagaaaagccacgtggggggctggttcccctggggcttcctgccgtcccccgactgcctcattctttggagcgtccccgatgtctgcaaagatgtggatttggacgtcctcgtggaagccctaaagcccgtggggacatttaagaagatcggcaaggtgttccgcagtggagagcgcaggggtatcatcggcgccagagggcaccagcccgggggatcgcttgggaaacgcgggagatgtttgtgtgccccaggcttcccctaggcgatggaggcccaagatcaactgggcctcctttcggcgccgcaggaaggagcagacagcacccacaggtcagggggcagacatcgaggctgatcaggggggagaggctgcagatagtcaaagggaagaggccatagctgaccagcgggaaggggctgcaggtaatcagagggcaggggccccagctgaccagggggcagaggctgcagataatcagagggaagaggctgcagataatcagagggcaggggccccagctgaggagggggcagaggctgcagataaccagagggaagaggctgcagataatcagagggcagaggccccagctgaccagaggtcacagggcacagataactacagggaagaggctgcagataatcagagggcggaggccccagctgaccaggggtcagaggttacagataatcaaagggaagaggccgtacatgaccagagggaaagggccccagctgtccagggtgcagataatcagagggcacaggcccgggctggccagagggcagaggctgcacataatcagagggcaggggccccaggtatccaggaagctgaagtctcagctgcccaagggaccacaggaacagctccaggagccagggcccggaaacaggtcaagacagtgaggttccagacccctggacgcttttcgtggttttgcaagcgccggagagccttctggcacactccccggttgccaaccctgcccaagagagtccccagggcaggagaggccaggaacctcagggtgctgagggccgaggccagagcagaagctgagcagggagagcaagaagaccagctgtgaggtgagggctagagacagcccacgggccctccctccaagtgtgggagggagagatgctctgcctctgaacttcaaagtggaggtggagtgctggccacgtctccacctaacaaccctctttattctcttgttaaagttttgttcatgctttgatttttttttaaattttttagagacagggtctcactctgttgcccaggctggagtgcagtggcatgatcataactcactgcagcctcaaacttctggcctcaagtgatcctcctgcctcggcctcccaaaatgctgggattacagatgtgagccaccacacacaccatctgattaaaaaaaaaaaatactgattccttgtaccaccccaaaaaatgtaaagaaagaattcgacacaatggggttgcgtcacctatagttttcatttcctcaaatgcaactcaaggtgctcagcttgataaagggagagagggagggcaggggagaaactgactcctttttccatctcttttttgcctgcacacttaatgtggactgcctccttggacttaaaaagagggcttgagccaacatgcaaatcaaaaaacatttatgaactgatttcttagctttggacttgacaactgacgaatgctctgggggtgacctggcccttgctgtccgttccactcccatccttgatgatggagacacctgtgtttatgttgtcacttcgcttgccatcctcatgccccgggctctgctggtttggaggggacagggcccttggtttgcacacctcacccgatcttggttataaggtacagtaaaagcgtctgaaaaatgcattcaaaacacagattctggggccctcggcaccagaggtgtggatttgctagcggtgcctgtgtggctctgaattctgtttgcatcaagctccacggacatctgggcaactcggccactggacacattgaaaaatcattgcaataggaaaaggcccaaaagaggggctgtggttggccggacatggtggtttctcattttcttatcagccattggttaggcaaaaccattttaaaaaataatttcattctttaaaacaattttggcgaatgcgtggccgcccctatacgatgactagaacattctgcataacatgggaaaccccccctctattacaattacaaaat

SEQ ID NO: 63414 - DNA, 894 bp, Homo sapiens
gcggtgcgagcgggggttagctcccagttcggcctctgaggaaaacgggcgttcgcctgcggttggtccgactgttagcaacatgagcggcctggatggggtcaagaggaccactcccctccaaacccacagcatcattatttctgaccaagtcccgagcgaccaggacgcacaccagtacctgaggctccgcgaccaaagcgaggcgacacaggtgatggcggagccgggtgagggaggctcggagaccgtcgcgctcccgccttcaccgccttcagaggaggggggcgtaccccaggatgccgcgggccgtggcggtactccccagatccgagttgttgggggtcgcggtcatgtggcgatcaaagccgggcaggaagagggccagcctcccgccgaaggcctggcagccgcttctgtggtgatggcagccgaccgcagcctgaaaaagggcgttcagggtggagagaaggccctagaaatctgtggcgcccagagatccgcgtctgagctgacggcgggggcggaggctgaggcggaggaggtgaagacaggaaagtgcgccaccgtctcagcagccgtggctgagagggagagcgctgaggtggtggtgaaggaaggcctggcggagaaggaggtaatggaggagcagatggaggtagaggagcagccgccagaaggtgaagaaatagaagtggcggaggaggatagattggaggaggaggcgagggagtaagaagggccctggcctttgcatgaggctgtctgcatgggccctgtggaggccatgcagctggaactgtacactgtgaatgtgtcaggccgacagggctttccatcagggggagcccaagtttggcgtatggcacgaaatcgtcgactcgtgaattccgg

SEQ ID NO: 63415 - DNA, 574 bp, Homo sapiens
gccccaacactgtcctatctatgctccccttcctcctgaaaagctagttttgacctttcctcagcttaagcagaggcctgtgtctttctccacggttagagaccaggtggcagggaaggacacaaccagcacaaagactcagaccacaggtccatcctgccctctacctgggatgatttttcaggtcttgcttcctttctctggagcaggacttcaagcttccaaacctgatgtcatctccaggctggagcggggggacgaaccatagacccctcacatcctgagaactcaggggagctggagctggaggcacaagagagaaggctgtgattctaggattgaaaaagaggaaatgattccaaagcaggacatttctgaagaattggaatcccagagagcaaaatcagaagatcatgtaaggaatatttttaaggaaactgaagagatgagtaaaactgagggaaagttagagaattgctggagaaaatatgcagtagaaggagttaagaactcattcttccagaagagcaatttcagagaaattaccatgaggtatgtgaaaaccctctctaaa

SEQ ID NO: 63416 - DNA, 367 bp, Homo sapiens
aactggaagtccttgccagagcaatcaggcaagaaaagggaacaaaaggcatccaaataggacaaaaaaaattcaaactctctctcttcatgacaatataattctacaactagaaaaccctaaagactcctccaaaaggctcctgtgactgattaaatgacttcagtacagtttcgggatataaaattgatgtataaaaatcagtagcatttccaaacaacaaccttcaagttcatatccaaatcaagaaagcaattccttttacaatatccatgctcaaggattggaagaatcaatattattttaatggccatactgcccacagcaatccacagattccatactattcctactaaactacgaatgg

SEQ ID NO: 63417 - DNA, 365 bp, Homo sapiens
cggcacgagacaagggagaaatactgttaatacagagaaaatctcaaaaaatactgtgagactacagtagattcctgtgcaaataaatttgaaaacctagaggaaatggataatttcttaggcacgtacagtttaataaaattgagccaatttgagatggaaagcttaagcagaccagtttccatagaagaaaagagaaagttatgaaggaactacttcgtacaaaaacaccaggcccagatagattggcaggaaacttctgtcaaacctttagagatcaggtagatagtcctaatgctacataaattgttttagagcataaataataaaggaaaacttccaagttctttgaatgaagcaagtat

SEQ ID NO: 63418 - DNA, 377 bp, Homo sapiens
aaaaaaagaagcataactgatatgctaaaaaatgagaaaaaaataatttatatgaaatgctcaattgtaacaacaaaaggcaaaagagaaaaagagtgaaagataaaaataagaacaaagaacaagaacaacaaatagaaaacaataaaaaatatagtagatgttaaccaaaccgtattaacaatcactttgaatgtcagtggtctaaattcaccagttaaaagaaagagattgtcagactggatcaaaaaacaagacccaactatatgttgtatataagaaacccactttaaatataaagacacatataaacgggtagagaaagatacaccctgacaacactaatcaaaagaaagcagaattatctatgcttatgt

SEQ ID NO: 63419 - DNA, 418 bp, Homo sapiens
gtcttgctgtagcctagtgagaataaaagagcagtcactttctctgaagtctagcctccgcccacttaacatgactctcttctttctttgaaggtttgagggcctgtgtctgctgtccctgctggtaggggagagccccacagagctattccagcagcactgtgtgtcttggcttcggagcattcagcaggtgttacagacccaggacccgcctgccacaatggagctggccgtggctgtcctgagggacctcctccgatatgcagcccagctgcctgcactgttccgggacatctccatgaaccacctccctggccttctcacctccctgctgggcctcaggccagagtgtgagcagtcaacattggaaggaatgaaggcttgtatgacctatttccctcgggcttgtgggtctctc

SEQ ID NO: 63420 - DNA, 392 bp, Homo sapiens
caaacatggggctcgaacccgggtcgaagggtcgccagagcgatggttggagaacatggaactacgctggagcacacctgagtactcttaagcaatccccatggtaagtaagaaggggagctcggaagcatcagggtaacaatgggacaagggtcaagcaggcacaaggcttatttgagtctgcctcggcagctcctcagaaaaggaggagtgaaagttagcactagctgacttatgcagctttttagtatggtagagaaatattgcccctggtttccgactgaggaaatatggatgtagaggtctgggaggaggtaggcagcgcactgaaaaaggcgtataaggatggtgctgaggatattcctataactgtctggtcagtgtgggctctg

SEQ ID NO: 63421 - DNA, 479 bp, Homo sapiens
ggaacataaaggataaaagacataatagaggacaaatagcaaaatgacagaattaagttctctcttatcagtaattatattaaatgtaaatgaattaagctcttcaatgaaaaggcagagattggcagaatggattttaaaaagaaccatgatccaactatatgctgtctataagagacttattttagattcaaagacacaaataatttccaagtgtaaagatggaaagcataccatgcaaacagtaaccaaaaatgagctgaagtggctatgctaatatcagacaaaatggacattgacacaaaaatgtttcaaaaaacaaagaagtacattaatatgataaaatgttcaatgtattaagaagatattgcaattataaacaaataggcacttatcaacagagaccaagaacctatgacaaaagattgacagaattgaatgaaaagttaaaaaatagtcggaggccaggtgcagtggct

SEQ ID NO: 63422 - DNA, 443 bp, Homo sapiens
  misc_feature (1)...(443): n = a,t,c or g
tcttgggataccgcgtccgannaccgggtcgacccacgcgtccgcactgtattgctgctctgaacatccatgcaataatcaacacactaatgctggctggattgagtgccaggccatcacagaactgctatataccatctattccaattttattctcattttgaggatctttgtctctattgtacagttgttctaacttcttcctttccagtgatccttttacactctctcatatataaagttcaggattttggaaaaaattatctgttgcaacatctaacttccagtcattttgagatagacaacttactgcggtttttttcactagattgtgtgaagatcataaactgacaaactttatccttctgcgatgatttcaacttgttcatgttggtgtcctccaggcctctcccctcctcctgtggctctgagcgaatgaacaa

SEQ ID NO: 63423 - DNA, 1774 bp, Homo sapiens
aagcccctgggaatccccggtcgacctacgcgtccggtgaggagcatgggtctccggcagccccccagcttttactgggcctaggcccagttgctggccctaagttgtacccgagactctacacagacatccacacacacacacacacacactctcacacacactcacacgtggagggcaaggtccaccagcacatccactatcagtgctagacggcaccgtatctgcagagggcacgggggggccggccagacaggcagactgggaggatggaggacggagctgcacacgaaggcaggggacccatggcgaggaggaatggccagcaccccaggcagtctgtgtgtgaggcatagcccctggacacacacacacagacacacacactacctggatgcatgtatgcacacacatgcgcgcacacgtgctccctgaaggcacacgtacgcacacacgcacatgcacagatatgccgcctgggcacacagataagctgcccaaatgcacgcacacgcacagagacatgccagaacatacaaggacatgctgcctgaacatacacacgcacacccatgcgcagatgtgctgcctggacacacacacacacacggatatgctgtctggacgcacacacgtgcagatatggtatccggacacacacgtgcacagatatgctgcctggacacacagataatgctgccttgacacacacatgcacggatattgcctggacacacacacacacacgtgtgcacagatatgctgtctggacacgcacacacatgcagatatgctgcctggacacacacttccagacacacgtgcacaggcgcagatatgctgcctggacacacgcagatatgctgtctagtcacacacacacgcagacatgctgtccggacacacacacgcatgcacagatatgctgtccggacacacacacgcacgcagatatgctgcctggacacacacacagataatgctgcctcaacactcacacacgtgcagatattgcctggacacacacatgtgcacagatatgctgtctggacatgcacacacgtgcagatatgctgtccggatacacacgcacgcacacatgcagatatgctgcctgggcacacacttccggacacacatgcacacacaggtgcagatatgctgcctggacacacgcagactgacgtgcttttgggagggtgtgccgtgaagcctgcagtacgtgtgccgtgaggctcatagttgatgagggactttccctgctccaccgtcactcccccaactctgcccgcctctgtccccgcctcagtccccgcctccatccccgcctctgtcccctggccttggcggctatttttgccacctgccttgggtgcccaggagtcccctactgctgtgggctggggttgggggcacagcagccccaagcctgagaggctggagcccatggctagtggctcatccccactgcattctccccctgacacagagaaggggccttggtatttatatttaagaaatgaagataatattaataatgatggaaggaagactgggttgcagggactgtggtctctcctggggcccgggacccgcctggtctttcagccatgctgatgaccacaccccgtccaggccagacaccaccccccaccccactgtcgtggtggccccagatctctgtaattttatgtagagtttgagctgaagccccgtatatttaatttattttgttaaacatgaaagtgcatcctttccctccagaaaaaaaaaa

SEQ ID NO: 63424 - DNA, 1889 bp, Homo sapiens
tgcgtttgtcaaagcacagacttcctgttttgcctgctagcatctccctgtaactctcccaatcttgaggagtgatccctgtcccagcccctggaaaggggcaggaacgacaaactcaaagtccaggatgttcaccatgacaagagccatggaagaggctctttttcagcacttcatgcaccagaagctggggatcgcctatgccatacacaagccatttcccttctttgaaggcctcctagacaactccatcatcactaagagaatgtacatggaatctctggaagcctgtagaaatttgatccctgtatccagagtggtgcacaacattctcacccaactggagaggacttttaacctgtctcttctggtgacattgttcagtcaaattaacctgcgtgaatatcccaatctggtgacgatttacagaagcttcaaacgtgttggtgcttcctatgaacggcagagcagagacacaccaatcctacttgaagccccaactggcctagcagaaggaagctccctccataccccactggcgctgcccccaccacaaccccctcaaccaagctgttcaccctgtgcgccaagagtcagtgagcctggaacatcctcccagcaaagcgatgagatcctgagtgagtcgcccagcccatctgaccctgtcctgcctctccctgcactcatccaggaaggaagaagcacttcagtgaccaatgacaagttaacatccaaaatgaatgcggaagaagactcagaagagatgcccagcctcctcactagcactgtgcaagtggccagtgacaacctgatcccccaaataagagataaagaagaccctcaagagatgccccactctcccttgggctctatgccagagataagagataattctccagaaccaaatgacccagaagagccccaggaggtgtccagcacaccttcagacaagaaaggaaagaaaagaaaaagatgtatctggtcaactccaaaaaggagacataagaaaaaaagcctcccaggagggacagcctcatctagacacggaatccaaaagaagctcaaaagggtggatcaggttcctcaaaagaaagatgactcaacttgtaactccacggtagagacaagggcccaaaaggcgagaactgaatgtgcccgaaagtcgagatcagaggagatcattgatggcacttcagaaatgaatgaaggaaagaggtcccagaagacgcctagtacaccacgaagggtcacacaaggggcagcctcacctgggcatggcatccaagagaagctccaagtggtggataaggtgactcaaaggaaagacgactcaacctggaactcagaggtcatgatgagggtccaaaaggcaagaactaaatgtgcccgaaagtccagatcgaaagaaaagaaaaaggagaaagatatctgttcaagctcaaaaaggagatttcagaaaaatattcaccgaagaggaaaacccaaaagtgacactgtggattttcactgttctaagctccccgtgacctgtggtgaggcgaaagggattttatataagaagaaaatgaaacacggatcctcagtgaagtgcattcggaatgaggatggaacttggttaacaccaaatgaatttgaagtcgaaggaaaaggaaggaacgcaaagaactggaaacggaatatacgttgtgaaggaacgaccctaggagagctgctgaaggtattataaagacgggacagataggtgacaggtttaaatccttgaaggagaagtggagctttaagagcagaaatgtgaagagctcccgttaggattcaacagcatgatttataaggagttaaatgttcatagaaaaaaaactgtgggtgacaaagttaggagcacatattgt

SEQ ID NO: 63425 - DNA, 478 bp, Homo sapiens
gaatggggtatttgcaagcagtgaatgaggaggcctggaaccaatcttctgctgatattgaggcacaactgaaaaaggcatattacttaaatctcttattgtattgtaaactgtataagtaatgaaattaaaaggcagaaattgtcagactgaataaaatgaaaagaccaaacaatatgctgcttacaagaaacacaattcaaatataaggacacaattagtttaaaggaaaagaactggaaaagatataccatgataacacaagtcagaagaaagctgctgtggatatattaatatgagatgtagatttcagagcagtgaatattgccaggcataaagaaagttattacataataattaaggtatcagttcatcaagaagatgtaataaccctaagtatttatacaactaatatcagagcttcaaaatacatgaagcaaaaaccagtggaattgataggagaaacacacaattacac

SEQ ID NO: 63426 - DNA, 1068 bp, Homo sapiens
ggaatggaggccgcggtgcctgttcctttatccgacgggagcctggggcctcggcgcggggcggcctggggtgcgaaaggccggccccgggggcttcccgcgccagcatggagcttgggggtgaagtcccagggtttgaggggggactagaggttcctcccggcgcggcctgccgggctcccccgggcgctccggcctcgagcccggcctctgtgtgtgggcgtgaagctccctgcttggaggcgggagccagggggtcctggccaggccggtcttggtcaggggaggtgggcgtcttgcttttcggtcacctggggttgggggtttcccggcggaggttgaggatctcgcctgcttcctgggtgagggcgtctgcgaaggcggttggaggtggcccgcccgccggtcccatcggccaggagaagggagacccaaagcctgggtgagcgtcccctttggcctggagccaggggtcaggggctggttggtgcctgcccaacccgtcctgctggggctggactccgcaggacctggggaaagcggcctgggcgtggaatctggagacgggtccaccctgcctgcgagtgttagggtcagagaccctcccctgagactctctggggcccccgcaagggcccgtgcggcctggagcgatcatcttggcgctcccttctggaaaaggggcttttgtcctccaagagcacatggaggctctgagtgggtcagccctccggatcgggaagggattaccgttcttcacgggatttagccctggcgtcttgcctagggcgtgcacctgcccccgggtgttctcccagactcttaagacctcgcaggctccctcgaggggccctgcgtggaagggaaggcggaatctccctctgattctgcctggattcagcacccagaatgaggtggtctctgaacgcccctcctcctttacaggcgaggaaacagccctgtgggaagtcgaggttccaaggtcacagtgaggggccctggccacccgattcagcgcaggaaatagtgagaaagtcgttgttagccgactctgacccgcattcggtt

SEQ ID NO: 63427 - DNA, 722 bp, Homo sapiens
ccggtgtgcggggaacgttatgagagggaggggggacaccgggctagggtctgcggacctcttagcaggagccggcggggaagcctgtccgggaccttcctcagcttcccgggaggcgcggggaacaggccgcggtctccgcgcctagcagttgtggggcggggaggggtaggcggcaggcctgcttgggtcttcggcatttgcagagagctctctaaccccctgtgtcctccgagaccctcaccttccccctcccccaccggccggttttgttctatttcgaggccctggcgtctcgcggagggttctgggagtcgtgatgggagggggtggtagtgggacgagacttgcgcggggcttctgggatttgtagtctcaccggccgcaggcggaagtgccgtggttccgacgctgttgtcacagggtggcctttggtcatctgaaatccgcggtcctgagtgctgggaagaggggctagaggacgtcgggccggggccggggctggggccgggatacacagcaggtctatgcagcagtaaggtgggcgatccacctgggacgaggtaccctgcccaaacattgtcgggaccgtgggccttccctccatttcccacaagcggtatgctctacagcataaaaggaagagaaaattatgtagaaatacttgcaccgttgataagcagggtcttggaataggaacgaatgaatgttggctagacctt

SEQ ID NO: 63428 - DNA, 597 bp, Homo sapiens
gtacccttccgttattcccgggtcgacgatttcgtggttggaggaggtgtggggccgttgccgccaggaaaaacagcactggaggcaatgtttctataaatcaaagaagagacagtgtgagaatgtcagccctcaactggaagccgtttgtgtacggggggctggcctccatcactgctgagtgcggtacatttccaattgatttaaccaagacacggttccagattcaaggccagacgaatgatgcaaaatttaaggaaattatataccgaggaatgttgcacgcattagtgaggataggcagagaagaagggctgaaagcactctactcggggtgagtaggccttcatgcatttctgtgtcactgttcactgtttcacatgggtatagacttcagaccaagactgcacagatcacaagtaaaaagtttgaggtgtgtttgaaaagaacaaatagcatgatagatttttcacttttaatttcaactctaatttctaagtatatatattatgcagcagatgttttggagaaactgttttactatattcaagtacagacagacaacaataaaaaaatatgtttgtttaaaaacattct

SEQ ID NO: 63429 - DNA, 1210 bp, Homo sapiens
ggaagtaggaggagagtcaggactcccaggacagagagtgcacaaactacccagcacagccccctccgccccctctggaggctgaagagggattccagcccctgccacccacagacacgggctgactggggtgtctgccccccttggggggggggcagcacagggcctcaggcctgggtgccacctggcacctagaagatgcctgtgccctggttcttgctgtccttggcactgggccgaagcccagtggtcctttctctggagaggcttgtggggcctcaggacgctacccactgctctccgggcctctcctgccgcctctgggacagtgacatactctgcctgcctggggacatcgtgcctgctccgggccccgtgctggcgcctacgcacctgcagacagagctggtgctgaggtgccagaaggagaccgactgtgacctctgtctgcgtgtggctgtccacttggccgtgcatgggcactgggaagagcctgaagatgaggaaaagtttggaggagcagctgactcaggggtggaggagcctaggaatgcctctctccaggcccaagtcgtgctctccttccaggcctaccctactgcccgctgcgtcctgctggaggtgcaagtgcctgctgcccttgtgcagtttggtcagtctgtgggctctgtggtatatgactgcttcgaggctgccctagggagtgaggtacgaatctggtcctatactcagcccaggtacgagaaggaactcaaccacacacagcagctgcctgactgcagggggctcgaagtctggaacagcatcccgagctgctgggccctgccctggctcaacgtgtcagcagatggtgacaacgtgcatctggttctgaatgtctctgaggagcagcacttcggcctctccctgtactggaatcaggtccagggccccccaaaaccccggtggcacaaaaacctggtgaggcctcccccttcccaagtccattcccactgtaggccgatgcctgtgcaaaggacgcagtgccatatcagagaggatccttgaagaggactcaccccaagcaagggaaaattggtgggggaacttctgccttcctggtttccttgactttggcctcctcctcttcctccttatcttctccaacctccttcctttatttgttccacagactggaccgcagatcattaccttgaaccacacagacctg

SEQ ID NO: 63430 - DNA, 1108 bp, Homo sapiens
catatgaacatttcaataaaggtagaaaaagcacttgatattgaatgctttcctcttgattttacaaccaagacaaggaagtccattatcactatttctattcaatagtggacatactagccagcaacaaaactaaaaggtataaagattacaggaaagttaaaccatctctattcacagactgcaagattgtaatcacataaattccaaaagactctacagactctacagtcccacggcagccccttcctccgcgccgcggcggcgcctccggcccacgtcacgctcgcgccattgtttcccagccgctgctcgctgggaccccgccagccctcgagcgcggccattcgccgcgttctgccctctcccccctttcctcacgctggtggtggccctttcctcagtcctgctgatgtcctccagctgattccaggctgttcccggccacccctgaggccgtcctttcgcttcttgtaaaagcctccccgcctcctgagctccctcggtcgcctcccgagaagccaacgggcctctctggtggagcgctaggttgacagcgttttagcaggaccgcgagaaaccggggagatcctcttacgaggaaaaactccaagattacatccctgttatctttcctccaagtagtttctgatcataagttatttgtttaaaaatgatgttttaattagaatttatttgatggcttttaaaaaacttttactgacactcaacatgtttgtttttgtaggaactgactaagactttggaacagaaaccagatgatgcacaatattatcgtcaaagagcttattgtcacattcttcttgggaattactgtggtgcagatgctaatttcagtgactggattaaaaggtgtcgaagctcagaatggctcggaatctgaggtgtttgtggggaagtatgagaccctcgtgttttactggccctcgctgctgtgccttgccttcctgctgggccgcttcctgcatatgtttgtcaaggctctgagggtgcacctcggctgggagctccaggtggaagaaaaatctgtcctggaagtgcaccagggagagcacgtcaagcagctcctgaggataccccgccctca

SEQ ID NO: 63431 - DNA, 512 bp, Homo sapiens
gcgttctgtaattcggcacgagaaattagaaagcagtggcagaagaaaatttgggaaattcacaaatatgtggaaattaaacatttaaaaaaacaatgaatcaaagaagaaatcacaaaggacattaaaaaatactctgaaatgaataaaaatgaaaatgcaacataccaaaacttatgggatacaataaaagttgtgcttagagggaaaataatagctgaaatacttatatattttaagaagatctcaaatcagtaacccagacttccaccttaagaagctagaaaaaggagagcatactaaaaccaatacaagctgaagaaaggaaattattagagtggaaataaatagaatagaaaaacaatggagaaaataaactaaaagttggtgctttgaaaagatcaataaaattggcaaagctttagctaggctgatgatgaaaaaagaggactcaaattactaaaattaaaaaaaaggaggaaaaagtatgacctatttcacaggtcttaagg

SEQ ID NO: 63432 - DNA, 1403 bp, Homo sapiens
ctctgtaattcggcacgaggtgcaacacgtgggggcggtgccggtcggagggctcctagtgcgccaggttgtgggaagtgaggctggcggtggcgacaaccgaggaggaggggcgggacgccgtggagcacggcgaccggctgagcgtcatggagggctcaggggagcagccgggcccacaaccacagcatcccggagaccaccgcatccgcgacggcgacttcgtggtgctgaaacgtgaagatgtgtttaaagcagtacaagtccagcggagaaaaaaagtaactttcgaaaaacagtggttctacctggataacgtcattggccatagttatggaactgcatttgaagtgaccagtggaggaagtctacagcccaagaagaagagggaagagcctactgcagagactaaagaagcgggcactgataatcgaaatatagttgatgatgggaaatctcagaaacttactcaagatgacataaaagctttgaaggacaagggcattaaaggagaggaaatagttcagcagttaattgaaaatagtacaacattccgagacaagacagaatttgcccaagataaatatattaaaaagaagaaaaaaaaatatgaagccatcattactgttgtgaagccatccacccgtattctttcaattatgtattatgcaagagaacctggaaaaattaaccacatgagatacgatacactagcccagatgttgacgttgggaaatatccgtgctggcaacaaaatgattgtgatggaaacgtgtgcaggcttggtgctgggtgcaatgatggaacgaatgggaggttttggctccattattcagctataccctggaggaggacctgttcgggcagcaacagcatgttttggatttcccaaatcttttctcagtggtctttatgaattccctctcaacaaagtggacagtcttctacatggaacattttctgccaagatgttatcttcagagccaaaagacagtgctttggttgaagaaagtaatggcacactggaggaaaaacaggcttctgaacaagagaatgaagacagcatggcagaggccccagagagcaaccacccagaagaccagggaaacaatggaaacaatttctcaagatccagaacataaggggcctaaagagagaggaagcaaaaaagattatatttcagggaaaaacagagggagacaaggaaggagcagcggaaaagacttttggggctgccgctctgcttgagttgaaaggaaacgccgatggttttatttgttagcttgttcttttccaccccactcccctgctgctgtctttgctggactttgtggccccttcaaggccgtttgtggtctactgtcagtacaaagagcctctgttggaatgctacacaaaactgc

SEQ ID NO: 63433 - DNA, 449 bp, Homo sapiens
ctgcgctgcaggaattcggcacgaggaaaaaactacttttaaggaaatatagcatctatcgtgaacgtggaaaagtaaagataattcaccatgcctgctgtggctttagttcctaaagaactctacctgagttcttcactaaaagacctcaataagaagacagaagttaaaccagagaaaataagcactaagaggattacgtccattcaatacttggaactgcaaacatcaaaaaagccattgaagaagctgaaagactctctgagagccttaaactaagatataaagaagctgaagtccggaaataacttgaggaaaaggacaggcagaaggaagcacagcaactacaacaaaaaaggcaggaaacaggaagagaggatggtggcacattggctaaagtttctttggagaatgtattggattccaaagacaaaaccccaaaagggcat

SEQ ID NO: 63434 - DNA, 2421 bp, Homo sapiens
gaattcggcacgaggagagcggcaccatggccccgcgggggcggcggcggccccggcctcacaggtctgagagcgcaagacgttcaaagaacactttagaaagaacacattccatgaaagataaagctggtcaaaagtgcaagcctattgacgtgttcgactttcctgataattctgatgtctcaagcattggcaggctgggtgaaaatgagaaagatgaagaaacttatgagacctttgatcctcctttacatagcacagctatatatgctgatgaagaagaattctccaaacattgtggactgtctctctcttcaactcctccaggaaaagaagcaaaaagaagttcagacacttctggaaatgaagcaagtgaaatcgaatctgtaaaaattagtgcaaaaaagccaggaagaaagctcaggcccattagtgatgactctgaaagcattgaagaaagtgatacaaggagaaaagttaaatcagcagagaaaataagtacacaacgtcatgaggttattcgaaccacagcgtcttcagaactttcagagaaaccagctgagtctgtcacttctaaaaagacaggaccccttagtgcccagccctctgttgaaaaagagaacttggcaatagaaagtcaatcgaaaactcagaaaaaaagggaagatatctcatgacaaaaggaagaaatcaagaagtaaagccataggctcagatacttctgacattgtgcacatttggtgtccagaaggaatgaaaaccagtgacatcaaggagttgaatattgttttgcctgaatttgagaaaacccacctagagcatcaacaaagaatagaatctaaagtttgtaaggcagccatcgccacattttatgttaatgttaaagaacaattcatcaaaatgcttaaagaaagccagatgttgacaaatctgaaaaggaagaatgctaagatgatttcagatatcgaaaagaaaaggcagcgtatgattgaagtccaggatgaactgcttcggttagagccacagctgaaacaactacaaacaaaatatgatgaacttaaagagagaaagtcttcccttaggaatgcagcatatttcttatctaatttaaaacagctttatcaagattattcagatgttcaagctcaagaaccaaacgtaaaggaaacgtatgattcatccagccttccagctctgttatttaaagcaagaacacttctgggagccgaaagccatctgcgaaatatcaaccatcagttagagaagctccttgaccagggatgagaagagcagtctactaaaatgtgcctataggaagactagtctcatgctgttaccttctgaaactgtacctttataaatcaattgttttgcaaagaagttatggcctacttagaatctaaaatttgttattcaaattaaatggctgtgaacaatgttaaatagcatcagtttgtccaatagttttaaaggccataatcatcttttctggttaatatcttgagtaattttaaaatgttgacaccttaatcggtcccaggtatgagctataataaacttgtaaaattaagttgatgtgaacataattttgattaattaataaggcgatttctcctgaatttacaccaaagctaatttttaatgaaattgggtttacaggaaggtaaaaaacaaaaattgggaaaggcaaagtaataaaacttagtttatataaacaggttgaatgatatatttatcaaatctcacagacatcaggcaaattatagcctggtgacaaaagtgttcatagtgaattagttactcttgtaatacttctataattagttcatcaggaatttcatccacttcactgttataactgagaagactgttctctgcagcttcagctaattcagcatcttcagtagcttctaaaaaataagcatcatcaatgccattatcccagacagcatcagcagatgcacctgttgacagcctgctaggtgatggtttatgaggattctgggtttcattgctcctagtttcatctgcttcatctgttgtaaactcttcttcctctttgaaaaaaaacaggagacatacttcagcaggtaatgggaaacagtcagatttgaagttttttgctttacatacagggtcatgacattttttataccaaacttcatttttcagatcaaccagaatcctttttgtttaaaaaaaaaaaaaagtattaataccaagactgggtagaaaacaaaatccagctgcatgctgttccaagaaatatgcctaagacttaaagatggagaaaaattaaaaagtaaaaggataaggatagatacataccaatcaaaacggtggttgccaaaaatcacacaaaatgaactgcagggcaaaaagtagatactgatgaaagttcccccaggaagatgtaacaat

SEQ ID NO: 63435 - DNA, 1166 bp, Homo sapiens
ggtctgggtggccatggaggagccccctgtgcgagaagaggaataggaggagggagaggaggacgaggagagggacgaggttgggcccgagggggcgctgggcaagagccccttccagctgaccgccgaggacgtgtatgacatctcctacctgttgggccgcgagcttatggccctgggcagcgacccccgggtgacgcagctgcagttcaaagtcgtccgcgtcctggagatgctggaggcgctggtgaatgagggcagcctggcgctggaggagctgaagatggagagggaccacctcaggaaggaggtggaggggctgcggagacagagccctccggccagcggggagtggcctgattccaccaagagaaggcccaggaggaagaagagaaaaagatgctgtggttactagtgccaaaaatgctggcaggaacaaggaggagaagacaatcataaaaaagctgttcttttttcgatcggggaaacagacctagatccaaggccacaagtaaggctatggctctgattctagaagacaaccttccaagatgcctggcaaaaccacctccctgtgccacacagacacactaggcctgtgtatttatttccccttcaaagcagactgaggagggaggagacgaggttctcttggcatcactttctccctggctgcagaactagacacccttgaagatttggcctgggccagtgagactgaaatcaagaaaaacagaagggatgtgcagggtgggggggtccacttcctgctcccatgtcaacccccagggcctccagcgtgcagacgcgtgtcctactcatctgctcccacggatgaccctggtcttcaatggttagcagaagggagaaaagaaagcaggaaaatgtgctattgagattccagtggtgacttcactgatatttagtgaatatttgatttagccaacatgcctttctttatgtgattttgtattaaagtaaaatgatttttatactttcaaaaaaaaaaaaaggggggggcctttttaaaggttccttggggggccctatcttaacacgggacggcgcattgaaacctttcccctaaatggatgcttaataataagcaagggcacgggccggcgttttacactgggtggacgggaatatcgctttcgtgggaacat

SEQ ID NO: 63436 - DNA, 791 bp, Homo sapiens
tataatctagtgtatatatgtctgtatatataaatatgtaaatatatgtgtgtatacacacacacaccactagaaaagattaaaaataaagaatacattactcattcaataatagttgtcaaaagaaatgaaaaaagcagaatagaagcataaaatatgtaaataatagaaaaaaatgacaaaagataaaaataaaagttataaaaataaataaactctcaggttaggtaaaaatataaaatccaacttcatgctgtttataagaaacaactaaaatacagtgacatgtaaaaagcttaaagaaaaacaccagggaaagaaagaaagcggacatacaagaaagaaagcggagattatgctattaataaaaagaagaatttaaggagaaaaagtattaaataggagaaagtggatcacgttatactgacaaaggcaacaattcacagcaaagattaaactgttatgaaactttcagtaccaaattatattgcattcaaatgtataaataagaaacttgaggctccagaagaaaacatataatggaattagtatgctagcgagagactttaatacatcctatgctttggcacatcaatgaggcaaagtataaacaaggatatattaagattgagcttaacagatacttattaaactttgaaccctatatacagagattccatcttttctagtccccacgaatgactaataaaaattaatctaggccaggtgcagtggctcacacctgtaatcccagcattcttggaagctgaggtgggaggatcacttgagcc

SEQ ID NO: 63437 - DNA, 732 bp, Homo sapiens
atcattagtccagtgcggtggaattcctgcgctgccccagacccactgtgcgtgtgacagcggctgatctgtgcctgggcagcgcgaccctcctggccccgtgtccgggtctggcgggcaggcgagcggccacacggggacgcgagggcagctggataccgtggggagggggtgccctatggacggggtgtgcctgtctggccagcagggacggcgggtgggggtaagcgaaatcattcgggggctttgctgccctccgcttggtggggctgaggctgggccagataccctcttggagggaactttcttttccttgtgtgtccagggtaccagtgtgcggagttcctgttgccaagctgaaggtggccctgggcaggcacaggtgtggtcatatcttcagccaacaggaccatcctccggagggccacctctggggacttcctacgggaagagagtgacagatttggtgcttctgtgtgtttctgccgcttcagtggggccgctgcgggagacagcgggtggatcctccagcagcctgtctgctgagcttgccttctcaagtctactgttaaaatcaggaccgggtcgtgtccgagcctacaggccctgtctccgctccccaggcctgcaggagttgagggctgcacctgctcgctggagagggagaggcagatttagtggacgcctggcatggactcggactggcctttggaagctccctgccctgacggc

SEQ ID NO: 63438 - DNA, 1120 bp, Homo sapiens
caaggctgtaggagttctggagctgctggctggagaggagggtggacgaagctctctctagaaagacatcctgagaggacttggcaggcctgaacatgcattggctgcgaaaagttcagggactttgcaccctgtggggtactcagatgtccagccgcactctctacattaatagtaggcaactggtgtccctgcagtggggccaccaggaagtgccggccaagtttaactttgctagtgatgtgttggatcactgggctgacatggagaaggctggcaagcgactcccaagcccagccctgtggtgggtgaatgggaaggggaaggaattaatgtggaatttcagagaactgagtgaaaacagccagcaggcagccaacgtcctctcgggagcctgtggcctgcagcgtggggatcgtgtggcagtgatgctgccccgagtgcctgagtggtggctggtgatcctgggctgcattcgagcaggtctcatctttatgcctggaaccatccagatgaaatccactgacatactgtataggttgcagatgtctaaggccaaggctattgttgctggggatgaagtcatccaagaagtggacacagtggcatctgaatgtccttctctgagaattaagctactggtgtctgagaaaagctgtgatgggtggctgaacttcaagaaactactaaatgaggcatccaccactcatcactgtgtggagactggaagccaggaagcatctgccatctacttcactagtgggaccagtggtcttcccaagatggcagaacattcctactcgagcctgggcctcaaggccaagatggatgctggacactctccagttatccaatcaagagtatgatgggtgcccccattgtttaccggatgttgctacagcaggatctttccaggtgatggggctttgaggattggtaagagagtctggccccatccccctgactccctcacatacattcatgcctatctatctgaatctctcgcacacagagagccccatgaagccatttgcatcatcaaagcacccagaaacccagtctagtcctgagtggactttggttccagggaggctgagggcaaacatttatttctcttctt

SEQ ID NO: 63439 - DNA, 1573 bp, Homo sapiens
tttcgagaaggggcgaggcccgtttgcaggggccgctcggcccggggaagcccgcgccccgctcagccttgcagccccgcgcccggagcatctccctggaggaacggagacaaaggaggattcatgtccaaagggctcccagagaccaggacggacgcagccatgtcagagctggtgcctgagcccaggcctaagccagcggtgcccatgaagcccatgagcatcaactccaacctgctgggctacatcggcatcgacaccatcatcgagcagatgcgcaagaagaccatgaagaccggtttcgacttcaacatcatggtcgttggccagagtggactgggcaaatcaacgctggtcaacacgctcttcaaatcccaagtgagccgcaaggcctccagctggaaccgggaggagaagatccccaagacagtggagatcaaagctatcgggcatgtgatagaggaaggcggtgtcaaaatgaagctgaccgtcatcgacaccccaggctttggagaccaaatcaacaatgaaaactgctgggagcccattgagaagtacatcaatgagcagtacgagaagttcctgaaggaggaggtcaacatcgccaggaagaaacgcatccctgacactcgtgtccactgctgcctttacttcatctctcccacaggacactccttgcgacctctggatcttgagttcatgaaacacctcagcaaggttgtgaacatcatccctgtcattgctaaggctgacaccatgaccctggaggagaagtctgaattcaagcaaagggttcgcaaggagcttgaagtaaatggcattgaattctacccccagaaggaatttgatgaggatttggaggataagacggagaatgacaaaatcaggcaggagagcatgccttttgctgtggtgggaagtgacaaggagtaccaagtgaatggcaagagggtcctcggccgaaaaactccatgggggatcatcgaagtggaaaacctcaaccactgtgagtttgccctgcttcgagactttgtcatcaggacccacctccaggacctcaaggaagtgacacacaacatccactatgagacttacagggccaagcggctcaatgacaatggaggcctccctccggtgagcgtggacacagaggaaagccacgacagtaacccatgacgaccacttctctgtgtcatcacacatacccacttcacacacacacatcccaaataccaccaccaaccaccttcttcctctcaactctgtcccacaggcctgtctggtatttgtggagcatcttgtctgtgtgtgtgtgtgtgtgtgtgtgtgtgtgtgtgtgtgacagagagagagcgagagagcctgtgtgtgtgcatgcaggggagaggtattttcactgccctccctggagagtcccttgtaagtgtggctcctccatgcctgtccattatctgtctcctttttttgtgtcccaaaacaaagctgtttgcctcactcaagagatctgggggaggttttatttaaaagtgctgggagcaggtgaccacaggcaactcttctctcggaacctgcc

SEQ ID NO: 63440 - DNA, 1150 bp, Homo sapiens
  misc_feature (1)...(1150): n = a,t,c or g
taacaggttaaagaagtgccaaccttccttcctgggtggggaaggggcccaagcttggccggggcgaaaagttttnaagcaccattgggggttttctgtaagtgtggagggtttggaccagggtgggcctgtgccgggccctctccacctggtgcctttgacagacactccgggctgtcggtaaggagtcaagtacctgccggcagcccccgctagttttcgatttccccccagcactgtccgaaaacttgaagggcgacttcaacttgtcctgcttggtgagggagagggccttgtcgagcttgcttgccaactgctcctggtcgctggccatcttcttcttcttaatctttagctgactgatgaagtccgacgaggcctcatgttcatcccaagtctggttcctccccctggctttccccattccgatgagggcatcatgttcctcctcagaccccttgtgtctctttcttatccctgctcccagctcataatcatctgatgtcagcagagacttgctgctcagctttccgctactgtggccgctcttccctctcttgcgggggggcgacagggcgctcggggcgtgggtccgtttccgcggcctgccagggcctctgcgtgccaagcttctatggggttcctcgcgcctgtcctcggagtcccggcggcgctgcagcttcaccagctcacgctgcttctccttgtactggcgctgcacctcggccagccgcatccggaagtccagctccagggcgtccatgtcctccagggaggacttcatggcatacatccgctcctccttcttgcgcatccagctgtacttcttgttgggcttcagctcccgcgggagccgcaggttcttgagtgggtccaccacgggcccatccagcacctccctcagcatgtggctgccagctgccagcagactctccagggagggccgcgccaccagggcccgctccgcacctcccatctcttggctcctcctctccagctccagctctgcgatctcacttagcagggtgatgccatgcaggaagctctgctccaagacaaggctctcggctgcttccagcttctccaaggcctgggctccagcagcacccggggagggcagaggcctggcctggggcagctccgcagctgc

SEQ ID NO: 63441 - DNA, 1649 bp, Homo sapiens
  misc_feature (1)...(1649): n = a,t,c or g
aataattctttcaatccatgaacacaggataactttccatttatttggctcttcagtttctttcatcagtgttttatagttttcatcctagagatttttcaccatggttaagtgtatttctagatatatatatatatatttttttttaattgtattgtaaatgggattttcttgatttctttttcatatagttcaccattaatgtatagaaatgatactggtttatggctgtaatcccagcactttgggaggccaaggcaggtgagttgcttgagctcgcgagtttgccaccagcctgagcaacatggcaaaaccctttctctacaaaataatacaaaagttagccaggtgtggtggtcccaactacttgggaggctgaggtgggaggattggttgagcccagggagttgaggctgcagtgagctgtgattgcaacactgcacttcagcgtgggcaacagagtgagatcttgtctcaaaaaaaagaaataatactagtttttgtttgtagattttgtatcctgaaactttactgaatgttttttagttcgaacagtttttttggtggagtctttaggattttctctacttatgatcgtgtcatctgtaaacagagacagttaacttcctcctttccaatttagatgccttttctttctcttgcctaattgcctaattacagcatgttcctattctgtaaatgttcaatgaactagagaatgattcttgggtagttaatattgtcaatgttgatgaactcttttccttcgctgaaagcagctactttgttggaggtttcaattctgcgtggcaatttgcagcatttctagtggtactgctccacattttacagctttatgaagaaggtgtttactttttttgaaattaccttgagacatttcaaactgtgcagaagatatatgcacaaaagcaaatgtcttgcagtttgctatagccacttatacatcatctggctcttgaatagctttaattcagctgttgaatctcacttgaatttgagcaaaaccttcatctttatatgtatctggacaaattacttcaattgcttgacagtaatgaccaatcaatttatttaaaatagtatcatttagtaggacagtgtttttctctggtttgagcaacgaattcaaccagtcctctgggttgatcatcatcatcatcatcatttggttatcagttcctgagttatttttaccagggagttttatacctttagacagctattttgaattatctcaggaatgtcatatatctctgcctctttagagtcagccactggcactttgtctgtttggtgacatcatgtttccctgactgttcttcatctttgtagttatacattgatatctgtgcattgaatatgtaggtatttataaacagtctttgcaatctggctttgtctgtgattgtccttgtatagtaggtctgtccagaaattgtaagcatactgtcttttttggtctttaagcccgtgaacgctacagcccgtgtagtgccaaatggtgccctaagcccaggttcccctgcagtccacttntgtgatttggtttgttgaantgcttgtgagccccaacccncattcttttgtnttttaattttntcacntaggtagggctaanccctggctgg

SEQ ID NO: 63442 - DNA, 1468 bp, Homo sapiens
ttaaaatcaaggctatcttatcactttagctatatgattacagctctttcaagtagttttcctttggtactagaaagtcatttttctaaagagcattaacatttcaaataagcaaattttatttagagatgtaaacatgtaaacattaaaaactcaactaaattttatctttattatgatgggcactgatttaaactattaatgaaaatatgtcatgtcagagatataaagaagaatatatcacccagatagtaacatgcaattaatttccatttgattaatataattggtgatttaacacacatacatatatacacagtagtttggagcaatatataggcaaaacaccataataatttatgcacagtatttaagaatgtgggccttgataacagaattccaacaagattttttttagtgtattaaatgtaattggataaaatacaattaaaagcagcagtgaatatatttctctatctcactaactgaaaaaaacttatttatgtaaactttatacatgtgcattcttgctcttttctatatgttttacagttcttggttcttcttttaaaatagtatttgccactcttctaaatttttgaatagtctaaatggagggaactgcttgtgatacattagtcttcttcagcatcatatgccacttctgctacttctatctctgatacagcattttcaggttcactaaaacttaagcatggtttattatcagctctagattcttcatccaggacatcttgatcaacctcaagtgcagaggactccacctttaggatctgttcaccttctgtttctgacacatccagtgattcttcaggttctaaagacaatgttctgattctgttctctaaagtgtctatatgaagttgcttctcactgagcagtttctttagtgattccatctccttttgtttttcaagtagttctttctgtaagcggtagtttgtctcttctaaagtttcacagaatgccctgctttcctctaggctatcaaatggacccggtggatcatccaaacaaagaaattctctcactgcaaggcagttagcaatgtccttgtgagctactaaattttgaagaaacgcttgtaatcctaattgtctgtcttctaaaaagtcagcattgtaattatctttaaaccagcgttttggaggaagtgctagtcgaaaacctggaaacatctcttttaactcacagaaatgttcagctttgtcctactgctgtaactttgtcattaagcctagagaagtcagtgtatcttctgaaaactacccagctttcttctggggttttctttactagtattttatatacagtaaatttagctctttcttccatcacttcataacccagtatagtaggtgtagatggtctatcttcccaattcactgtttccggattttgttcttcagtgtctcttggtctagtagaatactcaatggaagaagct

SEQ ID NO: 63443 - DNA, 1024 bp, Homo sapiens
ccccgaaatgaccaccgtctcacccaatcaagacgtgattcatcaagtaagacccgcgcctttctggtccccaggttccttcccgctcacgccggagtcacttccgaagagagaaccgccatgaagagagaagggggtgccgcccacctctgctccgacagcctcccggagtcccagcagcaagacggcaaccacgcacccaacttctccagccacggctcatgccgccgtcgccagcggcgccgacatgacaaggcgctgcatgcccgctaggccaggtttcccctcatccccagccccggggtcgtcgcccccgcgctgccatctgagacccggtagtaccgcccatgctgcagcgggaaagagaacagagagtcctggggacaggtaccgtgcagagggcttgagaaggggccgggtcgcgggggcaagggtatgaggggagggctgcagaccgccgctcttccagttcccgccatcctccgcgagctcaggcgttggcatttcggggcctggcaaatccccgccccgcctccgcgcaggggctactgggagttggagtttgcttctctgtagttgggcagctgctcttggtctagtgaccaccagcctggacagctacggagaacccgccttaggtagaaagaaagtgatttttttcctttgcaagagtttgacccgggaccctaactgcttaatgcatatttagatcgttttctgtacgttgtcagttctactgatcctagtggtttagtaatataaaccttttctatgttgtgggtgaaattatgtaacctgtgatgagggaatcccttccacgaattactttgtagtccagcgtgcacgctagttcatacttaaaagaacttgcagatttggaatgtgacgtgttttctctttcagtaacttcgacgcctctccaagaggctaatttttttttaaagattttgtgggagctatgtaatgagatggggagtttcatctaatgacatcctctgacaataaaacatgtttaaattcccta

SEQ ID NO: 63444 - DNA, 388 bp, Homo sapiens
gcaagacaggaaaaaaagaatgacagtataaaagaccacaaaacaatcaaaaacaagtaacagattggcagcagtcagtctttacttatcaataataatattgaatatattggattaaactctccaattaaaagacatagagtggttaaatggagcataaaaacaatatccaaacatctgttgccttcaaaaaatgcacttcaccttttaaaacacatagactgaaaataaggggatagaaaaagatattctactctaataaaattaaaagaaaacaatatcttaaaaatatcatttatcataatcaagtaagatttatccccgggatgcaaggatggttcaacaaatgcaaatcaattaatatgatacaccatatcaacagaatgaa

SEQ ID NO: 63445 - DNA, 547 bp, Homo sapiens
tcttgcctcggcttcgtgagtagctgggattataggcgcccgccaccacgcctggctaattttttgtatttttagttgggacggcgtttcaccgtgttggccaggctggtctcaaattcctgatcccccgtgatgtgccccgctcggcctcccaaagtgctgggatgacaagcatgagccacctcgcccgaccatgtgtcatttttcttgtatgttacataagagcttgcattcacaagagatgggctctgtggtctgtggaatgaaatggttaaagatggagaaattgtatacactggaacagaatcaacccagaacggatagctccctcctggaaaagagacgaggtttcaccgtgttagccaggatggtgtcgatatcctgacctcctgatccacccgccatggcttcccaaagtgctggggattacaggcatggagccaccaaggcccggccaatatatttggtttctttatgaaaattatactggatctgttacagatgatagtgtcgaaccaagtgggacaaagaaagatctgaatgacaa

SEQ ID NO: 63446 - DNA, 615 bp, Homo sapiens
  misc_feature (1)...(615): n = a,t,c or g
ggcaaggggccccctgaccccttcttccaaatatacgcttttgtcttttattcctgcattcgcccgctttgttcagtccccctaggtccatgtgggttacatagtggcgccgcagaacagggacttcaaggacgtaaacgaaaaaggtctgctggagcagaggaactgaaattgagaaggtgaacggggacctcaggccgagtctgccgacagggatataaggagatggacaaaccctgtgggtgccctcaaggtgtgtgcaaccatggaatgggagactggaggaacccagggtggccaaccatgagcccggtccttctggtacgaaccatgagacagctgagcctgagtgtaaagacagacagaatgccggccagagtcacaacactgttctaatgctatgttttctgtaaaattggatggaccaccaatcagagaatgagagctacccaggctggccttacattctttcaattaatacataaacaaaaagtgggatatgcagggagccgaaagcctgtgggacannnnnnnnnnnnnnnnnnnnnnnnnnnnnnnnnnnnnnnnnnnnnnnnnnnnnnnnnnnnnnnnnnnnntggccaaacttccactgcg

SEQ ID NO: 63447 - DNA, 409 bp, Homo sapiens
gcactggatggagccttgttcagctgcctggccacattcttctgcttcaaccatgccccgctatagttcatccacatcaaaggatgcctggaaacccaagccatatctccatcagaattgtcctatgccctcgtctcgttattggtcaatgccatactcttagtattggaaggcagacacaggaagtaatcctcatcaccgtggtgccagcctctgcaggaccagggtgatcagtggcagggacttgtcaatggccaggctgtcacaggccttgctgctcaggtcctcgaggcgggaggtgaccacctgtgctgctcacggctgcagttgcggtgcagccggcccagctttagagtctgaatctcgccgggttctcatgccctggggtccccagtcacatccatccttt

SEQ ID NO: 63448 - DNA, 774 bp, Homo sapiens
  misc_feature (1)...(774): n = a,t,c or g
ctccgacttccatttcccaccctaaaccgcctacccggtgtctgttccccgcccggttgtcctcgccctgctgcgctgagtgtcccctgttagcctcgaccccatggcgctgcagacgctgcagagctcgtgggtgaccttccgcaagatcctgtctcacttccccgaggagctgagtctggctttcgtctacggctccggggtgtaccgccaggcagggcccagttcagaccagaagtcatatctgacggcagcttccagaacatgctggctcccatatccacagagcactttcctccaacacggctccctacccttccctgtgcttcccccagtgcttccagcaagtctgtttaattcacgtgtccttcaagactcagatttgtcatctctaggagaatttctccctcctgtgcccctgatctgatccctatgctgagtgcgaatgctatgctggactttgtgttcacagtagatgaccctgtcgcatggcattcaaagaacctgaagaaaaattggagtcactactctttcctaaaaggtttagggcccaagattatcacgtccattccaggattaactatgggcgctgggagtttacttacaatttcattggattcatgtgttaatgggtagggtttattcaaatatgggagtttattaggcactaggcgtttnggattgaaggatctcctcaactgggattaacttattacattgctgggacggattccaaaaacccggtgaaaattatctcagtggaacgggggtgtt

SEQ ID NO: 63449 - DNA, 1377 bp, Homo sapiens
  misc_feature (1)...(1377): n = a,t,c or g
agacagttccggtaagacacacagccggccgaatacattgggctggggctttggtcggaattctattgctcctctgccacagcaggaggcctctcgggctccagatgcctttggtttctattaaagaaacgcagcttgtatttgcactaattaaaaaccagaacggaaaaagggggcaggaacccccgaaagtctgttaggctggaaactgattcccgtagtgcctcaggtgctcatccgccacagacaggtaggtggctctcatgctgggagagtacgtaggcggaggggaggctctcccgattagtggcacgttctcgtagcgtgggttcctaccaaagagcatggcttggttcatgtactcggagacaggggcgttggagatggtctgggccgggggctgcaggctggtctgacttcccaggccactgctgtagctgcagaagctgtgaagctgtcccctcgggggactgtgagccgccatgcgccaggcttgggggttaaaggggtcatcatcatcaatgtcatcgtagtctctgtttctggtggtgaagtgcttccaggcccttggccctgcacagatcatggtggagaaggcgagggcggccaggaaggagaagaggccaaggtacagcaagccctggaggccgtcgtagcagatgccagcaagagcgtccagataatccttgtgcagccctcggcagtccaccatggcggtcagctggtgaaggctggactctgaggagttcagcaggagctggattgcaagcaggtcttcctctgcagtggagaagaggggcacggcaaactgcagcagccccgcgacctggatctgcatggtggtaagtgcgcgctggaaggtggtcagggtctgctggaaggggctgcttccactctggctgcaatacaggtagtagcgagtcacctctgtgctgatctggccctccgtgacgttcaggatgaaggtgtcaggagccacacagaagtcactggtggccactgccgcagagccatcagcggccagggatgcccaactgaggagcaggctcagtgccccacagcacagcatcgaggccaggagacacttggagcgcttggccagtcccaggcaggcaatgaggcagatgaccaggtccaggataaagagcaggaggtaggagagccacctgtagtactccacgtagccagtctggtcggatagcttggtcagctccatggtgacctccctccacacgggcagtcctgagagctgaacaacaacgctgcccgccatctgctgtatgaacttcagggtctgcaggtaatcgccccgggcagcaaagatctcactgagccgggccaggacgaaatcgtcgacccgggaatttnnnccggtac

SEQ ID NO: 63450 - DNA, 1138 bp, Homo sapiens
cgcctagcttggcaagagggagatggaccctgggctcggcgtcctccggaaaactgcactgtgaggcggggcgatggggaagggccgaagccccgccagcccagctaaagcagacggctcgcactgcgacccgaagcgcgagtcatggctggggccttagtggcaacaagtgctgagatcagcgggctcagtagcaggaacacaagcacccccttgcggtgtctggaggaagcggcgcggacagtctcccgctccaccgtgtcgggcctgaagaggccgctgaacgctcgcgattactgaggcatctggtaggatcgcaaggccatcaacctacaggtgaagctcgaggcgctgtggcgctttgaagccggagagaagctcagtagaatcgggaaggcgctggggctgtccaactccaccttggccaccattcgtgacaacaaggaaaagatctgggcgagttcccaggaggccacactgcaggcggccaccaagttgacgcgtggccgcagcctggtgatggagaacatggagcagctgctgagcatgcggatggaggaccagagccagcgcaacatgcccctcagtgtggtgctcattcgggagaaagcccacagcccgttcgagaaccgcaagcaggagcagggcgagggcgcctagcccgagagcttcggggccggtcgagggtgattcgctggctttaaggcgcgccacagcttgagcagcatcggggccagcggcccaagaacgcagcgtgcaagaatccagcgttaatgcgcagggtgatcccggagggcggctacacactctggctggtgttcaccatgaataagctctggctggtgttcaccatgaataagcccaggttcctctgtaagcgcctgccgagaggacgttcattttcctgtggaagatgagtcggcccctgggtcaaagccgccggagacctcctgaccctattgctcggtggcaacgcagccggcgacttcaagctgaaggccctgctggggtacccctcggagaacccgtgtttcctcaagggctccttcaagcccaacctgcccttggtgtggtgctcgcacaagaaagcctgggtacagcctgggtgacagagcgagactccgtctcaaaaaaaaaa

SEQ ID NO: 63451 - DNA, 1768 bp, Homo sapiens
  misc_feature (1)...(1768): n = a,t,c or g
ttttttttttttacaacttttttaatatatatttttataaacaggtcacgtgataaaatagcacaagaaacccttaccaaatataaggttatatcttccgcatatacaggagaatgaggtcgttatgtacaataagaaaatgattttaggggttggttggttttgttttcctctctccccttaatttttcctcctacagtcgttggaaatatcacagcttcagttgcattaatactttgggcaaatggacagctgcccctccccactaggggttgtggggaggaggggctggagaaactggctcctgaccactcagccctggagcttcctggggctggcactccagggacaggaaaatctttgggctgttgatctgtttctgattcaacagcatctctctctctctttctctctctctctcactctctttctctctctcactctctggctctctggaaactggttactctcttccaaccagatagggagtgtcccaagattgggtgtgggcgcggtatctcctggggctcaaggttgggatgggaaggggtcccagccccctcctcagcaacagctgagatttgccagcatcccccaggacttccaaatgtctcgggccgacagagcacggtcagagcccatttgggcagacagaagtttgggaagctggggaggggtgaagtgggggtgggggggcaggctagaaaggagccctccctcctcggggtgtctagggtgtgctggccactggaagattggagtcgctgacccagtgctgaccctgacccttggctgggtccactctgcagactccacctgaggagacccacccagggtgaagctcggtgcccaggcctgaactgagcccggccgggtgcaagggctgaggtgtgaggtcggcccaggcctcttcccaggcctgagggtggctacagctcgaggcttgcaaggtgcctgcgccacccctgggttgaggccgaccggagtcagctgggatcacgttaatgactccaagcgatcgccagcccttccgccctctccctgcccaattctctcagcctggccagggaccaaggccgggttttggggcggacaggggactgccccacacagcggcaaggaggaggagaggccgcgtgggtcaggctggatgggtgaggaggtgcgggtggggcctgggctctcggcggcgggccatggctttggcggtggcctgtttcccctgacacccctcggagggctccaggtatggtgcggtggaagatgcaggaagcccgtggggctcttctgggcccgtgtcctgggggacccagccccctcaatcccactgggccctgcccgggatgggggggacagtgggaagacagagcgggtgtggcggggaaggcggtaagggcacagtctggagagctcaaagcccccccaaggaccgagccccgccccccaagcgggagggcgagcgagtgatggcggcggctgtggctgtgggcgtggcggaaggcggcgtgcagtgcgggcacgaggggcatgcacaaagtccccgagtgtgcgtgcgtgcgtggggcgggcccacccgccgcccccctgcccggggcggtgctgggagggcggagggaccgaaggtcggggaggggctttccctcggctcgccccgcctcccgcgcttggcgccggcgannnnnnntnnnnnacnncangcnnnnaaanaagggtgggcgggccccgcgcccccgcccaggcatggccgggttccgtgaccggtgtggtg

SEQ ID NO: 63452 - DNA, 1263 bp, Homo sapiens
ccgggtcgacgatttcgtgcgggagacggcggtcgaaaaaacccggcggcctgaagcttgtgctttctttgacgcaagggctcgagacgcagccgccgtcggccgagcgcccggctagaagcgacaccagacggagcctccggagttcctccgcccccacctcgccgggtcctggagccgcagtcctcccagctgccctcctcgtggccatggagtgtccacacctgagctccagcgtctgcattgctccggactcagccaagttccccaacggctccccgtcgtcctggtgctgcagcgtgtgccggtccaacaaaagcccttgggtctgtttgacttgttcaagtgtccactgtggaaggtatgtgaatggccatgcaaaaaaacattatgaagatgcacaagtacctttaaccaaccataagaaatcagaaaagcaagataaagttcagcacacagtatgtatggattgcagtagctacagtacatactgttatcgctgtgatgattttgtggttaatgacaccaagctgggactggtacagaaagtcagagaacacttacagaacttggaaaactcagctttcacagctgacaggcataagaaaagaaaacttttggaaaactcaacactaaacagcaagttattaaaagtaaatggaagcaccactgccatttgtgccacaggccttcggaatttggggaacacatgtttcatgaatgccatccttcagtcactcagtaacattgagcagttttgctgttatttcaaagaactgcccgccgtggagttaaggaatgggaaaacagcaggaaggcggacataccacaccaggagccaaggggataacaatgtgtctttggtagaagagtttagaaagacactctgtgctttatggcaaggcagccagactgcatttagcccagagtccttattttatgttgtttggaagattatgccaaactttaggggctatcaacagcaggacgcccatgaattcatgcgctaccttttggaccacctacacttggaacttcagggcggtttcaacggtgtttcccgctcagcaattctgcaggagaattctactctgtctgcaagtaacaagtgttgcatgtaagatttagttgccttctgttttttaggagggcctcagacatttcttttggtgttaattatgtgttagatttataacggaaggtagaggggtttcttggacatttgctggaactcttcgtgcccttgaactttgtgacccagtt

SEQ ID NO: 63453 - DNA, 841 bp, Homo sapiens
ttttttttttttcttcttctgcctttgttttttcttttcctcctgagtgtgtgcgtctatgtgttttgtctttttggccgggctgggagtcggcaggggtgttcttgttcactctaattttccaccgaaaacgtgggccgggggccggctgtgctgccccctgggattcctgggacgatggagaaggggcgagggaagaagacctttgctatcccagataccaggactgtgcctgataaatgcccgcaggatcccttggtcctaatcccacaaaggaacggtttgcaggggacgtgtcgggcggagagtaggcggtccaggttgctggctggctgggtcgcaggccagcgagacaagatctttgagcgggtcctgggggttgagatgaggtgggtagcggatggccgtgtgggggaagtaggtggaggccgtctggggtaggatggacgtcgtagggaaatgcagagcggaggacgggtgtgggctccgggcgatcccgctgtgcacggcgatgacgggccggtggtgctgggtgaagctggagaggcggggagagtcctggggggacgggctgttgaatggtgacttgtccatctctgtcttcttcaccggggacgagatgcctccttccatgtcctccgtccagttgcggctgctactcgtgggcgagctgggcgaagtgtagtaatcgccgccagggctcgtgtccacgtcttcctccatcgagcccgatttgtgccgcttgctcccactggaggaggtgctgggcagcgttcttctgaggccagtgctggctgggttcaggtcgtatgccaggtgcccctgcagctcccctcgtgcc

SEQ ID NO: 63454 - DNA, 6592 bp, Homo sapiens
ttttttttttcccttaccaataacataactttatgttctatgacaatgacatttatttaacaccgttatttccacattggtacaaaatcccttaggatccccttttattcaattgcccaatttctcacaacaaataccttacaaaacacttctataatacaattattttacaacatttccaaatgagaagattgatatattgcccccactactgctattcacacacagtacttcccacgggcacaatacatccattaggagatctaaaaatgctcaccctgtactctaggctgcttaggaaatgtgaaaactagtaacatttataatggcattagctcctttcaatacaagacaacattttagaaaccttgaacttcaactcgcaacaccaaaagggctcaacagtcctgctttccccattgcactttatgaaacaggttgcagggactaggaaaagggccacattattaaaattactaactgtacagaaattgatttaaaaaagtcacagctcaaaattgctctttgtaaaagtcacacacatttccaagtatcaagtcgcagtcctgcttgtttacttggattttcttcgcttggattgcaccgcactggttatgtctttagtagagctggaggctgaagcaggtcgagaagatcgtttacgatgtccattttccacactttcagaggccacagttggctcttcagttcgggagtttcttcggcctgggattttggacttttcaactatctctttgggctcactgctttgtccagagactatggcagcatttacctccagctctggtctggcaacagaggcctgcagtgctgtggttgaagtttcctttgagactaaattctgcgacggggctatgctgggtagaagttctggatgggatcccaccttctcctccactaggccacccgcaagtgactcagatgctatgccaccatgattgctttttgtggtcggtacggcggagatgagctcggagggtaccagagtggttactatcgagcgtacactggtggggagagcaccgccaggtaagctgggtcctgctgaggcagtgcccgggcccacagggctagaggtcatttttagcagagtgggtgctgggggcgttggggttttactgtccagctctgtggataactgctctgttcccatgagccccggagctgtggtgtctagcccttggccttcagtctctccatctgcaccatattgttcttcccctttctcaagagagcctgtaactttcttacatgccttggtcaacaaaatttggccaattttgtccacttttcctttgcccttactagacgagactgggcttcgccggttgccagaggaccctggactattggtcaaaaggggagaaaccattgtggttgactgtgaagagggaagagtgttctgatctgctgaggtgttcacctgagggctagcctcatctggattcaattctttcacttgctgcacagggggatgagaagggacaactggagaagacgtacaaggaggggaaggaagctgaacaggggtggctcgtgagctaaggaccaaaggtcgacctgtctggatgtttggagcaggactactggagagggcattaggcggtacaggagcagaagaaaattttatgttctgaggtatgtgtaaagggccaacaactgcaacagagggaggcatcaggccagagttggttgtcagtggggctgcaggaattgtgcttggctgtgatcctttcataacctgaattattgaggatgaattgataaagacaggtgtaatgaactgaggccgggcattagactgagcagctgactgtccctcagaaaccataaccttgctacccgcattgggcattgtgacaactgttgacatcaatgcagactgcaagtgagttggcaaagctgctgatgtgttagctgaagttgtgatgggattggaagtgacaaatacagttatttgatttgggggcaagggagtggaaatggaggaagagctaacaggtcttgacattactggagggatgcttggtgcaacgttagaactgacctcactcaattcgggatgcacaagggatgaacacagctcattactgtgaggtaagtttagggaattagaaggttctttagaagaagacagatcctgcagtgtgggaatgacagatgcttttttgaggtcctccccagaaactactggaggtgttacttccagatctgtaagcccagggggtttaattgtcacattgggagctccagagttgtcaagaagttgacttaacgatgttggtgcttccctcatagcaggagacaccaaatttttgttctcttcgacactgggaagtttgttaggatccgaaggctgcccatcctttttggactgatcttcagggacaaccattttaacttcttgggcagggactgcttttagttcaatgtttacctgttccttcctactctgggaattctggcaatcactgtcctgaggcacattcaagctctccttgttatcctcaacaacacccccaactgcagccacagacacagtagaattctgaggattcagcccactgttgttaggaaagctcccaggtacagggggattggccagaggagtgggactgaccaatacatttctcggcaactccacattctgcaatagggctgcatttgtctgagaggccagagtaagtttaggggcttttgaattttgcctcccagggcttggagtggttttcctactggacccaggactagacctgcgactgttgcttggacttgcccgttttgttgctccagaattagactgctttccagaattcactaccacagaatctaatttgtgagtttgtggggtagcaaaattggaaggattcatggtaagatttgaaggtgcttgcccgatggccttcaaagttgttggatttaggccttgttgatcaaagcccctgtttaaatttggcctaggaggtaaaggaatattaatctgtggagggaagagtcctgctatggaggcattgagtctttctggtgacagactgatttctgaaggttctgtgctgggagggcggttgttgggtgtctgaggataatagggtctggggctggctctgtttggtgttttgggcctagatgtctgggttggcgcagccacatttgggaagtggtggccgtgagagctgggcagggaatttacagggggttgctggggagttgcaccttgagttgctgaaaggggcgatggtccaggttttggccctgtcatcattaactgattctggggaagtactacatgtgaaggcatgttgtttgggcctcctgggacagatggtgcttcactgccacttgcttcagggagtgaggccatctccgccagtggcgagctggaaggattctgcgggctctcctgatagaccattttccttgaattgcttcccaagggagtattcacaggcattggcattctttgtttatcaggtgatggtggcacggaggcaggtccttgcagactgaccatgacaggcacactgccactctgttgcatgggcattctctgggagtcggggttcagggggccccttggaggatggacattttgagagactggaagcctaactgatttgggatcctgctgcatcatgagcatcatcatcatttgttgctgctgctgctgctgctgctgagactgtggctgactgggaggtggtggctgctgctgctgaggcagttgtggctgtggctgctgctgtggtggctgtggtgggggtgccacatgctgcatgagttgaggaggcatctgctgaagtggcctctgttcaactggttgagaaggataacctggtggccggtttgaaaattctggcagtttagggcctgagttatccaagctaattccttgttctccaggcaacggtggctgatcagcctcttccagaccagctgggcgagtatctggggtgtttagatcttgctgactatttttcttcttccgagggggtttcttcttcttcggtttatttgcgttggtattattttgcttattgtttaccccaaaatggcctgcagatatgtcactctgcaataagttgaccaacaatgggctcgttagcgtgacatccttattgactgggaagcctggattttgaccacaggacatctgatttccattgggagctccactgaaaggtgcattgaaagacatcccatggcctgagaagtggtttcccgaggcactgtttccctgcatggcctgcacatgaggggggaccatgttggtttgttgaatgctaacatcaggcatcatctgagataaactgacatcgttatttgctgtagtagcaggatcaccatgctgctgggccatgtgtgggctgggccctggtggccgcaggacctgtccctgaatgcccataacctgagatggactgttgttcacaggcccttgctggggcagcatctgtcctgacatctgtcccgtaaactgcaccatatttccttgcatgttcggagttggtcccctcattatctgggctggtcccggcatgacattggactggttctgagtgttaaactgctgcttattcccctgcatttgattggtcataatctgctctatcattgggttctgttggagcaaaacctgcccctgaggccccatcatctggttatgtggcgccatcatttgtgggccctgctgggaaagcatctgcttgggtggggtcatcctttggggcgagggcccaagattttggctcggggggttcaccatcatctggccctgtggcataagctgggcccttgaaaggatcatagggttctgagggttcaaggttccttgttgctggaccatctggccctgggagggcacgatttgctggtgcatgcccatcagctgagatggtgggccctgctggggctggccttgcatgttgctgaggttcacttgaggaaccccagaagtaccagcctgctgattgttcatgttgccatgaattcccatgaggctgggctgcatcatatttggcggcccgtgggacacctgcatctggttttgaggaggaccagctccttgaccacctgcatgctggacattttgatttgcttgcagctgaggggctcctgaattcccaggggtggttgctgtggtcgaaggcacctgaccttgcataaagttcggattggcctgtcctgctgagaagccaggtgggaggcgtttaggcattcctcctaggcctggatgtaaactctgtggcccctggtttggtggttgctgctgcatcaccatgaagttaggtggcacatttccctgttgaaccataggattccgacccggagagctgacaggctgctgaaatccctggggaagtgggttattttgaggtggccttggtcccatctgctgctgagtttggttaaccgttggggaggatgcaggggatccctgctggaaggaggagggtgaggaggcaggagacttgttggtgaggtggggctgctgcaagggagttgggaccctagagggccctccctgcaaactcttcatctgaggagctgtgaactggcctgggttgctcatctgaggaaagtttgtgtgggcttgtgaggcttgctggctgccaaagggatatggagggggagggtgggaaggcgtctgtaccgtggctaaggatggtcttgcctggagttgctgttgcattgggccgggcaagggagccttcttccacccttggtttgcagtcattgtgcccagagaaccctgggctggaggaggttgaagggctccagaaggcagctggttccagcctggaggaacaggcacctgagttggggcagtaaactggggtcgaattccctgtggctgttgctgctgatgttgctgtgggggtcttgcctgcaactgttgttgctgctgttgctgttgttgctgctgctgctgctgctgctgctgttgttgttgttgctgctgctgctgcagctggggaaaattagctgggttcatttgtctgttcacagagacaggctgcattgggtgatgtgggggagctaaagatcctgagggatgactttgctgctgtatatggagcccagagaggagtggatccattgcatctgactgagaagcagggcgaggagtcctgggctgcagctctggattggggcctggtgccatcatggaagatgacacatttccacccgggggtatcataacagtggcagggttgttcatccttattattcctggaccacttgccataggaaatcccgcctccatcctaactgaatttccagctcccatgggtccattcattctcacatcttggcttcggttctgagccaaagccaggttaatagcaccttccccttcaatctgaacggagagaatccctaaatcccgaagctgctggttgttgctctgagcaaggatccgtagccgctccgctgcttcccgggggatgttgaatgtcacacgcacgctgttccagggctccaccttctgtacttttagcttgctggactccatgtgtaacaaattgggcacgtttttcaatattgcatctaatttccatttgaagtcttt

SEQ ID NO: 63455 - DNA, 1766 bp, Homo sapiens
cccacgcgtccggcagaaaaccctcgtggatgtgactttggaaaacagcaacattaaggatcaaatcagaaatctgcagcagacgtatgaagcatccatggacaagctgagggaaaagcagaggcagttggaggtagcgcaagttgaaaaccagctgctaaaaatgaaggtggaatcgtcccaagaagccaatgctgaggtgatgcgagagatgaccaagaagctgtacagccagtatgaggagaagctgcaggaagaacagaggaagcacagtgctgagaaggaggctcttttggaagaaaccaatagttttctgaaagcgattgaagaagccaataaaaagatgcaagcagcagagatcagcctagaggagaaagaccagaggatcggggagctggacaggctgattgagcgcatggaaaaggaacgtcatcaactgcaacttcaactcctagaacatgaaacagaaatgtctggggagttaactgattctgacaaggaaaggtatcagcagttggaggaggcatcagccagcctccgtgagcggatcagacacctaaatgacatggtgcattgccagcagaagaaagtcaagcagatggtcgaggagattgaatcattaaagaaaaagttgcaacagaaacagctcttaatactgcagcttttagaaaagatatctttcttagaaggagagaataatgaactacaaagcaggttggactatttaacagaaacccaggccaagaccgaagtggaaaccagagagataggagtgggctgtgatcttctacccagccaaacaggcaggactcgtgaaattgtgatgccttctaggaactacaccccatacacaagagtcctggagttaaccatgaagaaaactctgacttaggcactcagaggcatacactttttacagatggacaaaagctctggaaccctgtggcttcaaatcctttgggaagggtgactgttgtttcccctacacacagtgtaagccggaatgggaatcgctgaggctctgatccacttctaagacaggaaggaaagtgaaggcagagtgagcaggtaagagagggatatacaaggtcacatttcagacacccactcggcataccctgccgtactgcatcatcatttgttttctttgtagacactgaaatcctatcaggaggattccttcacaatgtattttatttgctagactttggttgggagggaaaaggacattaatttgaagtttcatgttattcatgccaggattgtttgatagagcatgaaggttttgtttacccataaaagtattagaggcagcgtttctctgatacagagaggcctgtccacaagaagcatgggcacccagccaaacttgaacctggaagggagggttcccggcctgcaggtgctctttcctcttggtcccaagcatctgtgcagggtcgtgggagccacactgagagacttgtgtgggccagacaagcttcattctgatgcgctagtcccttggtttaatttgtgccttatgctttcattggaccagctgaaatcactgtatttattcaacttgtgatttttttttctttctcactttaacttaaagagaattttatatgtcttggaaatttaataatttagtgttctcagtatcaattggtgtttttgttaaacgaatgaatcatctgttcatgcatgctctactttgatattataacctatgtcacatgtgtttaataaataccatatattttgttctactaaaaaaaaaa

SEQ ID NO: 63456 - DNA, 1455 bp, Homo sapiens
tcatggccctgtggggcatcagttacaatgctgtgtccctcatcaacctggtctcggcggtgggcatgtctgtggagtttgtgtcccacattacccgctcctttgccatcagcaccaagcccacctggctggagagggccaaagaggccaccatctctatgggaagtgcggtgtttgcaggtgtggccatgaccaacctgcctggcatccttgtcctgggcctcgccaaggcccagctcattcagatcttcttcttccgcctcaacctcctgatcactctgctgggcctgctgcatggcttggtcttcctgcccgtcatcctcagctacgtggggcctgacgttaacccggctctggcactggagcagaagcgggctgaggaggcggtggcagcagtcatggtggcctcttgcccaaatcacccctcccgagtctccacagctgacaacatctatgtcaaccacagctttgaaggttctatcaaaggtgctggtgccatcagcaacttcttgcccaacaatgggcggcagttctgatacagccagaggccctgtctaggctctatggccctgaaccaaagggttatggggatcttccttgtgactgccccttgacacacgccctcctcaaatcctaggggaggccattcccatgagactgcctgtcactggaggatggcctgctcttgaggtatccaggcagcaccactgatggctcctctgctcccatagtgggtccccagtttccaagtcacctaggccttgggcagtgcctcctcctgggcctgggtctggaagttggcaggaacagacacactccatgtttgtcccacactcactcactttcctaggagcccacttctcatccaacttttcccttctcagttcctctctcgaaagtcttaattctgtgtcagtaagtctttaacacgtagcagtgtccctgagaacacagacaatgaccactaccctgggtgtgatatcacaggaggccagagagaggcaaaggctcaggccaagagccaacgctgtgggaggccggtcggcagccactccctccagggcgcacctgcaggtctgccatccacggccttttctggcaagagaagggcccaggaaggatgctctcataaggcccaggaaggatgctctcataagcaccttggtcatggattagcccctcctggaaaatggtgttgggtttggtctccagctccaatacttattaaggctgttgctgccagtcaaggccacccaggagtctgaaggctgggagctcttggggctgggctggtcctcccatcttcacctcgggcctggatcccaggcctcaaaccagcccaacccgagcttttggacagctctccagaagcatgaactgcagtggagatgaagatcctggctctgtgctgtgcacataggtgtttaataaacatttgttggcagaaaaaaaaaa

SEQ ID NO: 63457 - DNA, 1784 bp, Homo sapiens
cggcacgagctgaccacagaagcttatgaatgggagccacgtgttgtgagtacagaggtggtcagagcccaagaagaatgggaagctgtggacaccatccagccagagacagggagccaagctagctcagagcagcctgggcagctaatctccttcagtgaggccctgcagcacttccagactgtggacctttcccccttcaagaaaagaatccagccaactattcgaaggactgggctcgccgccctccgacactacctcttcgggcctccaaagctccaccagcgccttcgggaagaaagggacttggtcctgaccattgctcagtgtggcctggatagccaagacccagtgcatggccgagtcctccagaccatctataagaagctgaccggctccaagtttgactgtgcccttcatggaaaccactgggaggacctgggctttcagggagcgaatccagccacagacctgagaggcgcaggcttccttgccctcctgcatctgctctacctggtgatggactcaaagaccttgccgatggcgcaggagattttccgcctgtctcgtcaccacatccagcaattccctttctgtttgatgtccgtgaacatcacccacattgccatccaggccttgagagaggagtgtctctccagagagtgtaatcggcagcagaaggtcatccccgtggtgaacagcttctatgccgccacattcctccacctcgcacatgtctggaggacacagcggaagaccatctcagactcgggctttgtcctcaaagagttggaagtattggccaagaagagcccacggcggctgctcaagaccctggagctgtacttggccagggtgtcaaagggacaggcctccttgttgggagcacagaagtgctatgggccagaagcccctcccttcaaggatctcaccttcacaggtgagagtgacctgcagtctcactcatccgaaggcgtatggctgatctgacctccgagatgaatggaggcttaaaggctgagctgcaggggctttcagggggtcagtggagccatgtcaggagcctggccaggccgcaccccttgctgtctcagcagatgggatataggaagctcctgggcttagctgtgggaagccaagtaccctcaccggcatgggacatgaggggcagctagacttcacccccttcccgcagacctgcctccagagcaaggagaattctgccttaatctgttgggctccagtctccgggttgaattccagtgtatcccactgggagtgaatggatcatgaggtgggatggccccatctggatgttctgcagatccccacatgggaggagattcccaagtagaggcagccagaattctgactccctggcagcagcagggctttcaggcaccagtgtctgtgttgttagaactcagaggaagaggcaggggcagcagccgacagggggcagcatgacccaagcaaggggcctgaggcctcagtgggggtagggcaaggaggtacctcacaggtgggtgtgaggccccctctggagtttctggccattcacttacccactctcttctccccctgacccccgctccattgtttatgatggaaaaacggacatttggctaggtgtctctcacggctgctccatcctagcccccacaagctggggcttcctcctgtagatgctgtgcatgccccatgatgagtttctggcctaattgagggaaggaggaaattcataccagcagttttcaaataaaagaattgttctaaaaaaaaaa

SEQ ID NO: 63458 - DNA, 6252 bp, Homo sapiens
tacggctgcgagaagacgacagaagggcgtattcctctcaaaaacatatatcgcttgttttcagcagatcggaagcgagttgaaactgctttagaggcttgtagtcttccatcttcaaggaatgattcaatacctcaagaagatttcactccagaagtgtacagagttttcctcaacaacctttgccctcgacctgaaattgataacatcttttcagaatttggtgcaaaaagcaaaccatatcttaccgttgatcagatgatggattttatcaaccttaagcagcgagatcctcggcttaatgaaatactttatccacctctaaaacaagagcaagtccaagtattgattgagaagtatgaacccaacaacagcctcgccagaaaaggacaaatatcagtggatgggttcatgcgctatctgagtggagaagaaaacggagtcgtttcacctgagaaactggatttgaatgaagacatgtctcagcccctttctcactatttcattaattcctcgcacaacacctacctcacagctggccaactggctggaaactcctctgttgagatgtatcgccaagtgctcctgtctggttgtcgctgtgtggagctggactgctggaagggacggactgcagaagaggaacctgtcatcacccatggcttcaccatgacaactgaaatatctttcaaggaagtgatagaagcaattgcggagtgtgcatttaagacttcaccttttccaattctcctttcgtttgagaaccatgtggattccccaaagcagcaagccaagatggcggagtactgccgactgatctttggggatgcccttctcatggagcccctggaaaaatatccactggaatctggagttcctcttccaagccctatggatttaatgtataaaattttggtgaaaaataagaagaaatcacacaagtcatcagaaggaagcggcaaaaagaagctctcagaacaagcctccaacacctacagtgactcctccagcatgttcgagccctcatccccaggagccggagaagctgatacggaaagtgacgacgacgatgatgatgatgactgtaaaaaatcttcaatggatgaggggactgctggaagtgaggctatggccacagaagaaatgtctaatctggtgaactatattcagccagtcaagtttgagtcatttgaaatttcaaaaaaaagaaataaaagttttgaaatgtcttccttcgtggaaaccaaaggacttgaacaactcaccaagtctccagtggaatttgtagaatataacaaaatgcagcttagcaggatatatccaaaaggaacacgtgtggattcatccaactatatgcctcagctcttctggaatgcaggttgtcagatggtggcacttaatttccagacaatggacctggctatgcaaataaatatggggatgtatgaatacaacgggaagagtggctacagattgaagccagagttcatgaggaggcctgacaagcattttgatccatttactgaaggcatcgtagatgggatagtggcaaacactttgtctgttaagattatttcaggtcagtttctttctgataagaaagttgggacttacgtggaagtagatatgtttggtttgcctgtggatacaaggaggaaggcatttaagaccaaaacatcccaaggaaatgctgtgaatcctgtctgggaagaagaacctattgtgttcaaaaaggttgttcttcctactctggcctgtttgagaatagcagtttatgaagaaggaggtaaattcattggccaccgtatcttgccagtgcaagccattcggccaggctatcactatatctgtctaaggaatgaaaggaaccagcctctgacgctgcctgctgtctttgtctacatagaagtgaaagactatgtgccagacacatatgcagatgtcatcgaagctttatcaaacccaatccgatatgtgaacctgatggaacagagagctaagcaattggctgctttgacactggaagatgaagaagaagtaaagaaagaggctgatcctggagaaacaccatcagaggctccaagtgaagcgagaacgactccagcagaaaatggggtgaatcacactacaaccctgacacccaagccaccctcccaggctctccacagccagccagctccaggttctgtaaaggcacctgccaaaacagaagatcttattcagagtgtcttaacagaagtggaagcacagaccatcgaagaactaaagcaacagaaatcgtttgtgaaacttcaaaagaaacactacaaagaaatgaaagacctggttaagagacaccacaagaaaaccactgaccttatcaaagaacacactaccaagtataatgaaattcagaatgactacttgagaaggagagccgctttggaaaagtccgccaaaaaggacagtaagaaaaagtcggaacccagcagccctgatcatggttcatcaacgattgagcaagacctcgctgctctggatgctgaaatgacccaaaagttaatagacttgaaggacaaacaacagcagcagctgcttaatcttcggcaagaacagtattatagtgaaaaataccagaagcgagaacatattaaactgcttattcaaaagttgacggatgtcgcagaagagtgtcagaacaatcagttaaagaagctcaaagaaatctgtgagaaggaaaagaaagaattaaagaagaaaatggataaaaagaggcaggagaagataacagaagctaaatccaaagacaaaagtcagatggaagaggagaagacagagatgatccggtcatatatccaggaagtggtgcagtatatcaagaggctagaagaagcgcaaagtaaacggcaagaaaaactcgtagagaaacacaaggaaatacgtcagcagatcctggatgaaaagcccaagctgcaggtggagctggagcaagaataccaagacaaattcaaaagactgcccctcgagattttggaattcgtgcaggaagccatgaaaggaaagatcagtgaagacagcaatcacggttctgcccctctctccctgtcctcagaccctggaaaagtgaaccacaagactccctccagtgaggagctgggaggagacatcccaggaaaagaatttgatactcctctgtgaatgctcctgccaggccttcagaaattgcatggccactccagcgtcatcggactctctcttattacaaagatcactgcccaggaccatcttcccgagaagcatcccttagcctaaaatccacaccaaagggagagttccagaggaatccatgaagaattcccatgcccaggctccatgtgtcatgtggaaacctccacaggtctgctagtgaagaatgcatgtatgtgagatttttgttttctttccaatagcaaatttcaaaggcaagcaacttgcaggctccatgggaactttttaatgaaggacagtgtcttcttttgaaggaaaatcaagctcgtgtttttattcgaagctctggtgtaaaatatttcaaagtcatagaaatagtttgagaaatgcatagcattatttaacactattgaacagccgactttgagcattgtttcttctaactgcccctcaactaccattatcttcaagtcaacatgcatattacattttcatcctttgctttgcaagcactggtggcttgcagtttgctaatttatttatcatagagtcatcaatgtatttgttgctgacatggttttattagatactgtagtgattcaaataagttttctatttgaaaaaaaaaatcacttgattgtatccttgcccagtgaagccatcctaagacttagcaatatggattgtacatttggctgcatgagcaagtcggccgcacacttccagacagtgtgctgtttgaattgactatttgcactcaaagtctgggtattcattggttattggcctgaaatgatcaaataactacaaatgatctgttgaataaaaatagttgagctgatatatgttaagcagatattcaatcagaatgaacaggttccggtggttattttgccgtttgacattttttatggttcatttatttttaatatagagaggaagattgaatatttatctagagaatacaaagacccacatgtaaatgataggtattatctccatgtatatatgtacccacttagtcatgtaagtgcatatacacatacacacacatgagtgtagacatgtgtttattaattgacaatgacccaaatctcttccacaagacttaaaaccaaattcagggacaaatggatagagaagaaaagggtcaaacatcgagattacatggatgttaaattatatggagacgcctaagaaataattggatggagcccttgatgccaaacccgaagtagatttagaaccttatatgaatttgatttatattttgccaagatcaaaaattagatgttaagtatccagattttaagcttgttttaatggtcaaaaaattaggacagaaataatatggacatttattagtatcttccataatttttaagtctgacacatttctattttattctaacataaaaaaacttccattatatatttactaagtatatttaattcacttaactctgtctttataagttcctattttagatggaataagagaaacaaattatatcaaggtaaaactgatcaaaagacataattgaaagttctgaaaaaagaaaaataataatatgtagaaaaatgtaacttagagagtaacacatgaacattgaagttaaaacccagaagccagatgctcacagttttattttactttaaaataaacctgtctgactgtagctttgcgaaatatcttaaaacgcaaaaaccagttgtgtcctgaaaattgtttcaagaatttaatatttttatgaaaattattttatttaactttaagcaataactagagattacaattaaattttaatcaaaatgaaggcttagttcaaacataaggaaacagtgtttgattaaaaaaaacacatctagtaagacgtaaggggaaaatcacatcctctttggagatgattatattttgatctgaagggtttggggtgttcattagacacttaataaaacttaacttccaatgaaaaagaaatcttttgtaaatcattctacttttgcactttgaaagaaaggcgttaatcataaagaagcaagaatggtcaaaatcgaatgctgcatttttataaacaaaattacagactgtctgaaattgaagaagaatgaactaataatagcattcataaccaaacacaatgatgattattgcagaacattgtatcacattttagtccagagatagaataaagttgaataaccttgacttacacaaaactgttttggtagttggatttcattatcttagtgaatttagtcattttacaatatgtttgtatttggccatttactgtaatcacatttttatatctgtacaatgacactttttgcagttgtggggtagtgtgtaacactgtccatcttgcatcattgaaactactacaatgatactatcatttaataatattaatattacttgaaatagactaagataaagaaaaggggtctgtatgatgtgcagttttgtgcctttatgtatttgccttgttctttgtcgaatgtgtgaaattctgtactggggtttttcctataatagaaagtagagctgtgtattaaattagactgtgtctctctgatacctttacactactgagaatagcatggttttggccatgtaaaccaattttcaaagttctaatgacatagccatgtgtttttggttttttatatttcattttaaaatttgagtatcaccatacattaattaatactcctgtagtagataagctgtcattaagtaattcccaaaaaaagggccatttgcttgcattactttgaatttaatgttgcgcttgtgcactgtgttaatattgtttgtgatggattggacgttgtgactcttgccttttaagaagaaaaaaaagataggacaaagtatttgaagctcttaaaatgtacatattttggttcttctatctcaaattatttaaaatgcataattcacatttttgtaataattctatgcaattttgtggcatgatgtttcttccacttgtaattttatgtgctttcatcacaaatccaaaggaaagaataaaaatttcttaacacaacccagcggtt

SEQ ID NO: 63459 - DNA, 2168 bp, Homo sapiens
tttcgtggccgcgcgagccaccacaggaggaggaggaggaggagcggacgtcggcttctccccgcgggagcccccagcatgggaaattaaaagagagacggaattcaaggatgacagtttgcccatcaaacgggaaaggcatgggaatgtagcaagtcttgtacaacgaataagcacctatggacttccagctggaggaattcagccacatccacaaaccaaaaacattaagaagaagaccaagaagcgtcagtgtaaagttctttttgagtacattccacaaaatgaggatgaactggagctgaaagtgggagatattattgatattaatgaagaggtagaagaaggctggtggagtggaaccctgaataacaagttgggactgtttccctcaaattttgtgaaagaattagaggtaacagatgatggtgaaactcatgaagcccaggacgattcagaaactgttttggctgggcctacttcacctataccttctctgggaaatgtgagtgaaactgcatctggatcagttacacagccaaagaaaattcgaggaattggatttggagacatttttaaagaaggctctgtgaaacttcggacaagaacatccagtagtgaaacagaagagaaaaaaccagaaaagcccttaatcctacagtcactgggacccaaaactcagagtgtggagataacaaaaacagataccgaaggtaaaattaaagctaaagaatattgtagaacattatttgcctatgaaggtactaatgaagatgaacttacttttaaagagggggagataatccatttgataagtaaggagactggagaagctggctggtggaggggcgaacttaatggtaaagaaggagtatttccagacaattttgctgtccagataaatgaacttgataaagactttccaaaaccaaagaaaccaccacctcctgctaaggctccagctccaaagcctgaactgatagctgcagagaagaaatatttttctttaaagcctgaagaaaaggatgaaaaatcaacactggaacagaaaccttctaaaccagcagctccacaagtcccacccaagaaacctactccacctaccaaagccagtaatttattgagatcttctggaacagtgtacccaaagcgacctgaaaaaccagttcctccaccacctcctatagccaagattaatggggaagtttctagcatttcatcaaaatttgaaactgagccagtatcaaaactaaagctagattctgaacagctgccccttagaccaaaatcagtagactttgattcacttacagtaaggacctccaaagaaacagatgttgtaaattttgatgacatagcttcctcagaaaacttgcttcatctcactgcaaatagaccaaagatgcctggaagaaggttgccgggccgtttcaatggtggacattctccaactcacagccccgaaaaaatcttgaagttaccaaaagaagaagacagtgccaacctgaagccatctgaattaaaaaaagatacatgctactctccaaagccatctgtgtacctttcaacaccttccagtgcttctaaagcaaatacaactgctttcctgactccattagaaatcaaagctaaagtggaaacagatgatgtgaaaaaaaattccctggatgaacttagagcccagattattgaattgttgtgcattgtagaagcactgaaaaaggatcacgggaaagaactggaaaaactgcgaaaagatttggaagaagagaagacaatgagaagtaatctagagatggaaatagagaagctgaaaaaagctgtcctgtcttcttgagtggtgtggacctggtgttcataatgttccagggattcagaagcaacgctatgaacttcagctgacttgttacttaaaaattgtgaattctgttgttgtgataaatatgagcaaatgaagtgtaatatctatagaaaagtagagtgagggtgaatttatatatatattttgttttgccaatatgaagaaaaagaggccttatttcttaactgtgctgggattgcaaacactttttaaaaaattgtttgcttgaaaatactactgaatataaataagaatgtgcacagtagtttttttattgaaacttgtattatttttaaagagatctata

SEQ ID NO: 63460 - DNA, 5073 bp, Homo sapiens
ttttttttttttattccagagaagtttgtatttgggccttaagcttttgaaaataaagtttagagacatagcatatgaataccactgtaatacacatgaaatattctatcagaccctaaaaattaacataaacttttaactttctcatagtcaacaaaatagtggctcggttgccaattttattagataagttggttacagacattttaattatcattttacggtctatctagggtgtagctgaaattcaaaatgctacatcaaagtagaacttttttacaaactaaatgccattactaaatgtactttggcctcagcaatagtagaatttctagtcagcacttcattttttacttcccttcttatggacccaagtgggctttaaacagggaatgcagggacttaggtgctggatgcatcacaccaacattacccactttcccttttaggaacctcttacaaaatttttgaggggggagatgggtgggcattagccctggtgggaacagatcttgggtcacctccaataacactggcccgattatctgtccctgcctgaacccattggtgaaatagtacaagggtgcacaagcccttcactgattacatggcaagtgttacagtagccttagccattagggaagggggaggttacatcataggtacaaaatacagtataaaagcgttatttaaccattccacactggagggttactctgatggccttccaaacccagtcggtttggatggttagcccacttaaaccaattacatcacttaaggtaaacaatataaccataccaaaaaccctggtatggtaaaatacaatttccatgggtacaaaaatcaaagcctggagactgtttttacagattgctttttacacaatgtcttaaattgccaaatatttacaacattaaagaggaaatacattgtgatgcagagtaaaattctgaaatgattattataaaacctcaatctatctacgtgaggcactcctgaagcaagtggcattagccatgaggtcctttggtacaaggcccattgcttgaagaaccacagtagctgctgtggctttagcatgcttcttattagggctggcaaagctgggctggtaagcgcttccatttatcaatacctattcaagaaaaacatacaattgggctggtaagggcttccatttctcaatacccttaaagagaaaatgtttgcgatgatcagggccactatcatggaccaatagaaattcaggtggttgccaccttcttttattacagatctccatcaaagcagaacacaggatgtttgcctgaacaagatctttcattgcaagcagagaagttccccagacctcttttgtgctctttctcctactgcaacaaagaccttttcggtctgtcttaaaatcaactaggatgggttcccttgttgccttctttgttttttcctaatcccttctccttctctccagcccatttttctcatcaaaaacggctcccattcctccagttaccggggctgctcttaagaactgatcctttttaatccaggcttgggcaaccagtaattggcccaactgttccttgtgtcaaaaacctgtactcctgtacttccctgtgaactggcccaggaatagagttccagctgaagccccaggcatcaatcctttcctgagctctatttaacatgctcatggcttcaagatcaaatgcattctcactgagtcttttctgagcaagtgcccgttcactcattgctgtagagatgtcccacaggctctgagggcaaattgctgctgaaaacattatcatcatctttgttttcttcaccatttttctccacaggaacccattctccataaacactatccgcttcttttttccgatgttgagatccagatgatacagggaattcttttgttaatgttacctggctttttggtggagttggttttgctgcagcaatattcagattgaaaaaaataggtttgggttcactgagtttaaagggatgatgataaaaaggaggttcttcttcctcttcatccgaaacatgaggtttattcactattacatcatcatcttctttactctgtgcgatctgtttacatttctcagttagttcttctatagtagctcctcctgactttttagcaactttctcttctatagtaggtggaggtgcaggctttaggtttggtggtaaagggacaccagccttagcacacatggcagctgcattagctttggctatttcaagtaattgagccttatccaaatctgtcagacgtttgggtgatctgcctcgttcagaagacctggatcttttacgacggatgggagatctgctaaaccttcttcttaagggtgttcttgatcgccttaatctgactggtgagatactgaagcttcgtcttcttaccacagaccttgatcttctccggcggcttggggtgcggctccgacggctaggggtgcggctccggcggctgggggtgcggctgcggcggctgggggtgcggctgcggcggctgggggtgcggctgcggcggctgggggtgcggctgcggcggcttggggaaatgctaaagctccttcttctacccacagatctagaccttcgtcgacgacttggagtatgactccgactccgacgacttggggttcgacttcgagctctaactgtctttcggttatccctggagcttgatctttttttttttctttccctagacttggatctgtgctttggagatcttttgcgcttctcttttgatacagatcttcttcctctagactttgatcttgatctgctgcttctcctcctgcgtcttgaacgtgaccgtgaacgtgtctgagagcgatgagacttggacttagatgatctctttcttgccctagaacgagattcactggtacgcttgcgtgatttgtgttcagaagatttggaacgcttacttcgagatcttaatgaagagtctcttttcttctctttctcccccttatcacggttcttatttttcttgcttttttcgtgagtgtccttaacttttacaaaaatttcataatcatctttttcctctgaagaagactctgaagctctttctggcatactacttacaaccgggctggcagcagatctgtcacgtccaacatcacttgcaagtaaaggtccttcaatgccagctctaaggcttgtaagacgttccatgtccttaggaagtaacggtctcactaaatctgcttcattaatatcctcaatattggcagaaaatcctgaatcaggcagtgtctctttaggagggggaggtacttctttttctcctccactactttctttagggctgagcagagctgctaatgtctggtcactctcttttacaggtaatggttcttctgtatccttactaacaaggttattattagatggtaaatcaagatgaatatctttagcaggcaaaggcccttcaatgtcagcttcactaccaccactaggactggtggaaattaccatgtcatgttcagtatcttgagtagttaaagataaatcaacatcatatttattaactaaactgagagtagatgctgtggtaaattcaatacccttactagttcctgttgcatcaggttccagagcaaaaggaccagtagaagatagagtttctcctgcatcagcttcactaacaccagggtaggtatccaatactgtgcactgtttagtctcactggtgggcaaaattttctcttcaccaatttccccaacaggactagtaccagcagcacacactgtattatgttccatctctttagcaattaaatgattatttatattaaggtctatatttataccatgttcactttcgtaaaagtcacctttcaggtgttcctcagcatgtggttcttcacctgaatgcaatgcaatctcctgcatgccaatctctggagcaagattttgatcaccagaggatagattaattcctttcataacatgtgatgacatgatactagattccagtatcattggtgtggactctatagccacctcagttggtattacttgagtctgctctgagactgtgacagcaggctctgaaactgtcacagtcgattcctggacagaaacagatggttctgaaacaatcatagaaggttgaaggactgacaccgctggttccagaacaggcacagaaggctccagcgcagaaacaactggcacaggaatggtaacatagtctggctcagccacaacaggaggctccgggacagtcacaaccgaaggctccaggacagttacagtcgaagactccaggacagtcacagtcgaagactccaggacggtcacagccgaagactccaggacagccatagctgaagactctggggcagccatggctggcggctccagaatgctctctgccagcactggagtagttactgctggaaccaacaaggatgtagatacttctgaggcaacatgtcctgaggctctcatggaatcaaatgtttctgctgtctctgacataacaggaggctctgatgctaacacagttggttcagctgacatggcgggagtttcagataccatacaagtcactggtctctctggaacaacttcatgttcttctgctactactgcagactctacaggtgttaacgtaattgaagattctggctctggtggtggttctggaacagtcacagcagcctctgatactaaaactgagggatctgatgctgacactgaataatcagtaggcactgctgaaggctccgaaatctcactttgactcacaggaggctcaggctgcgatacagactcttcagatggtaatgatggcacctctgtaggccaagtattttcagctgttaatgctgactgctcagtgggcaatgctggaccctctggtggttcctcaggaggcaatggtggtgtcattggtggctcctcaggtggcaacggtggcattgttgggggctcttcaggaggcaaaggtggcaccatatatgcctctgtatatgtgtcagtgtaagaatcggtgtaagaatcagcagccatagacatcattgaacgatc

SEQ ID NO: 63461 - DNA, 1326 bp, Homo sapiens
cggctacccagcaggacccagatggcagtggagccagtttctcatcttctgccaggggcacccagccgcatggctacctggccaagaagttacacagccccagtgatcagtgcccacccagagcaaagaccccagagcctggagcccagcagtctggcttccctacactctcgcggagccctcctggcccagcaggaagctccccaaagcaggggcgacggtaccggtgtggagagtgtggcaaggcattcctacagctgtgccacctaaagaagcacgcatttgtgcacacgggccacaagccctttctttgcactgagtgtggcaagagctatagctcagaggagagcttcaaagcccatatgctgggccaccgtggggtgcggcccttcccctgtccacaatgcgacaaggcctatggcacccagcgagacctcaaagagcaccaggtggtacattcaggtgcccggccctttgcttgtgaccagtgtggcaaggcctttgcccgccggccctccctgcggctgcatcgcaagacccaccaggtgccagctgcccctgccccttgcccatgccctgtgtgtgggcggcccctggccaaccagggctccctgcggaaccatatgaggctccatacaggagaaaagcctttcctgtgcccgcactgtggccgggcgtttcgtcagcggggcaacctgcgtgggcatttgcggctccacaccggggagcgtccttaccgctgcccacactgtgccgatgccttcccccagctgcctgaactgcggcgccatctcatctcacacaccggggaggcccacttgtgcccggtgtgtggcaaggccctccgagacccacacacgctccgagctcacgagcgcctgcactccggagagaggccctttccctgtccccagtgtggccgtgcttacacgctggccaccaagctgcggcgccacctcaaatctcacttggaggacaagccctaccgctgccccacctgtggcatgggctacaccctcccgcagagcctcaggcggcatcagctcagtcaccggcctgaggcaccctgcagcccaccctctgtgccttctgctgcttctgagcccactgtggtgctcctgcaggctgagccacaactgctggacacacacagagaggaggaagtctcccccgccagggatgttgttgaggtcaccatttcagaaagccaggagaagtgctttgtggtgccagaggagccagatgccgcccccagcctggtgctaatccataaggacatgggcctcggcgcctgggcagaggtggtggaggtggagatgggcacct

SEQ ID NO: 63462 - DNA, 1803 bp, Homo sapiens
ttttttgccccaagggggtttaagtggggtaccccccgggttttccccgccccgcggtgttaaaacgcgggcccgggaattgaatttgggggccccattaaaaaaatttttccttgcccgcccggggtaggtaaactgggtcccctaaaacgggcccccccttttttttttttttccagaatgcctttattttcagtatcatagaatttaaatacagagtcaaaagatgatttataaaatataaaacattttctgcttggccgtatttgaagacaagctgaatacatatctatgttctgaataagtccactatggatatatataggaagagatatacatatatccatccacagatacacacacacatatatatttctgcatgtatatatacataattctttctatagttacaggaaatacttcttctataattctgattttgactcccatcctccaccatttactcatccactcattacctaaatcttggctttctttcctatattgtaaataatccatccaaacttctagccagtactgtcaggagggttcttgctcgagtgagctgttaatactattttccactgacaacttctgcacatcgaggacacagtgtatctgaagactccgctgtatacttccaacaacgggggcatttttctttcgtagtcggcatgacaattactttataggaagactcttcacgaatatcaccaccttctaagttgatgaggaatttccctttaagctcgattacatctgcagtcatctctcgtggttcctgagccagtaaagttgactcagaagccatcattaattcattcaactgagaggtgctggaagtctcttcagactgcagcatctctattatctcaaaaagcagtccaggttctatcacagtgataaccttgtactcagctgcatttttgccagggatgcttccaagaaatgagtctcgcattgcacacgcactctccacagcttcttccaacccgggctttttccagatagaactagtactaatccacccagtacggaaaacactcttgggctctttaatataaggtatgtgctggaacacctcttcagccaggtgaggaagaatgggagcaaaagaacgaactattacatccaaaatttcaactaatgcagtctgacaagagcgtcgtttggggtcattttccttttcacaatagagcctatctttgattatactgaaataaaagttagagagctctctggtataaaacgtccgtaacagccgaacaacttttccaaaatcatattgtttgtataattcggtaatcttgtttgccaaatcctgcagtaagtgtagcatgtactggtctatgacatacatatcgtttacagggatggaatctgtttctgggttgaaatcagccacatttcccaaaagaaagcgaagtgtattcctaagcttgctaatatcatctctggcagcattgagcacggatgggccaattgcaacttcggtgaagacattggaatcagctacccaccagcgaaggacatcagcaccatacggaggctctttgctttgatcttgtcctccattaacgacaacatcaggatgaatgacattcccaagagacttggacatcttttctcccttttctccaagggtaaatccatgaacaatcactgtcttataaggtgctctcttccttgctgccacacttgttaataaggatgactgaaaccaacccccgagctggtcttttccttccaagtacaaatctgctctttggtcaggacctggaagaacataagaccatgaagttc

SEQ ID NO: 63463 - DNA, 797 bp, Homo sapiens
ttttttttttttaatttgcaaaaaaaatcttttattggcatgaaaataatgttgtaaatggcaccaaatattccacttaaatgcatatacagtattagagtcaaaaactattttatccctctttgctgtttttcccccttctgcccactttcctgggtgttgggggggcccgctgacaacagtcacaaatccagcgacctgatggaatagcaccaaggcccacacaaaaagtatgataacctctgtcacacatatcacagaacatcatttcttcttcatggtggggttgtccacatataatgcatgttttacattccatacactgccatgggtaggtcttaatcatagaaacaagctccattgtcatatccaggcaagaaggatggccactattctcacattgggagcagtgtataagtgattcagcctttcctttcttgttggactccttacccttcagacaaattccacatatagcatttggaatgacctttggcttgtacccaggaactgacttggacagtacagaacgtttgggaccatcttttcttggagtggcagctttgtcttttgatttctgtcttccctggaaagagtcctcctggctgtcaggagggctttcccccttcagatacattgccagaggagctgtccgaagtgcctttatttttccgtttctcatcacctcgaccatcttcgccatcatctgaatcaccatcactgtctagagcagggagctcaggatccagagggggctcatacaggaatgtgtttaatggcagataccgcctcgtgcc

SEQ ID NO: 63464 - DNA, 2035 bp, Homo sapiens
cggcaccgatccgcaattcccggatcgacgatttcgtgcgcagagtggagtcaaaggcaaccagtgctcgctgcggtctctggggatcgggaccgcggcggcggcccgcgagcgggatgttccggggcttgagcagttggttgggcttgcagcagccggtggcaggcggtgggcagcccaatggagatgctccacccgagcagccgtccgagacggtggctgagtctgcggaggaggagctgcagcaagcgggagaccaggagctcctccaccaggccaaagacttcggcaactatttatttaactttgcatctgctgccacaaaaaagataactgaatcagttgctgaaacagcacaaacaataaagaaatccgtagaagaaggaaaaatagatggcatcattgacaagacaattataggagattttcagaaggaacagaaaaaatttgttgaagagcaacatacaaagaagtcagaagcagctgtgcccccatgggttgacactaacgatgaagaaacaattcaacaacaaattttggccttatcagctgacaagaggaatttccttcgtgaccctccggctggcgtgcaatttaatttcgactttgatcagatgtaccccgtggccctggtcatgctccaggaggatgagctgctaagcaagatgagatttgccctcgttcctaaacttgtgaaggaagaagtgttctggaggaactacttttaccgcgtctccctgattaagcagtcagcccagctcacggccctggctgcccaacagcaggccgcagggaaggaggagaagagcaatggcagagagcaagatttgccgctggcagaggcagtacggcccaaaacgccacccgttgtaatcaaatctcagcttaaaactcaagaggatgaggaagaaatttctactagcccaggtgtttctgagtttgtcagtgatgccttcgatgcctgtaacctaaatcaggaagatctaaggaaagaaatggagcaactagtgcttgacaaaaagcaagaggagacagccgtactggaagaggattctgcagattgggaaaaagaactgcagcaggaacttcaagaatatgaagtggtgacagaatctgaaaaacgagatgaaaactgggataaggaaatagagaaaatgcttcaagaggaaaattagctgttcctgaaatagaagaataatccttaacagtctgcaaactgacattaaattctagatgttgacaattactgaatcagaaggcatgaaagagtataattttatgaaattcaaaattattcttttttcaagttgaaacttgcctcttctactttaaaaaagtatatagaacagttacttctaataatcagaaagagatgttttatagaacatttctttaatataaagttagagatgtcttcataggcagtatggctatctttgccacagaaacataagtaaaattttagagttctgttttccatgaggtcaaaaatataatttattcctcagtcatggttttctaaatatctgtactccacattccattttaattgatatgagggtgttaaagtacctacttaatggggttgattactacaaaaatgaccaaattataccaaagaacttaagaggaagcactttcagaactattcacttgccaggtattttctaaaattccacctgaaagccaaaagataaaataaataagttgattttaatgatataagcatcacacaattttacattaagaaatactgtgcaggccatgcgtggtggctcaggcctgtgatcccagcactttgggaggccgaggtgggcggatcaccggaggtcaggagttcgagaccagccttgccaacatggtgaaaccctgtctctactgaaaatacaaaagttggccgggcatggtggcgggcacctgtgatcccagctactagggaggcttttgaacgccaggaggcggaggttgcggcgagctgggatcgcgccactgcactccagcctgggtgatagagtgagattcagtctcaaaaaaa

SEQ ID NO: 63465 - DNA, 3285 bp, Homo sapiens
atggcatttcaggcaagccacaggccagcctggggaaaaagcaggaagaaaaactggcaatacgagggcccaacccaaaagttattcctgaagagaaacaacgtgtcagcaccagatgggccttcagaccccagcatctccgcgagcagtgagcaaagcggggcacagcagcctcccggtttacaggttgaaaggattgttgacaaaaggaaaaataaaaaagggaagacagagtatttggttcggtggaaaggctatgacagcgaggacgacacttgggagccggaacagcacctcgtgaactgtgaggaatacatccacgacttcaacagacgccacacggagaagcagaaggagagcacattgaccagaacaaacaggacctctcccaacaatgctaggaaacaaatctccagatccaccaacagcaacttttctaagacctctcctaaggcactcgtgattgggaaagaccacgaatccaaaaacagccagctgtttgctgccagccagaagttcaggaagaacacagctccatctctctccagccggaagaacatggacctagcgaagtcaggtatcaagatcctcgtgcctaaaagccccgttaagagcaggaccgcagtggacggctttcagagcgagagccctgagaaactggaccccgtcgagcagggtcaggaggacacagtggcacccgaagtggcagcggaaaagccggtcggagctttattgggccccggtgccgagagggccaggatggggagcaggcccaggatacacccactagtgcctcaggtgcccggccctgtgactgcagccatggccacaggcttagctgttaacgggaaaggtacatctccgttcatggatgcattaacagccaatgggacaaccaacatacagacatctgttacaggagtgactgccagcaaaaggaaatttattgacgacagaagagaccagccttttgacaagcgattgcgtttcagcgtgaggcaaacagaaagtgcctacagatacagagatattgtggtcaggaagcaggatggcttcacccacatcttgttatccacaaagtcctcagagaataactcactaaatccagaggtaatgagagaagtccagagtgctctgagcacggccgctgccgatgacagcaagctggtactgctcagcgccgttggcagcgtcttctgttgtggacttgactttatttattttatacgacgtctgacagatgacaggaaaagagaaagcactaaaatggcagaagctatcagaaacttcgtgaatactttcattcaatttaagaagcccattattgtagcagtcaatggcccagccattggtctaggagcatctatattgcctctttgcgatgtggtttgggctaatgaaaaggcttggtttcaaacaccctataccaccttcggacagagtccagatggctgttctaccgttatgtttcccaagataatgggaggagcatctgcaaacgagatgctgctcagtggacggaagctgacagcgcaggaggcgtgtggcaagggcctggtctcccaggtgttttggcccgggacgttcactcaggaagtgatggttcgcattaaggagcttgcctcgtgcaatccagttgtgcttgaggaatccaaagccctcgtgcgctgcaacatgaagatggagctggagcaggccaacgagagggagtgtgaggtgctgaagaaaatctggggctcggcccaggggatggactccatgttaaagtacttgcagaggaagatcgatgagttctgagtgtcgggctgcccactggtgacaccgggatcgggctgagcaggagaacatcaccggctccagttcccctgatccattctcacagcctgaaacaagctcacccgtagcttacgcttggaagcaggactgggaacatccacgctatttattatcgaggagttttaaagtactgtaactttaaaataaataactacaaagcttctttgtccaaacgtcattattttatacttatatacacgcaggtgtaaaagtataaaggtgagcactagactgctcttagaagctctaatttttgttttctttggctagtactgtataaaaaacagaattgtgttttattggttttggatgacagaaaagtctggaataatgtttgttttcctcatttcttccttctagaacacagaatctaaaggggtattagccagcctcgcctccctgccccacgtagagacacagagtgatgtgaggcgttggctttttctccaagaaggtacagatacctcagattcgggaaactcaaaatcaaaagacttagcttctaggataaatacttctgatgaaaaatccgctgaggagcataccccaaaccagacatatgcttaggattcatgctgagatatcaattggtttccccttctttttaaaatacgtccagttcttacccagttaacatgaagaaaccactgtctctagaagaaagcttgttttgcagtattagtgaatcactgaatagcttaagtatgactatctaagttataagttagtctttagtgggttttaaatagtttttctgacccttctgaaaaataactacataagtgcttcttgttgctgggtgagaaatactactttatagacagttttgggtttctgtttgcaggtatggattgatgtatttcaccaaaataaaatatttttatgtttataaagtgtaatttttaggttcacttagaatatattttatttaataagttaaaattcttttggcacactattaaatgcaaaaactcctttcaaaacaaaaaagaactaccttatattcaacatttaatgttcttggcctctgcttttatgtctatacaatatactgagttcagtatggtgtccaagagtgccctgtgtggatagacatgtgcactccttccaggagtgggtactgattccagactccagatgcctattattagttaggcttctgagcttgcaatcatattgaatgtatgaagagcgaaatcaaattcttatttttgtacagttttgaagtttatacttagaactgaccacctccccggccacgcggagagctgtacagtgtgtaaatctgcctttatcttggattgattggtacagtatttttgcatctgtgggacctaccttttcgttcagtagtttgaactatatataaactgtacaatcctgtaaaagtttttatagaataaatattcagctgtgaaaactggttaaataaaactaatatttcttaac

SEQ ID NO: 63466 - DNA, 2982 bp, Homo sapiens
tggagatttccatcatggcggcgtccatttcgggctacaccttcagtgctgtgtgtttccacagcgccaacagcaacgcggaccacgaaggatttttactgggagaggtaagacaagaggaaacgtttagcatcagtgactcacaaatcagcaacacagaatttctgcaagtaattgaaatccataaccatcagccttgttcaaaactttttagtttttatgactacgcaagcaaagtgaatgaggagagtttggacaggattcttaaagatcggagaaagaaagtcattgggtggtacagattccggcgcaatacgcagcagcagatgtcctacagagagcaggttcttcacaagcagctcacccgcatcctcggcgtgcccgacctcgtctttcttctcttcagcttcatctccactgccaacaattccactcacgctttagaatatgtgctcttcagaccaaatagaaggtataatcagaggatatcactcgctattcccaatctaggaaatactagccagcaagagtacaaagtgtcttcagtgccaaatacttctcagagttatgccaaagtgattaaagaacatggtactgacttttttgacaaggatggagtaatgaaagacatcagggcgatttatcaggtttataatgcacttcaggagaaagttcaggcagtgtgtgcagatgttgaaaagagtgagcgagttgttgaatcttgtcaggcagaagtgaacaaattaagaagacaaatcactcagaggaaaaatgaaaaggaacaagaaagaagattgcagcaggcagtgttaagcagacagatgccgtctgaaagcttggacccagcgttcagtcctcggatgccgtcctctgggtttgcagctgaaggcagaagtacacttggagatgcagaggcctcggatcctcctcccccttactctgattttcacccaaacaatcaagaaagtactttgagccactctcgcatggaaaggagtgtctttatgcctcgacctcaagctgtgggctcttccaattatgcttccaccagtgccggactgaagtatcctggaagtggggctgaccttcctcctccccaaagagcagctggagacagtggtgaggattcagacgacagtgattatgaaaatttgattgaccctacagagccttctaatagtgaatactcacattcaaaggattctcgacccatggcacatcccgacgaggaccccaggaacactcagacctcccagatttaactaaacaaaagaaactctccacctagcactgtttttcttcattgcttactgagagggtttttgagaacttaatctggggggagaactgctttctcagataccttaactcccgagaagagagtccttgtgcacagaacttgtgggagcctccatccgctgctctttacctttggatacagtgtgcaagtttcatgacagaatcattaagataatcaaattgtcctaattctggtgcgattcatggatatactggtaaatttaggcaaagtgaaactttatccagcggtagtttctgttctttaaaataaattggaaattagagacctaagcacaattagtcctataaatggttcctataaatcaaaagcttaccctcttgcactatcatgccttgaaatttactttttcaaagggaaacaagtttagcagcagccttcaaagaacttctttctatgatgagcccaaattcatctttgccagaaaagaaattttgataattccaagaagcctgattagaacaaatcagatataccttctcttgtctgcatgactttgtgagataaaagagagggcttccaacttttttctactagcttgatatgtattatcacttaaaatggttgcctttaaaaaaaaaaagtagagatactaattaccagtaagtaatcatccaaataaatacgtcataaaataaattaattattttttctttgatggattacagtgactactgtgttgcactggcacatttatggtctctgttctggaatcttggaggacacacagcagtggagaacagaaggagtgagttttataatgaacagattccagacacggtaggtttagctgagttcatacagaggagatataactcatttagatcttctgacaaatcctagtgttagttttatctgtggaggaaagacatttaataataaactgtttgggaatcttggtgaataaagattcattttcaagctgaataaccatacttattttattttaagttgccatttggggaataattgcagtatgtgtagagactctcttgggatgcacttatatttttatttaatgactacttgttttctagttttgcccacaacgtctgaaaccactaagacattcaggagcatgttgagcttctggtttggaaacagcaagacccaccatttatgacaaggacagccatgaggttaatacttggagtttaactgccttccctttgaactagttaaaatctgtaagaataaggaagttgttgaaggcttaaaatctgggttctgaaaaagtagtttcagtttataggatacacatttactcactgagctccagttccaatactaaattagacagtatcatatagacggaaaatgaaatgctagaactgccgttctttggatcgccactctatgggggtctgtcttttaactactctcctggttatgttggccttacaccactgccatttgatttaaaacgctgcagacactttatctgcaaatgtgttccagttgttatcagctacctactacgcagcttcagcgccagtgtgaatttatttttttttaagtgccattacccgtctcctctgttcagattttgacattcaggaaaatatttttattttgatgccatactgaaatctacaatgtatatctgacaaagcagttaaatgtgacaataaaaaacttatttaatcatggtaaaaaaaaaaaaa

SEQ ID NO: 63467 - DNA, 1479 bp, Homo sapiens
atggctgactcagaagcactcccctcccttgctggggacccagtggctgtggaagccttgctccgggccgtgtttggggttgttgtggatgaggccattcagaaaggaaccagtgtctcccagaaggtctgtgagtggaaggagcctgaggagctgaagcagctgctggatttggagctgcggagccagggcgagtcacagaagcagatcctggagcggtgtcgggctgtgattcgctacagtgtcaagactggtcaccctcggttcttcaaccagctcttctctgggttggatccccatgctctggccgggcgcattatcactgagagcctcaacaccagccagtacacatatgaaatcgcccccgtgtttgtgctcatggaagaggaggtgctgaggaaactgcgggccctggtgggctggagctctggggacggaatcttctgccctggtggctccatctccaacatgtatgctgtaaatctggcccgctatcagcgctacccggattgcaagcagaggggcctccgcacactgccgcccctggccctattcacatcgaaggagtgtcactactccatccagaagggagctgcgtttctgggacttggcaccgacagtgtccgagtggtcaaggctgatgagagagggaaaatggtccccgaggatctggagaggcagattggtatggccgaggctgagggtgctgtgccgttcctggtcagtgccacctctggcaccactgtgctaggggcctttgaccccctggaggcaattgctgatgtgtgccagcgtcatgggctatggctgcatgtggatgctgcctggggtgggagcgtcctgctgtcacagacacacaggcatctcctggatgggatccagagggctgactctgtggcctggaatccccacaagctcctcgcagcaggcctgcaatgctctgcacttcttctccaggatacctcgaacctgctcaagcgctgccatgggtcccaggccagctaccttttccagcaggacaagttctacgatgtggctctggacacgggagacaaggtggtgcagtgtggccgccgtgtggactgtctgaagctgtggctcatgtggaaggcacagggcgatcaagggctggagcggcgcatcgaccaggcctttgtccttgcccggtacctggtggaggaaatgaagaagcgggaagggtttgagctagtcatggagcctgagtttgtcaatgtgtgtttctggttcgtaccccccagcctgcgagggaagcaggagagtccagattaccacgaaaggctgtcaaaggtggcccccgtgctcaaggagcgcatggtgaaggagggctccatgatgattggctaccagccccacgggacccggggcaacttcttccgtgtggttgtggccaactctgcactgacctgtgctgatatggacttcctcctcaacgagctggagcggctaggccaggacctg

SEQ ID NO: 63468 - DNA, 1604 bp, Homo sapiens
gctatggggcagctggtctgtcttggggccttggaatcgattttttttcgcaggagatactggttattgccctgcttttgaagagataggaaaaagatttggaccttttgaccttgcagctattcccatcggagcttatgaaccgaggtggtttatgaaataccagcatgtagacccagaagaagctgtaaggattcacactgatgtccaaacaaagaaatctatggcaattcactggggaacttttgccttagcaaatgagcattacttagagcctccagtgaagctgaatgaagctctagagagatacggacttaacgctgaagatttttttgtcttgaagcatggagaatcaagatacctaaataataatgatgaaaacttttaataaatgtgagcacaggcacttttaatgaaaaaggcatcatctaagtttaaaaacaaatgaaaagacttagaaattcatgaatattgtgattattttacatttggaaacaacttctgcaagtttatgttttatgttttgtgtaataacttgcttcctagtatgatcagctcatgtacactatgagagggttcaggggtgggtcatttaaataatgaattggctaatgtggattttaaatttcatatcatgatataagcactgcaatggaaatgtttttactaaaacattatatttttgtggtactagaatttcctgaggtgaaaaaccgatattgaagattcatttttcttttttccattcttcaggaccttcggcaaggtgagtcaaggctctctacctacctagatgtttttcagaggcctacaaatacaagtatctttcttatatgcacattctaataaatgatgaaattcagtccaacatgcttattataaacatagcaattcttgctctatcaaattagcttatatgccaaatattaaatatggtttatttaggtaagcataaaaacataggggctatcatttttaaagacttgattttctctattgtggtaaaatatataaatacatatttgccattttaaacatttaccattttaaccatttttaagtgtacagttctttcgcattaatgcacccatgaccaccattcacttaaatttttaaaagaacagtatattctttttttcctagagccttcagatgagagggaacagtatattctattgcacgtctacaattcccaaaagacctcttactttgggaggccaaggtgggggggtcacttgaacccaggagtttgacatcaacctgggcaacatgggtgacctcccgtctctctcggaaaaaaaaaaagaaaaaagaaaaagccgggtgaggtggtgtgtacctgtagtcacaggtacttgggaggctgaggtgggaggatcacttgagcccaggagatagaggctgcagtgagctgtgatcgtaccactgcactccagcctgggcgacaaaatgagaccctgtctcaaaagaaagccctctccttagctgagcagaggaagggaaggagtgtggctatgagaatatgatttatgccattttctgtttttaaatctagaagatcttctaagcacaaatacagctacaatgaaatattttacagaccc

SEQ ID NO: 63469 - DNA, 551 bp, Homo sapiens
agagtgttgcttcgggcactagcccaggggacatttgggcacccatagacctaggcaggaaagagccttatgggctttcaggactgaaaagagcttctgcttcttctctcagatccatctctgcagctgaaggaaacaagagctacagtggatctattcaaagcttaacttctgtaggttccaaggagacacccaaagcttcaccaaacccagacctgcctccgaaaatgtgcaggagattaagactagacactgcctcaagcaatggctatcagcggcctggctcagtagtggcagcaaaagctcaactgtttgaaaatgttggttcacctaaaccagtttcttctgggcgccaagccaaagccatgtactcctgtaaagcagagcacagtcatgagctttccttcccacaaggagcaatattttctaatgtgtacccatcagtggaaccaggatggttaaaggcaacttatgaaggcaaaacaggactagttccagaaaattatgttggcttcctctaatactatttagtggatggcagtatcttcatg

SEQ ID NO: 63470 - DNA, 644 bp, Homo sapiens
tttttttgctgatgtaattgtggagccacaaatgcatgcgggctctttaataactctttgttggggaggggggtgaaatgtcagagtactttaattcagcaaacaaaaactcctcagttggcactgacagcctccggggcttcattttcactgctatagtctgatttggggtcatcttcatagtcatcatacatttccatttcatcctctccattgatcatttcatttccagctaggcttccgccatctgtcttcataccataagtgctctggatgaccgggaggctgggctccgggctggccgaggtgctagagcagtcagatgtcatctgaggcgatggtgtggtagttgccatagtgatagcaccaggatacacaacacctgttcctgtggtgattggaatctgaggctgttgccccacagtaaagaactgcctcatctcctgtctccgagacctcatcagttgcttatactccccaatccgaagctttttgccatcaacaatgcaggtgcgtttcggtcggggtttgtatttatagtttgggtacttctctaagtggatcttgcttagccgggcctgctcttcataataaggttgcttctcctggttggacattgatttccagcgagatcctaagatttt

SEQ ID NO: 63471 - DNA, 1897 bp, Homo sapiens
agtgatgacatgaacattcctaatgaggagacaatattgaatgcacttcttacttgggtccgtcatgatttggaacagagacggaaagatctaagtaaacttttggcttatattaggctacctcttcttgcaccacagttcctggcagacatggaaaatattgtactttttcgggatgatatagaatgtcagaaactcattatggaagcaatgaagtaccatttattaccagagagacgacccatgttacaaagtcctcggacaaaacctaggaagtcaactgttggtacattatttgcagttgggggaatggattcaacaaaaggagcaacaagcattgaaaagtatgatctccgtacaaatatgtggactccagtagcaaatatgaatgggaggaggctacagttcggtgttgcagtgctagatgacaaactgtatgtggttggaggaagagatggactgaagactttgaatactgtagagtgctacaaccccaaaacaaaaacttggagtgtgatgccacctatgtccacacatagacatggccttggtgtggctgtactggaaggtcccatgtatgccgtaggaggacatgatggctggagctatctgaacacagtggaaagatgggaccctcaggctcgccagtggaattttgttgccactatgtctacccctaggagtacagtaggtgtggcagtactaagtggaaaactttatgcagttggtggtcgtgatggaagttcttgtctcaaatcagtagaatgttttgatcctcatactaataagtggacactgtgtgcacagatgtcaaaaaggagaggtggcgtaggagtgacgacctggaatggactgctgtatgctataggggggcacgatgctcccgcatccaacttgacttccagactctcagactgtgtggaaagatatgatcccaaaacagacatgtggactgcagtagcatccatgagcatcagcagagatgcagtgggggtctgtttacttggtgataagttatatgctgttggggggtatgatggacaggcataccttaatactgtggaggcttatgatccccagacaaatgagtggacccaggtatggcattcatgtttcattattacactgactctctttttattaaaacaattcttatggtaaaacagatcccctcaatcttgtccaatactgaaatatatggcataaatatgacaatcacgttttgattagcgatgagaaaaagaggcaatgtttaattttataacataattaaaatccagaattacctttgagatgtaagttaatactcagagaaattattaattatctgctaccacttgcatgatgaagtgttctagcctgattaaagctgataggactactggagggctgcaacaatgggaggggagactggaaaataaagacaaggatagtagtcagaaaactttgaacaacttgcccacccggcgacagtaggcattttaaattactcaacccatttggttttggggagccgatttaaaggccgggaaacctaatggaaaatggcaacccctaacttcacctcgccccccccccccgccccccggcccttcttactaccggcaacgcaatttacccccttgcggactcttttggcaagggcctgaccccctccctaaatccccccccctctagacatctctctgctttccctcaccccccccacacccgcgcccccgggaactctggccttgggggcccccccattccacccctctctgggccctacgaaaaacttcacaagggtctaacttggagcccagagattctccttcgggtctcccggggggacctctggtaaactttggggcaacgaaaaacaccaagcttcttctgggcccgcacctcgccgcct

SEQ ID NO: 63472 - DNA, 426 bp, Homo sapiens
ggttacttggctggtttcctggacagagaacatccaaggttccattaaatacatcatgcttaaccctagttcacgaatcaaggtaaggggatagttgagagctgcactggttcatggtgctgataacctttttttgttgaaatgtaacgttctcgtcctctagaatcactttgacaaattaaaaatcctccccattgaaagaaggcaagtactttcatagttagcattatggtgatcttcctacagtgcctccatttttttggtcacattgtaatcttatttattaattcacaaatatttactgaaatcccaaatgtgccccacacagtatacatttgatgctaggaattatgttggtaaacaagatagacgtaggccctgccttcatattgcttaacgtccagtggtcagaatgtgttgaagtat

SEQ ID NO: 63473 - DNA, 2179 bp, Homo sapiens
ttttttttttttgcctccgagatgtgtttacttattcttctgtgtccccaaaacccctttccaaaataacatttaaatgattgttctgtgctgtgtgttcaaatggagataatcagatgccagtggctttacaatgtgggttgcattccattttcccaggcgcccaggtcctgggtctctaggccaccgcccgccgtggccgcccctctgctcaccagggaggccagacaggaaccctgcagctgccagagcaagcacgtcccacagccttgggaggcctcccaaaatgtgtccagattcccacaggcagagagagagggactgaaaggctgaagtgaagtgaccgtgcctgcccagcctgggactgagagcctgaagaccagctttccagactctgtcccagaacccccttggccctcagcaaatcccctcctcctggcctgaaacagactccaggcttcttgcagagacgtcttctgtggagaaccagaaagattgagtccaccctgactgtcccgggacagagctgctgagcagggtgcaggagccacaaacaccggatctttcgaggcacatcagtgacagatctgggcacagctggaccagccaggacattgagccactgcagccccaaggctctaaatgcggtgcttcagctctagcttggccaccgtggcccggtgcacctcgtcagggccgtcggcaaagcgcagggctcgggcccaggtgaagaactgagccagtgggtagtcgctgctcaggcctgctgctccaaaggcctggcagacacagagtggagggaggcggccctgggtcagcccttgtctccgagagccccaggaatgatagcctgctcttgatggcccataacaaccatcttcccggacttccctgtggcacctatgtgatacaatcactaatattccagagggcttccatggggccacacctgccatcccacggcctccagactccccaggcccactctgcaggtgccttctgccctgtgctggggccgggggttaggatctaaggaggcggcccccctgcatgggaaagagcctgggctctgggcttatgaaaacccaagttcatgtgaatttgaggtcagctacttgcaagctcagtgacctggacaagtcacttcacttttctgtgcctgtttcctcacattcaaaatgggggtacgatggcacctcccaccttgctgggtcattctgaagaggaaaaggaaagttgcatgcatggtgagtgggtgacacagggcatctgccagggtctatgggaggctgggcggctgaagataggagagtttggcatctagtattgatggttcaaataagccaactgtctggtctgtgctcacctgaatcgcacgatcaatcactcgggaggccatggacggggcgaccattttaatcatggctatatccaaggctgcagccttgtttcctgccaggtccatgaggtgggcagctctcagcaccagcagccgtgcctgctcaatctccacgcgcgactgcgcgatgtccgccagctctgtgccctgctccaccaggggcttcccaaaagccaagcgggacttcacctgtcgacacaggagatgtgcggctgaggacatgctgggctgggggtggccacgagaggcgggggctggtggcctgcagagctgggtggaagcagacaggacagggcaggggaggagagtgaaaccaggactgtgcatcttctcagccaaggtgcctgtgtgcagccatgcgccatgtccagggagtaggtttgacacacaaccttcacgtgtgccacagccagccacagcccacagggtgcctgtaacaaattgcttccaagaaccctttattccagccattgcacatctgggcaggcctggctaccagacaggagcagttatagatctgagccagcatctgacccaaggctactcctgggaatgagggagtgactgcaggcactgcacacggcgcaggcgaagggtgccctctgctgaccgcagcaccccttcctgccctgcagctccaatgggagcaaggtcccctcagccccgtctcgctcccggccttccgccgtgggtggccttatctgcaagggggattttaaattctgaaagtcacaaggcatcagaaaaggttctaaagtattcctttttttttcttgtttt

SEQ ID NO: 63474 - DNA, 1810 bp, Homo sapiens
tttcgtgcggaaggttgaatgcgtcgggtgggcacctcagcaaccagtagccatgcgcgacttggaggagtcggggcctcggcctacagcgaccccgtgcggctgcgttaagccggctctggagacagggaatcttttaactgagccagtcggctacttggaatcttgtttctcggccaagaatggtactccaagacagccatccatttgtagctattctcgagcctgtttgaggattagaaagaggatctttaataatcctgaacattccttgatgggcctagaacagttttctcatgtttggattttgtttgtttttcacaaaaatggtcatttgagctgtaaggcaaaagtgcagcctcctaggctgaatggtgcaaagactggagttttttccacaaggagccctcatcgtcccaatgcaataggactgaccctggccaagctggaaaaggtagaaggtggagctatatacctttctggaattgacatgatacatggcacacccgtactagacatcaagccctacatagctgagtatgactcaccgcaaaatgtgatggagcctttagcagactttaatttacagaataaccaacatacaccaaacactgtgtcccagtctgacagcaagactgacagctgtgaccagcgacagctctcagggtgtgatgagccacaaccccaccatagcactaagaggaaacctaaatgtcctgaagacagaacttcagaagaaaactacctgacacacagtgacacagccagaattcagcaagcatttcctatgcacagggagatagcagtggattttggtttggaatcaagacgtgatcagagttccagcgtggcagaagaacaaattggcccatattgcccagagaagagcttttcagagaaaggtacagacaagaagctagaaagagtggaaggagcagcagtcttgcaaggaagcagggcagagacacagcccatggcccctcactgccctgctggaagggctgatggagctccccgcagcgtggttcctgcctgggtgacagaggctcctgtggccactttagaagtgcggtttactcctcatgccgagatggaccttgggcagctcagttcacaagatgttggtcaggcgtcatttaaatattttcagtcagcagaggaagcaaagcgtgccattgaggctgtgctgtcagcggatcctcggtctgtgtaccgccggaagctttgccaggaccgccttttctactttactgtagacatagcgcatgtcacttgctggtttggtgatggctttgcagaggtgctgaggatcaagccggcttctgagcctgttcatatgactggccctgtggggtccttggtgtctctagggtcttaaggagcctccctcatgtctttaaggtagcatcattgatctttggatgtggcttttggattttctgaacaagctaatgttgtgtcgagaagcaacactttgtgatctcatggctttgattgatttgggctgttcaaaatgtttatttgaaaaacgtatacattaataaacttaacaaagagatataaaatacagagaaatcaccaaatgctttttgatctgttgatattaaagaatcaaaaggtgatgctgtctcgataatttctgaaagaagctgttcttggtgcacttgataaaattagacaaagttcattccagcagagactttctagttgaggggatctattcagtaattcatattggttttcctgtctgtctggaaaagcctgacctttctatttgattccaaatcaaacctatatcaggaagctagcg

SEQ ID NO: 63475 - DNA, 321 bp, Homo sapiens
cgtgcagggagggtttggacccacacgggggaaatgccctggcatctgggaggtggggctgcttctggccccagcagtcctcccttcaagcagaggccagggccaggctgagctgacaagcttctactctccttgcagcatgaacgtgcagggtgattatgagccaactgatgccaccgggttcatcaacatcaattccctcaggtgagaagctcagggccctgacgggccttcagagcctccaggtgtaaagggtaggctttgaaagcccccaggtgtaaagggtaggctttgaatccgaccttgactggtgccctgccc

SEQ ID NO: 63476 - DNA, 2687 bp, Homo sapiens
cggcacgagccggatatgtgctgaatggcactgagaggagaacatgccaggatgacaaaaactgggatgaggatgagcccatttgcattcctgtggactgcagttcacccccagtctcagccaatggccaggtgagaggagacgagtacacattccaaaaagagattgaatacacttgcaatgaagggttcttgcttgagggagccaggagtcgggtttgtcttgccaatggaagttggagtggagccactcccgactgtgtgcctgtcagatgtgccaccccgccacaactggccaatggggtgacggaaggcctggactatggcttcatgaaggaagtaacattccactgtcatgagggctacatcttgcacggtgctccaaaactcacctgtcagtcagatggcaactgggatgcagagattcctctctgtaaaccagtcaactgtggacctcctgaagatcttgcccatggtttccctaatggtttttcctttattcatgggggccatatacagtatcagtgctttcctggttataagctccatggaaattcatcaagaaggtgcctcttcaatggctcctggagtggcagctcaccttcctgcctgccttgcagatgttccacaccagtaattgaatatggaactgtcaatgggacagattttgactgtggaaaggcagcccggattcagtgcttcaaaggcttcaagctcctaggactttctgaaatcacctgtgaagccgatggccagtggagctctgggttcccccactgtgaacacacttcttgtggttctcttccaatgataccaaatgcgttcatcagtgagaccagctcttggaaggaaaatgtgataacttacagctgcaggtctggatatgtcatacaaggcagttcagatctgatttgtacagagaaaggggtatggagccagccttatccagtctgtgagcccttgtcctgtgggtccccaccgtctgtcgccaatgcagtggcaactggagaggcacacacctatgaaagtgaagtgaaactcagatgtctggaaggttatacgatggatacagatacagatacattcacctgtcagaaagatggtcgctggttccctgagagaatctcctgcagtcctaaaaaatgtcctctcccggaaaacataacacatatacttgttcatggggacgatttcagtgtgaataggcaagtttctgtgtcatgtgcagaagggtatacctttgagggagttaacatatcagtatgtcagcttgatggaacctgggagccaccattctccgatgaatcttgcagtccagtttcttgtgggaaacctgaaagtccagaacatggatttgtggttggcagtaaatacacctttgaaagcacaattatttatcagtgtgagcctggctatgaactagaggggaacagggaacgtgtctgccaggagaacagacagtggagtggaggggtggcaatatgcaaagagaccaggtgtgaaactccacttgaatttctcaatgggaaagctgacattgaaaacaggacgactggacccaacgtggtatattcctgcaacagaggctacagtcttgaagggccatctgaggcacactgcacagaaaatggaacctggagccacccagtccctctctgcaaaccaaatccatgccctgttccttttgtgattcccgagaatgctctgctgtctgaaaaggagttttatgttgatcagaatgtgtccatcaaatgtagggaaggttttctgctgcagggccacggcatcattacctgcaaccccgacgagacgtggacacagacaagcgccaaatgtgaaaaaatctcatgtggtccaccagctcacgtagaaaatgcaattgctcgaggcgtacattatcaatatggagacatgatcacctactcatgttacagtggatacatgttggagggtttcctgaggagtgtttgtttagaaaatggaacatggacatcacctcctatttgcagagctgtctgtcgatttccatgtcagaatgggggcatctgccaacgcccaaatgcttgttcctgtccagagggctggatggggcgcctctgtgaagaaccaatctgcattcttccctgtctgaacggaggtcgctgtgtggccccttaccagtgtgactgcccgcctggctggacggggtctcgctgtcatacagctgtttgccagtctccctgcttaaatggtggaaaatgtgtaagaccaaaccgatgtcactgtctttcttcttggacgggacataactgttccaggaaaaggaggactgggttttaaccactgcacgaccatctggctctcccaaaagcaggatcatctctcctcggtagtgcctgggcatcctggaacttatgcaaagaaagtccaacatggtgctgggtcttgtttagtaaacttgttacttggggttactttttttattttgtgatatattttgttattccttgtgacatactttcttacatgtttccatttttaaatatgcctgtattttctatataaaaattatattaaatagatgctgctctaccctcacaaaatgtacatattctgctgtctattgggaaagttcctggtacacatttttattcagttacttaaaatgatttttccattaaagtatattttgctactaaataaaaaaaa

SEQ ID NO: 63477 - DNA, 581 bp, Homo sapiens
gcggccgccggcagccctaccccttcgagcgcatgatcttcggcgcctgcgctggcctcatcgggcagtcggcctcgtacccgctggatgtggtgcggcggcgcatgcagacggccggcgtcacgggctacccgcgcgcctccatcgcccgcacgctgcgcaccatcgtgcgggaggagggcgccgtgcgcggcctctacaaaggcttgagcatgaactgggtcaagggtcccatcgccgtgggcatcagcttcaccaccttcgacctcatgcagatcctgctgcggcacctgcagagctaggggaccctgagctgctctcaggacggtggaccggtgacccctttgtattctgggcccatggaacggtgggggggtgcgcttgattctacttcaggaggcacatggggcgctttatggaacgagcaggtgggcctgaggggcctgggctcagagtccacgtccaaacgcaaagctggcagccctggaagtgcagtgttggggcgatggtgtggggggtcccgcagctcccctcttccttcctctgcagacgctggcgctgtctgccggaggtgttgccca

SEQ ID NO: 63478 - DNA, 4483 bp, Homo sapiens
ggcgtgcagtattggaaacattactatccagaatctgaaggatcctgttcaaataaaaatcaaacatacaagaactcaggaagtgcatcatcccatctgtgccttctgggatctgaacaaaaacaaaagttttggaggatggaacacgtcaggatgtgttgcacacagagattcagatgcaagtgagacagtctgcctgtgtaaccacttcacacactttggagttctgatggaccttccaagaagtgcctcacagttagatgcaagaaacactaaagtcctcactttcatcagctatattgggtgtggaatatctgctattttttcagcagcaactctcctgacatatgttgcttttgagaaattgcgaagggattatccctccaaaatcttgatgaacctgagcacagccctgctgttcctgaatctcctcttcctcctagatggctggatcacctccttcaatgtggatggactttgcattgctgttgcagtcctgttgcatttcttccttctggcaacctttacctggatggggctagaagcaattcacatgtacattgctctagttaaagtatttaacacttacattcgccgatacattctaaaattctgcatcattggctggggtttgcctgccttagtggtgtcagttgttctagcgagcagaaacaacaatgaagtctatggaaaagaaagttatgggaaagaaaaaggtgatgaattctgttggattcaagatccagtcatattttatgtgacctgtgctgggtattttggagtcatgttttttctgaacattgccatgttcattgtggtaatggtgcagatctgtgggaggaatggcaagagaagcaaccggaccctgagagaagaagtgttaaggaacctgcgcagtgtggttagcttgacctttctgttgggcatgacatggggttttgcattctttgcctggggacccttaaatatccccttcatgtacctcttctccatcttcaattcattacaaggcttatttatattcatcttccactgtgctatgaaggagaatgttcagaaacagtggcggcagcatctctgctgtggtagatttcggttagcagataactcagattggagtaagacagctaccaatatcatcaagaaaagttctgataatctaggaaaatctttgtcttcaagctccattggttccaactcaacctatcttacatccaaatctaaatccagctctaccacctatttcaaaaggaatagccacacagacagtgcttccatggacaagtccttgtcaaaactggcccatgctgatggagatcaaacatcaatcatccctgtccatcaggtcattgataaggtcaagggttattgcaatgctcattcagacaacttctataaaaatattatcatgtcagacaccttcagccacagcacaaagttttaatgtctttaagaaaaagaaatcaatctgccagaaatgtgaagatttgcaagcagtgtaaactgcaactagtgatgtaaatgtgctattacctaggtaactgcatatatataaggaatgtattttgttaagaaggcttttgtgaaattcagaatttttctttttaatatatttcttccatggaagagttgtcatcactaaaacttcagtactgagagtaacatgactcagtagccacagaagctatgatttgtaaaatatataattgaatcagagtaatcataatgcaggggagacattcgaaattagagacaaggggagaagcaattctgaggaagaccctagatagagctcattttactccacctaatcgttatatctggatatacccattttctgcatcttctttctcaacaataaaaaatgtaactattttgaatgcccacaaatcccattccagtgttactttctgtgaatgcagtaccatattctcattttcaatgacatttcaaccacaggcagaaaagactgtttactccttgacccaaaggttaaaaagggttttttattattttaaatattacaccttcaggaaccataacatgcttaagggaaactttccccaaaatgttggaccctgggttaaatgagggctattttaaatttgctaattattttacttattctattcaaggcatagggccaaagcattaagtataatttaatcccatacattcgagttaagtttagtgttgatgttccatcattctggacctcccaggagttgtttaagaatgaatctcttacacctctacttttgcccctctactgtatattaagcccataggcttgtgggaggaaggagaatttccattaggcaagctgtatgcagtggaattttccttttaggagacacacaattaagactctctggttctgtccttgctttggagactttaagacatttcctaaagcacaaataaaagcctcgtatttccccattgagagttttgttccaaggaatatgaagtgagacatatgggtgagtcataataatcaaaataatttatgaagagctgggtctgcaatagctagtctaaaaactacttgtgtgtcagtcctctggttatagtatataagagcctgaggaggtctggcaagatagatggtgtattatttatggatcaggctgctgcatacaaaccttgcatactattatgcagcttacctaactctcagactattctgagtaatgcttgcttgctaatgaatgtataggagaccacattgtaattgttcttagatgatggagtccatgcagtttcttagaaatcggtctcagtgcatgctgtgctttttcacatttgctctgggttatctgggaagtatcaggttctgggaggcaacagcattaagtgataagaaaaggagacattctggcaaagccaatctgcttaaaggcaaagtccagaacctggaacctagaggcctttctctctgcacgaaaaacaggtagtttgcagtctgagatatgggagagcttttaggctacacagcaacccaagggacctctcaccttttgctgagcttcaatcaggaagctatttgcctggctccagcagatgatgagataatgaggtagtgggttttttattactgttccattttgcaacatcctgcaacaccatcctgggagacaagagcattacccagcttggctttcacgggggagggttgtattcagtaaaaaagaatagtaaatataaggtcactgagattctaagtaagatagtaaatctaaggtcactgagccaaatccttttcaataggcatatattaacaggctgcttattttggcggaggttacatatggatgaaaatgaatcttagtcactgaatattcatatacatttcccccaaaaccttagacattcatagtagattttaattagttagctttctaactagtcagatttctgcccaaagtgcttagtcaatagtaattaagatatagcttcaaaaatggctttgcttttgatttctactcatattcgtatggctccagaaaaatatttttttcatatttgacaatgtcagctccactttagaaattttcaataaccagatgagaaaaaaattaagaaattgctcaagggaaacatttgtaaatggatttgaaagattgagccaaattctgttgtcagttctaagcatgcagttctcacctccatttagtcccccatcagaacagaggtcaggaatttagctggggagcctaaatttagttcagcttacctttgagaatagcatcaattcagactctcttttcattatgttttcttttcttttttccccccttttttaaactacattggtggttaagagtccatagtctagggatccctgagagattttcccattcttgtccaccattcacttgccattgtaaagattttctttgtctgttgttgggcatagattcttttgtaccatatttatttatttgtggttatatatgtcaattggtttccctttccttagcttgatattgccctagctttgttgttttaattaactttctattagagagactgtatatattttttctaaatactttgtgaaatcatttttggtagcaatatctttgaatatgatgaataaaagtgactgtgagtgcaaatagaattagcagtaagaagctactctagctaatttgccattttacttaaatggaaaatgtttttcaaataaatacttatgttgttcatgttccaagttattcaattcctttatgagtgaatgtttttacttttgactcctaaataggaaaagattatttgacagctggaaaataacctgccaccaattaagcgagtgacatagggctactttgccaaaacactcagaatgagtatgttacacagatccagttcactaaggattaatgcattttgaagttcttagaatttgttgggatgactgatgcaaagccaagttctacagcagattaaaagtaatacaggtttctttcggggaatgtcg

SEQ ID NO: 63479 - DNA, 384 bp, Homo sapiens
agaacactgctgcagaacgactggatggaggagacagcccctggaatgggggcaaccattagttctgggacgggattggataaagcccatgtcaggcctgtcgcccattggaatattgccaagtctatggctgtgtactaccttgaacctgtccgagctgtgcgggatgggaagccttcctggtgccgtgtatattactgcaggaatgaccgtgaccaagacagcttcctgatcaggatggaagtaccccatctccaggaaaagagaggaatcctagcatctgataaagccactatcatggcctttgatgccctggcgaccttctgtgaagaacaggcgtaagtgacttattgtatatgtggagcatagtgtcagtgagatcat

SEQ ID NO: 63480 - DNA, 538 bp, Homo sapiens
gaactaactgctttgctgaatactccacatattcaggcactgttactggcccacgataaggttgctgagcaggaaatgcagctagagcccattacagatgagagagtttatgaaagtattggccagtatggaggagaaactgtaaaaatagttcgtatagaaaaggctcgtgatattccgttgggtgctacagttcgtaatgaaatggactctgtcatcattagccggatagtaaaagggggtgctgcagagaaaagtggtctgttgcatgaaggagatgaagttctagagattaatggcattgaaattcgggggaaagatgtcaatgaggtttttgacttgttggtaagttgacgcagctagaagaataattgatagcttttagaaagctcttattagactttagaataaaatatttttaaaataactgttaagagcactagatgatttctagcctgatttttccatgatgtaactgttccacagtatttgttagcagttttatttttgggtgggaccactgatatttttttacttt

SEQ ID NO: 63481 - DNA, 378 bp, Homo sapiens
gaatcagttccccagtctctcagccatggaaacaagccctggccatctcagcagccactgcacaatgcctctggtggaagacacgccctcctcccctctggtcacacaagagaacatcttccagctgcctctttcacacccactccagacctcagcccctgttcacctcctcattaggtgtggctttagtagttcctttggttgtaactatgggatggaatccaggcatagggaactagttgttccacagctcccagccaggaagaaagtgtgagaagctgattggtagtgaacctgctgtttaacatcacagtgactacattgaacccagtatgccagttggcaccagatgctgtggacttggaatgaggccaagag

SEQ ID NO: 63482 - DNA, 1406 bp, Homo sapiens
ggcacgagggcagtatatcaagtgcaaacatccttttggatgatcagtttcaacccaaactaactgattttgccatggcacacttccggtcccacctagaacatcagagttgtaccataaatatgaccagcagcagcagtaaacatctgtggtacatgccagaagagtacatcagacaggggaaactttccattaaaacagatgtctacagctttggaattgtaataatggaagttctaacaggatgtagagtagtgttagatgatccaaaacatatccagctgcgggatctccttagagaattgatggagaagagaggcctggattcatgtctctcatttctagataagaaagtgcctccctgccctcggaatttctctgccaagctcttctgtttggcaggccggtgtgctgcaacgcgggcaaagttaagaccatcaatggatgaagttttaaatactcttgaaagtactcaagccagcttgtattttgctgaagatcctcccacatcactaaagtccttcaggtgtccttctcctctattcctggagaatgtaccaagtattccagtggaagatgatgaaagccagaataacaatttactaccttctgatgaaggcctgaggatagacagaatgactcagaaaactccttttgaatgcagccagtctgaggttatgtttctgagcttggacaaaaagccagagagcaagagaaatgaggaagcttgcaacatgcccagttcttcttgtgaagaaagttggttcccaaagtatatagttccatcccaggacttaaggccctataaggtaaatatagatccttcttcagaagctccagggcattcttgcaggagcaggccagtggagagcagctgttcctccaaattttcctgggatgaatatgaacagtacaaaaaagaataaattctaccagaagataaagaaaaaagcaagtattgcataggcacctgagcataggtatgaccttgggaagacattggctccataagcaatgccaagagaatgatcaatagtgagtttgggtgatgcagataaacaatctggataattccatttcttttttcccaaaccctcaaacagagtgccttaaaaaattgttttatcaggataattgtctcatgaccaaatccacgctcaattagagccattcaaaattccttaagatcatgggttctgacttcagccaaacaaaacaatcaaaacctaccaaaaagggactggattgtaatgtcctctccatcatcctcagtgtgagtcctcagagcctccatctgccaagaacattcagttggattccatcgtttggtttagcttgcttgcacgggttgtaggaaatgtctaatttgtaaatgttaatagatacctttggaaagaaaaaaaaaa

SEQ ID NO: 63483 - DNA, 2565 bp, Homo sapiens
tgaatatctctccctgatgataatcatacagatgaaggtgggattttctttccctttgtgaatgtagaaccaatataatcaaatatttgaagtgtaaaacatattttgtaagctgtgttgaaggaagaaaattggtaactttaagtgggacttatcatttgttgtgtgtgctttcctcatagtgagtctaattttcacaattacaccttggtctcattgaatgaagaatttaatcgtggacgaggactaaatgtgggtgcccgagcttgggacaagggagaggtcttgatgtttttctgtgatgttgatatctatttctcagccgaattccttaacagctgccggttaaatgctgagccaggtaagaaggtgttttaccctgtggtgttcagtctttacaatcctgccattgtttatgccaaccaggaagtgccaccacctgtggagcagcagctggttcacaaaaaggattctggcttttggcgagattttggctttggaatgacttgtcagtatcgttcagatttcctgaccattggtggatttgacatggaagtgaaaggttggggtggagaagatgttcatctttatcgaaaatacttacatggtgacctcattgtgattcggactccggttcctggtcttttccacctctggcatgaaaagcgctgtgctgatgagctgacccccgagcagtaccgcatgtgcatccagtctaaagccatgaatgaggcctctcactcccacctgggaatgctggtcttcagggaggaaatagagacgcatcttcataaacaggcatacaggacaaacagtgaagctgttggttgaaatcataattaatgcgttactgtatgaaccacaaaacagcactatttatttagccttacttctacttccagatgcagtgcctcttttggagaagacatgcttatttttcatgttctttctgacattactttagcaattcaacttgatgtgagaagaaaaaacaaatgtttcaacacaaaatctctgttttgtgagaatactgcactatggaataattgacaaattgaaatctcatatttgtcccaaaagttgttttgagttagttctacctggtgcccatgttctgattgtgtgtgggattgcatggtgtcctgattgcatctaggtggagcggatggaatgtgctgggccactgttgggtggagagcagcacattcttacagaggagatggagcgttatgagcatagtatgtggataggtatcttcacctgcccgcccctgagtcagcctccttgacttgatagcttgaagaatccttttccactgaaatagaggataattaattgacacatctgaaatccccaatcaatcaatcaagagaaaggtagaactaaaaactccttaacttactgttgcttacacccctgaaagtctgtttttaagcaaatgggtaatagtagaaaataggttagaatctatggcttgattaaaaatatgttattacattatcatgttcaggattaggattagtagtcagttgctgtaaactattttgaacaaacagaaaagaacacggaaacatttttaacagagcatttaattatgttggaatacaggatcctagctctgtctgggaacattagtttatgtgagccagctctatcagggtcttcccatggtggttcagaatagatgagcatagcatggttttgtttgtttttgctttcaattttctaatttggcatggatccatatgtatttactatcctttttctaatatattaatatatgctacatttgtatttgcattactataatactttgagttgaaaaagagtttcattgtggagagaaaaagcaaatggtatgccacaagatcactctgatttgagaaaagggaggaggggaagatagtctgaatggaaatctgaaatacggaatgttttagagaaatatgtcacttgcatatagaatgttttaattgaggtataaattaatgagacaaagtgaaaaagaaattatattcagataggactgcactacattatttgtcacacatggatctgttaccatcaggtcaattcctagtatgcataaattttttaacccttttaaaagagacctatgttgaaaacccctgaaaattcactgaagaaaaatcattactctttttctcagtaaatcatatcatctgaaatattacaaatttcaaatttctaggtgctatattaattcaatattacaataactcttacctaattattcttacaagttttaagttgtggtagtttagtgatttttttaaaagatgtgtgaaatgttctctgcaaaataattcaggccactgtctccttttatatattattataattatttattatgaagaccagtgaattacgatatttaaagtgagagaacttaattatttgcaaaggtaagttacagcttgttttttgagagaatcaaatgagtttacttttgttcctgttgtttttaactagctttaagtttaaagatggaagctaagcaatggaaatgctatacgtttttgacatttattaaatggtaccaat

SEQ ID NO: 63484 - DNA, 3425 bp, Homo sapiens
ttctggtacaagtacacgtacatggaggaaatgttgggaaacgttgccggtgcccggcaggtgtttgagcgctggatggagtggcagcctgaggagcaagcctggcactcctacatcaactttgagctgagatacaaagaggtggatcgggcccgcaccatttatgagcgatttgtcctcgtgcaccctgatgttaagaactggatcaagtatgcccgctttgaagaaaaacatgcttattttgcccatgcacggaaagtgtatgagagagctgtggaattctttggagatgaacatatggatgagcacctttatgttgcctttgccaagtttgaagaaaatcagaaagagtttgaaagggtacgagtgatttacaagtatgccctggacagaatttcaaaacaagatgcccaagaactctttaaaaattataccatctttgagaagaagtttggtgataggcggggtattgaagatatcattgtgagcaaacggagattccagtacgaagaagaagtgaaggcgaatccacacaattatgatgcatggtttgattacttgcgcttggtagaaagtgacgcagaagctgaagccgtgagagaagtctatgaaagggccattgccaatgtcccacccattcaggagaagaggcactggaagcgctacatttatctttggatcaactatgcactctatgaagaattggaggcaaaggatcctgagaggacaagacaggtgtatcaagcctctttggaactaattcctcacaaaaagttcacatttgccaaaatgtggatactgtatgcacagtttgaaatacgacagaagaatctgtcattagccagaagagcattgggaacttccataggcaaatgtccaaagaacaaattatttaaagtttacatagaattggagctacagcttcgagaatttgacagatgccggaagctttatgaaaagttcctggaatttggacctgaaaattgtacctcatggattaaattcgctgaattagagacaatccttggtgatattgacagagcacgggcaatctatgaattagccatcagtcagccacgtttagacatgccagaggtgctttggaaatcatatattgattttgaaattgagcaggaagaaacagaaagaacacgaaacctttaccggcggttgcttcaacggacgcagcatgtcaaggtatggatcagctttgctcagtttgagttgtcttcaggaaaagaaggaagtttgactaaatgcagacaaatttatgaagaagctaacaaaaccatgcgaaactgtgaagaaaaggaagagagacttatgctgctggaatcttggcgaagttttgaagaagaatttggaacagcttcagataaggagagagtagacaaactcatgccagagaaagtcaagaagagaagaaaggtccagactgatgatgggtctgatgcaggctgggaagaatactttgattacatctttccagaagatgctgccaaccaacctaacctcaaactcctggccatggccaaactgtggaagaaacagcagcaggaaaaggaggatgctgagcaccatccagatgaggacgtcgatgagagtgaatcctgatctttttttcatagacaaatgttttgttatttttataaattaattgtttggaactcttgtgactcctggaagttcttatatatttcaccagtaagaaattgattggtatctttgatggctactttttaagttattttttaaatgctcttgggttagctaggggtagggattgcaagtaaaggacttttttaactgctggatttgtttttccaactgagtccaaacttttctaatgtctgtccacatcatgcattaggaaatgtaattaaggtaacattctacagttacttttcatgtcatacccataaagatagtttatgcattcatctgaaatgtgtaactttttcatgtcttcagagtcacagacttgagttcatttcccagctctgccactcatgattatataacttaattttcattttcctcattcacaaaatgggccaatagtttgacagctcattttgaagattacattataaaaggaatatacctggtgggtgcatagtaagtgctcagtaaattgtttgttctaagccacttttaaaaatggtttcattccttgtagaattgaatgcgagtggattaataatttaccttactttcttactagtgtccagttatattgttttttagaacaacacttggaaaataatttgcagtgattatatttctgaacaaggttcagaaaacattgtttactaagaatttagtctaataatttcagttaggcgctcatcagttctccagagtggttgagtttgtaataccttgtttaaagaataatggcttgttcacgtgtgtgctatgaaaaatgatgtcccatgttcacataaatttgggaaattctggactaagacttaagtctcgttaatcaaatctctttatagttaggcttctgtacattatgtatctccagtagcaatgttgccatattatttatttcccaaacttagtggacaatggagtcatttctacctagagtaccaggtaaacatcctcccagtgtgctatagtagaaaatgtctactcctcactgctgacatgttaaacttactcttggtttagagcatgtgtagaaacacctaaggtagctctatgctaaataatgaagagtagcacaagaatgaatgtatttgctgatacgttgctcacattctcaagcaaaaattcaactgcattaaccgatctgagagttttcctttaacctggactgtgtttctcaagcacattttttctttgttcactgcccaaggactagaactgtatttttaaggttgttttcccctaaaaggacctttagtaagcaaatttattattaaatgtgcacatcttattcacccaagggaataaaagctacttcgtaatgttgttactaaattttatcttgaaaataaataacagtgtttgaggacagaagaaactaggactgttgttgagataaaatctgttttcagcctgactgctttagtcactggacgagcatcagctactgcggtgtcagatcacttctcgagtagaggtctgcctagtgagtgagcaggagaacatcatcttaatacgctttggctcacccagagtcagggagagatgaaaataataggtcagaatgcaagtgacttaatcacagtcttcctagaattatctgtttatgttgcatgaatgcataagaaaaaaattctgtcatgttcccaaggtagaattgtaataagcatgtgccagtgtgaaagctggaaggaaaaaagctattctctaacaggagaacataaagattcatttctctcccaccctcaactccagcctgagtgaaatcc

SEQ ID NO: 63485 - DNA, 1574 bp, Homo sapiens
ccagatcctgcccaacctctatctgggcagtgcccgggattccgccaatttggagagcctggccaaactgggcatccgctacatcctcaatgtcacccccaacctcccaaacttcttcgagaagaatggtgactttcactacaagcagatccccatctccgaccactggagccagaacctgtcgcggttctttccggaggccattgagttcattgatgaggccttgtcccagaactgcggggtgctcgtccactgcttggcgggggtcagccgttctgtcaccgtcactgtggcctacctcatgcagaagctccacctctctctcaacgatgcctatgacctggtcaagaggaagaagtctaacatctcccccaacttcaacttcatggggcagttgctggactttgagcgcagcttgcggctggaggagcgccactcgcaggagcagggcagtggggggcaggcatctgcggcctccaacccgccctccttcttcaccacccccaccagtgatggcgccttcgagctggcccccacctagggccccgtggccggcaggccggcccctgccccacccccacccacgggtgtccctgcccactcgtgtggcaagggaggggagggcaggagggctcggcctgagcagggtgctggggggagagcgcaatacctcacgcgggctgccgtcctaatcaacgtgcctatggcgggaccacgctcggagcctgcctcttctgcgactgttactttttctttgcgggatgggggtgggggttccctctccaggtggttgtccaggcccaggtcccggccctgggtgctcagccagctcggctaggccctgcgcctccctgcgcttcccccttcaggaagggtgtgtgccacctcgttgcactggatcccagtggctgcttgggggagaggcgtttgccatcactggtgttgtcacctccctgtttctccaccaagggcttgggcctctcggggctggggcctcccaggggatggggacccagaggtgcagtggccgcccacatccatggcctaggagctactgggcaggttcccggccacacatctggtgggctgttttgttttttttttttcctcttcccccaaatgtcttgacgggatcactggggctctttgtgagggaggggggccaaactaccgccggaggaaatggggtctcagagcgagagctgcggagggggaggggaaaaaaaaggcctcacttttgctgcctgcggggccccacacagccgctgctactttggggggtgggggaaggggccaaagctgaagacacacacagtcattcatttctgtccaacacccctgtgggtggcgggtgtgccgtgtgtgtgcttgtgtgtgcgcacgtgtcggcgctcacacacacatgctagcccactgatgcacccagcccagggctggcagtctttgcagcgtggggccgtctcaccctggagcctggagaggatctatgcttgtttgtttttgtaatccatatcatagttgctttctttaattgttccttctgaataaacagtttatttaagataaaaaaaaaa

SEQ ID NO: 63486 - DNA, 2390 bp, Homo sapiens
ggagggtctaaagcttatggccctggaacataaagtgcttctcactggaacacccttgcagaactctgtggaggagctcttcagtttgttaaattttctggagccatcacagtttccttcagagaccgctttcttggaggaatttggagatctgaaaacagaggagcaggtaaagaaactgcagtctatcctaaaaccaatgatgcttcggcggctgaaagatgatgtggaaaagaaccttgctcccaaacaagagacgatcattgaggtggaactgaccaatatccagaaaaagtactaccgtgccatcctcgagaagaacttttccttcctgaccaagggggcaaatcagcacaacatgcccaatctcatcaacaccatgatggagctgaggaagtgctgtaaccatccctacctgatcaatggagcagaggagaaaattctagaagatttccgaaaaacccacagccctgatgcccctgactttcagctgcaggccatgattcaggcagcaggaaagcttgtgttgattgataaactactccctaagctgattgcaggtggccacaaagtactcatcttctcccagatggtgcgctgcctcgacatcctagaagattacctcatccagagaagatacacctatgagcgaattgatgggcgagtacggggaaacctgcgccaggcagccatcgaccggttctgtaagccagattcagaccgctttgtctttcttctgtgcaccagagcgggaggcctggggatcaatctcacagctgctgatacctgcatcatatttgattctgactggaacccacaaaatgacttgcaggctcaggcccgatgtcaccgcataggccagagcaaagctgtgaaggtgtatcgcctcatcactcgaaattcctacgagcgcgagatgtttgacaaggccagcctaaagctggggctggacaaggctgttcttcaggacatcaaccgaaagggcggcaccaatggggtacagcagctctcaaaaatggaggtggaggacctactccggaaaggtgcttatggagccttaatggatgaagaagatgaaggctccaagttctgtgaagaagacatagaccagattctgcagaggcgaacgcacaccatcaccatccagtctgaggggaaagggtccacttttgccaaggctagctttgtggcttcaggaaacagaacagatatttccttagatgatcctaacttttggcagaaatgggctaaaatagctgaactagacactgaagcaaagaatgaaaaggaaagcttagtgatcgaccgacctcgcgtgagaaagcagaccaaacactacaactcgtttgaggaagacgagctcatggagttttcagagttagacagcgactcagacgaaaggcccacgagatccaggcgcctcaatgacaaagccaggcgctacctccgagcggagtgcttccgggtagagaagaacctgctcatctttgggtggggccggtggaaggacatcctgactcatggccgattcaagtggcatctgaacgagaaggacatggagatgatttgccgtgccctcctggtgtactgtgtcaagcattataagggggacgagaagatcaagagtttcatttgggaactgatcacacctaccaaagatgggcaagcccagaccctccagaaccactcaggtttatctgccccagtccccagagggaggaaggggaagaagacgaagaaccagttgctaatcccagagctaaaggatgcagattggctagccacctgcaaccccgaggtggtcttgcatgatgatggctataagaaacacctcaaacagcactgcaacaaggtacttttgcgagtccggatgctgtactacctaaaagctgaaatactgggagaagcagctgagaaagcatttgaaggatctcctgccagggagctggatgtacctctgcctgacatcgactacatggagatcccagtggactggtgggatgctgaagccgataagtcacttctcattggcgtgttcaagcatggttatgaaaggtacaatgccatgcgagcagacccagcactttgcttcctggagaaagttgggatgcccgatgagaagtccctttctgcagaacagggtgttacagatgggacctcagacattcctgaaagaggcaacacagataaagaagacaatgctgaggacaaagtagatggcctccagaaacaaacggagagttccagtgatggaggtgatggcgtttttagcgaaaagaaggatgacagccgggcagcccaggatggctccgacccagacaaatcgccctggccagtttcctccgccctcacagctcgtctcagacgtctggtcactgtttaccagcgct

SEQ ID NO: 63487 - DNA, 4764 bp, Homo sapiens
cttcagcaaacagaggacaaatcactcctgaaccaggggagcagctcagaggaggttgcagggagctcccagaagatgggccaaccaggaccctcaggagatagtgatttggctacagcactgcatcgccttagcttgcgtcgacaaaactatttaagtgagaagcagttctttgctgaagaatggcagcggaagatccaggttctggcagaccagaaggaaggagttagtggctgtgtcaccccgacagagagccttgcctctctctgcaccacccagtcagagatcacagacctcagcagtgccagttgccttcgaggttttatgccagaaaaattacaaattgtcaagccccttgaaggatcacaaactctgtatcactggcagcagcttgctcaaccaaacttgggaaccatccttgatccacgaccaggtgtcattactaaaggctttacccagttgcccggggatgctatttatcacatctcagatttagaagaggatgaagaggagggtattacttttcaggttcagcaacctcttgaagtggaagagaaactttcaacatccaagccagtaacagggatcttcctgccacccattacttcagcaggtggaccagttacagttgcaaccgccaacccaggaaagtgcctgtcgtgcacaaactcaacattcactttcaccacctgtagaatattacatccctctgacatcactcaggttacccccagctctgggttcccttcattatcctgtggaagtagcggtagcagttcatccaacacggctgtgaattctcctgccttggcctatagactcagcattggtgagtccatcaccaaccgacgagattccactacaaccttcagtagcaccatgagcttggccaaacttctacaagagcgaggcatctctgccaaagtgtaccacagcccaatttcagagaaccccctccagcctctccctaaatccctggctatcccttccacaccaccaaattcaccatctcactcaccttgcccttctcctttaccctttgagcctcgagtgcatctctctgaaaattttttggcctctcgaccagctgagacattcctccaggagatgtatggcttgagaccctcccggaaccctcctgatgttggccagttgaagatgaacttagtggacaggctgaagagactggggatagccagagtggtcaagaaccctggtgcccaagagaatggaagatgccaggaggcagaaattggtcctcaaaaaccagattctgctgtttatttaaattcaggtagcagtttattaggtggactaaggaggaatcagagtcttccagtcataatgggtagctttgctgccccagtttgcacatcctcacccaaaatgggtgtcctgaaggaggactgaggttcagcagttaactgaccttttatacaagttagcacatgaaggatagatatgcactgaaacatgtggtctggtctgacttgagagaaaaggaatgttgcacaagggttgtgaatgtgaaagggggaatggaggaatggaaataaaattgggatgagccctaatggaggaagtcgggcaaattgaaagtataaatgaatggcccatgagtgttccagagggagaaaggaaaggtttaatatactccttcagttgagttttcttgtcttgaacataaaaagtgaatacaaataaattcagtaatactaaaacatacagagatactgaacttgctggcacatttacttctggtaagcataaagcagagagaacccaggttagaaggatgggaagagaaaaggagcagttttattgcttatagaaagccgttctgaggggttggtggggtaagctcagtctattactgagacaatagtgagatggcttatatgtttcccctgttaatatctggttaaattatgtatccatcaaatggtatgctcgcagcattagcaaaattaggagtttcatctttttcattgaatcacaggtggagactcctattttcctttctgttttcaggcctttgagcccctgggagcccaaataccactcaattattttgtatttatgattaataaaagttcattttttaaatttgtatttttatacaacctccaaaaaaaaaaacaactgggtagagggtgggagggatttacttttaagaggcaaaatgtgagtaaattgaaaccaagaaaacttgtttttagaatatttcgtctgaataagtacagtagccaaggaatacaaacataattgcatgtttttaaaaattccttggaggctggaaggggttaagccagaagtgcaatcaataggaattagggaatgttgtatatttatatatgtaaactttttttgtaagaaaagttggtgacaactaaaccaactttttccaaagtgcgctatgcatatttttaatgaaagatgacatgtatttgcacaaaaattctcaggcacattaaattattgtaaactgaagtaaaacccgggtgcttgctttgagattgtggttttttcttcctaatgtaaaataaaataaaacacatctgccttcttgatatttatagaattagagaataaactttttaatgggggagtcaaagctttttctttttctctaaggttctttttttttattcaaactgtatgaaatggcaaagtgaggctctggggttagatttcagcattcagcagttgacacaggctaagaaatggaaagaagtagatctgttttttctcaatgttgctgagcaaagtctgcttctcatcagatgacgtggctttgtctagacagcacgcagttcagaaagaaatgtctttatacaaaagacatgatagagaaaagatgagagaggggactaattattttgtttatgaaaatggcaagtaaattacttgatctttttggtgcttaatttgcaaatgttttgttcctttgtcctgacttaaaggcagttttctgaagaactcttgactcttgctcctatggttcccataggcacacctattcccaggccaaggagagtccttcctctccccttttgaggcatccccgccatccccccacttagagctatgtgctcaaaaagccaacatgaatgcagtggtaaaaatttgttagtttcttatactttttagaatctctcaataaaatttttctaaataaattccacaaaaacaaagggtgaagatggtctctccctttcgttccccttcactcagttgtgctgaggtcaatagagtgtagagtttcagaaaggattccagcaggtttatatgtgaatataagtgtccctgaatggggcaggcattaaatagaagaatccctgctgtttaaatttcccgcatattccaattcacttttaaaaaataccatttgaatttgtatttcataaagtgactctggggtgcttactttagtcaattcttaaaattttttatttgttccctaagaaagtaattactgtttctgttgcctggacagttacagtttccaggaaacatcaggaagtaggaaactgtagggccagagagtagtacaacgttaaattgtccgatttatgtgtattacttaaagctataaattgaactagatcttgccgtgctctgtattgagtataatttgtatacttttttataattaatgactaaatgatcactttggaggcagggtggtgggggtgtattagcagccaaataagcacatctgatcaaaaagaaccaggcttagattttttttaagtacattgatgttgatgttccaccagaaacaccttaagtgtatactgttgtgtaatgtctctagaaaggaatcctgtcttaaaactgggttttgctgttttttgaagtttctacctaaaatcatttttggtatatcctgataatctctataatactagaattgtctgcaaaatatagtaagaagaattggagcctaatagctgattcctcccaatttatctgttatgttttgtcactattcacattttagtcttttctacgataaaaattgtatgtgtactttcatgccagtataggaaacctcaatctttttttttttttcgcctttaaaaaggttttcagggattatacctcaggtatttctgagtgtcctattgtctaataggagaaatatcttcccgagctcagaattaaaagttctcctaaattatgaagatcccaaatcttatgtaaataaccttaggcatgagtccttagggagaagttaatgaccattgttaaagtgcttttttagaaaatgttgtgctgtatgttcttgatttgacataaatgaatagactttggcaagggaggaaataagttaaaaggcagcttacaagagcctattccctataaagggtataattttacacagtactcaaagcttgttatcttttctgaccattttagtacagaattagtacttggtggttactaacatcaacttgtgacatctagaactagggctcttagtgtttagtgggccacttctctgatgtcagatgcatgcagacctgtactccacatgcaacccaacagcagtgccagtgtggataactgagccgtcgccttggcagagggacatccccctccagagtggggcacaagtgccctctaggggcagccaggggaatactattggttcgatacctgggatttgactttgtcaaacagctctttgtgcccctatctttgttttgtcaaatgtagatcagttaataaacatgagtagcttgaattttaaaaaaaaaa

SEQ ID NO: 63488 - DNA, 1793 bp, Homo sapiens
aaggaaaaataaaatatgaatcagagattgcaagactggaggaagataaagaagaactacgtaaccagctgcttaatgttgatctcacaaaagacagcaaacgagtggaacaacttgctcgagaaaaagtctatttgtgtcaaaaattaaaaggtttagaggctgaagtagcggaattaaaggctgaaaaggagaattctgaggctcaggtggaaaatgcccaaagaatacaggtgcggcagttggctgagatgcaggctacagtcagatccctggaggctgaaaaacaatcagctaatttacgggcagaacgtttggaaaaagagctacaatcaagcagtgaacaaaatacctttttaattaataaattgcataaagctgaacgagaaataaatacattgtccagtaaagtaaaagaacttaaacattcaaacaaactggaaataacagacatcaaactggagacagcaagagctaagagtgagctagaaagagaaaggaataagattcaaagtgaactggatggattacagtcagacaatgaaattctcaaagcagctgttgaacatcacaaagtgctcttagtagaaaaggatcgtgaattaatacgtaaagtacaagctgccaaagaagaaggttatcaaaaacttgtggtattacaagatgaaaagttagaactcgagaacagattagcagatttggagaaaatgaaagtggaacatgatgtctggaggcaatctgaaaaggatcagtatgaagagaaattgcgggcttcacagatggcagaagagatcaccaggaaggagcttcagagtgttaggttaaaacttcagcaacaaattgtgactattgaaaatgcagagaaggaaaaaaatgaaaattctgacctaaaacagcaaatcagtagtttgcagatccaagtgacttcacttgcacagtcagagaatgacttgctgaattcaaaccaaatgctgaaggaaatggtggagagattaaaacaagaatgccgaaattttagaagccaagctgaaaaagcgcaactagaagctgaaaagacattggaagagaaacagatacagtggttggaagaaaagcataagcttcatgaccgtatcacagacagagaagaaaagtacaatcaagctaaggagaaactgcagcgagctgcaattgcccagaaaaagagaaaatctcttcatgaaaacaaattgaaaagactacaagagaaagtagaagtcttggaggcaaagaaagaagaattggaaacagaaaatcaggtcttaaatagacaaaatgttccttttgaagactatacaaggcttcaaaaaagactaaaagatatacagagaagacataatgaatttcgaagtctaattttggttcctaacatgcctccaacagcatctatcaatcctgttagctttcagtcatcagccatgggttccaagcatggaactaccatttcctcctcatatgcaggaggaacaacatcaaagggaactctctctacttcgcaaaagactagaagaactggaaacaacacaaagaaaacaactagaggaacttggatcttccggagaatgatgttcttggagaacaggcagatcaaaagaggtgaagttggtgactcagtaaaacttgacattttaacctgtggcatttagatactttttactgtttgccaaaacacttgaatgtgcctcaagaaaaggtacctactacatgctgtattgtatgactgtcaggattttaagattatacaagtgaagcattaaaagagaaattctcagaga

SEQ ID NO: 63489 - DNA, 543 bp, Homo sapiens
ttttttttttttggcttccaataaaaaataattcaactttattagtatgaaatattttgagataattagtgacccaaatgcatgattctccaatatgaaaggtgttcagcataagcatacaatcatttagtaaaactgctctttatgagacccccagaaaagctggaggcacttcctctttttggtggagagagaagacactacttaactggccatttccttgctggagtttattccgattcccttttgtctgattcttcctcctcaaactcgactaaaggagtgtgtctgttggcctgagcaccttctctgtagaacactttctttactgtgccatcctttggagactttatggtatgctccatcttcatggcgatcataaccatgagggaatctcccgctttcactttgtctccagctttgacaaacaccttttcaatggttccagtcataggagctaaggggccgccctgagtttcttgtgagctcacagaagataagtatttggggactggaatgtcaatctcaatacttccttcctag

SEQ ID NO: 63490 - DNA, 4267 bp, Homo sapiens
ttttttttttttcagtagaaaccattgaagtttattggcggtcacaatgcttacactgtatgcagcaaacacccttacaagtctatccgcaacctgatcacgcaagaaaggattcatcacacagtcgccagaggagaaggaaaaaaaattaacaggcttgtttctgggggtagaggaaagaaataaaaataaaacctaattgatgagtgtcccgtgggcaagagctgaactagagatgtgtacaactagcagcaacaattgtggaaaaagtacaaggcaaatagctgtctccattaattttcctctgtaggttattattttttttaatattcaaaacatttattatggttttcattttataaaaatgtatattttttaagggatgggagaatgttaaatacttcatgctaggtagaccttgttattaagaacccttccactgtagtaacttcctccagttcatacattcatgagtgcagggtacatatataaatatccacacgcatacatccacacacactgcctcgagggctggggaagactaaaatttattggccacacacagcagggcctctggtggactcacccacattgctcccaggagagcagtgggctcacttccttctctctggtctctgccttcacacagaccaagaaccctacaacacgtcgttaaatccaacttttaaaagcaagaggcatctgtctgaggatgagggtaagcaaagtaggaaagagggtggagataagaacacccaaacacttttagctggagttatttatcactgcaaggggctagggacccagggcagaatctatacggtccaaggggagggacggtgttctggcatggcttagagttcctaataacaagggttaatacagtaacaggaattgatcatttctgggtgaggacagggcaatacgaaaaaatatacatttggaattttagctttttttttgcctctctactgtgtcactaaatatatctctgcactctcacacatccttgtccagtaaagcttcaggccaccagaatacacattttcttcactcgcatacacaacccctcacatcagcattggtgcactagactctgtaaaaatttttcagtcacactttttgtttttaaacttgagtcaatataaaccttgttcaaaatgttatgaaaaaatgtacatgtttatacaaggcaggttgggcaggacactaggggttctccccacttggggtgggccccaggaggagaggctggagtctcagtttgtatctcttatctcctcccaccacccttcccacccagtcccccaggaaccagcagcgccctgccccctagtgagtgtactcacacccctattccctggggaagcagctagttgacctttgccattttccccacacccctggagaaaagagccaggatcagccaggccctctcccttgcaattgttcgcccctctgggccaaaccaaagggacgctgctctgtacaggtagagtccaaggaggtgtcagctcatcatgtcattgctattcacgccataagtggaattcttcattgagtcgttgacttctcgacggaatgctgacaggttctgggtgaacctgtctctgtttttcgtaagaagatttcgctcgatgccttccatcaggttctcaaaacacaggtgcatggcctgctgcttctccggtggctggctgttcacaatactgtttcttaggtcagaaaaatacttttcattaagcaatatcaagccaagtagtggtcgggacatagaccactggttcctacagtcttcaaagatgatgatgttcagcaccgtggacagcatctgctggatcatctctggatgctgctgcatgatgtgcagaaagcggtcgctctcctggttcaggggtgtggtcctcttcttggtgctacgtgacagctgcttgaagaggtatgtcacaatgtggtccaggcaggagcagcagcctgtgcataccatggtgtcaagtgcagtaagtccttcagaaatggaagagagaatatacatgatgacgtgaggttccaggcttgcaataaagttcatatggtcctgggtcaggacttccagtagtgaataataagactggctgagcttggggtaatccaagagatcactgtgaggaatagagaggagcagcttgatgaaggtctgcagagcattgtccagggcatcgtctccatagagacgaaagactccgaaattgacgtaactcccactgagagcagccttcagcatggagaagcagatggagatgcccttgagcttcagagcatagacctgatcctttgggacctctcctagtgtcaggatgcgattgccatacattgttatcatcttgctggtttctcggaagagtaagatgccattgggggaagagacatcaaactggagtcgctgggacctattatgaaccaattcagccatcaacttgagtacaggtgtagtacaggctggatcatggtaccagagctcaattgcccgttggagaattggcatataggatggatatatccattcaaagagcatcatgaagctggtcttggcattgaaagcgaaagcgatccctctcaggtctcttactaggccaactagagttcgctttgcctcctgctcgttgaaactattggtgctaaacatctgggccacagcctcaaatgctgctgtgagtggcagcatgaactgctcatactgatcttcatcctctcctaaatccaccatgaggagacgcccaagtgctgtgtagaaggtagtccgacaccgcatgtctgtcaggttggactgattgttaatacccaaaaatgaaaagtgctcgctcgtgtgattgttcagcatgaactgtaccgcactaagcttcactagcttccttacgctactgtacccaatggagaggtcattgagaagctgtagtgtcttggaggtgattggttcacaacggccccagtacttcaagttggtgatgatttttcctatgaagacgcttaggaccatggtctcatcattcaagcccagaacttctgagagtcggcggtacagcttagaggatttctgcacttggtccccaatgtagatcttacgaaactgttcaaaaaagctcagcatggccaactctagcttctcattacccgcctgggccaaacgagaatctgttaggttcatcagctggagcacccgacagacaagctcaccatccatggcgtcttgctcatcagtgctggcaaaagaaacccggccaccgatcactgctccaataatgtaaaccagccatgtcagccttccctcctgcactgcaatgtccattgggcttgcgctggcgctctgtagcagctcctggtacgactgggccgactggtcaaacaactgcacgaggagtgcacacgtcttctcatattcacaacgcccaatggtggacagctgcaaggttgaagaatctaagaaggctgatctccagctggtgggaatctgcactgtacacaggtcgtctgaggactcatcagtggaagtgccgatgaagtcaaagttgaggcagttatgagtgagcttgagcagttgcatgagcaagccatgctgactttcatcattcaagtttagattctttcctgaagcctgttttagtaaattgcaggaaagtgtgaagatatcaaataatgatgaatcgcgaaaagaagaggctatttttctgtgcttggttaaaggatgggtggtgtctgcttcaatgaggaaggctgtagcacttacttgattaatttcattggttagctgagataaaattgtgacaccaatgatgcagtattcaacactatcctgtaaaaaccttgtgacgtctgtgattgcatttctgaagacatagtcatccttctgacagtcaaaccagcccagttttgtgattctggcatataactgaaaaattgcttgtgtcccgaaagtagccaacttcggccgagtggcaaggtagttgagcacatagttccgaatatctattcgctgttccaatggtagggggttgtttgtgcgtgatacaagcttggtaaggcatgtagctgccagtaactgggagtaagaggaacttcctctttcgaggagtagctggcacttgctcaggcaatcagggctgttggtaaattcaaccaaggctttctctgcctggagtcgagtggttgtgtctgtggtttcatacagctgtttgcacagattctctagttgggccaggctctgcacatgatccgccattttgctccattc

SEQ ID NO: 63491 - DNA, 1158 bp, Homo sapiens
ttttttttttttactatctagagtctagagctcacagtacagagttttgtgaaatacggtgcctatgagaattttcccatggtacacagaagccacagaggtgccctgaagcacagagccattgttggcatacacggtgctcaccctgggcttctcagacaaaacattctggatgcgaagtacttctgatcctggagggtcctcagggttatagttcagtagcttcataggattaggatggcatcctgccaaaatgtctcctgtggcaggatcgacagtcaggttatccactaaggtgcccaactgtatcaccttcagttgagttaaatcccagttatcatgtttttccattatgtgaatgttcttagctgctacatcagctacatagacatacttctggtctgctgagactgtgatcccattggcactacaaaatcctttggccaccactttaacctcccttgggctgtagaaaagaacataagtccagcgaagatccaagatcatctcaaaaaatgacaggagggagttggtaaaatagtggtctctggtggcatagaactgttctggtccaagaaccacaatgtcattcacacttttgagaagttcatgttttatagttttcaggtataccagagaacgttgttgttcctcaaatttaaatatctccacagtggacttcatgtggggatgattcacaacataaagatacacagtattgtctttgtcgatgaaaatactgatcccatgtggattaaataattctttgtcaaatccaccactgatttctagtgcttgtgcccttgggttttgttcattcagatccatcaagaagatttttcctggttcatctggcgcaaagtttggcatgcctggatattttaatccactggagataaaagccagcccactaggaagtatatcaatatcttcagagccactttcaagttcctcaataaggtggcagttttcaggttctactggctccacttctcgagaggcattcaccctttctctaaacgccaggaacatctccccgactaaggacaggccgacccccagcaggaccagcgccacgagcttccccatggtctcggggtgcccagcggcgactgcgcggcgccgagagctctcgggggcgcggcgggcggttcctgc

SEQ ID NO: 63492 - DNA, 1882 bp, Homo sapiens
  misc_feature (1)...(1882): n = a,t,c or g
ggacttcggcacgaggtcacactgcgggtgctcctcaaagacgcgctgctggagcctggcgccggggtgctgtccatctactacctggggaagaagttcctgggcgacctgcagccagacggaaggatcatgtggcaggagaccgggcagaccttcaactcacccagcgcctgggccacccactgcaagaagctggtgaaccctgccaagaagtcgggctgtggctgggcctctgtcaagtacaaaggccagaaactggacaagtacaaggccacctggctccggctgcaccagctgcacacgcctgccacggctgctgatgagagcccagccagtgaaggggaggaggaggagttgctgatggaagaggaggaggaggacgttctggcgggggtctcagcagaggacaagagtcggagaccactggggaagagcccttcagagcctgcccacccggaggccacaaccccagggaagcgggtggacagcaagatccgggttccggtccgctactgcatgctgggcagccgcgacttggccaggaacccccacaccctggtggaagtaacatcctttgcagccatcaacaagttccagccgttcaacgtggctgtttctagcaacgtgctgttcctgctggacttccacagtcacctgacacggagtgaggtcgtgggttacctggggggccgctgggacgtcaacagccagatgctgacggtgctcagagccttcccttgtcggagccggctcggggacgcaaagactgcagctgccatcgaagaggagatctaccagagcctgttcctgcggggcctgtccctggtgggctggtaccacagccacccgcacagcccggcgctgccatctctgcaggacatcgacgcacagatggactaccagctgcggctgcagggctccagcaatggcttccagccctgcctcgccctgctctgctccccttactattctggcaacccaggccccgagtccaagatctcgcctttctgggtgatgcctcctcccgagcaaaggcccagtgactatggcatccccatggatgtggagatggcctacgtccaggacagcttcctgaccaatgacatccttcacgagatgatgctgctggtggagttctacaagggttcccctgacctcgtgaggctccaggaaccctggagccaggagcacacctacctcgacaagcttaagatctccttggccagcaggacgcccaaggaccagagcctgtgtcacgtcctggaacaggtgtgcggcgtcctcaagcaggggagctgagccttccagggcagggtgggctccagttgtcttgagggtccggatgggctcaagttctggagggggtcaatgaagttctgcttgacctcgatgtccagggagtccttcacctctgccaggcgcttcatggactcgccggcatccagcaatgcgtcacctgtggagaagtggtgggggaagccatcataccgggcctgggaccactagactgagacactcctcagcctttgtttttgaaatagcgtttcacaggctggaacgcagtggcgctgtaccagctcactgcaggcctcaaactgggctcaagccatgctggcacctcagcctcccaagtagccgggaccacaggcgttcacccccacacctggatcctttccaacttctttgagatgaagtctcgctgttgcccaggctgcagtgcagtggcatgatctcagctcactgcaacctctgcctcccaggttcaagcaattctcctgtctcagcctcctgagtaagggggattacaggggcctgccaccacatccagctaatttttgtatttttaatagagacgggtttcaccatatagaccnacaaaaaa

SEQ ID NO: 63493 - DNA, 559 bp, Homo sapiens
  misc_feature (1)...(559): n = a,t,c or g
caggctgcttcatgatcaacaactgcaccaccctctccccagattcaggagatatcgccaatacgttgaaatcacgccatgcgatgcaagagcgcactttgcagcagtttttatgtcaacgacaagcgcgcggggaaatcccgccccactgtgacgtgacacatctggcagaattccttaattgtattattcaggggatgtcgatcagcgcacgcgaaggtgcatcgctggaaaaactgatgcagattgccggaacgactttgcgtttatggcccgaactggtgaaataagtcgcaaaaaaagcccctcagcctgagcgaatgaggggccaaattgcagagtacagccttgttatactttgttattcaaaatcagttgcccgttgctatctagcgggatctgcgtacccggatcgcggtccatgcggattttgccctgctgatcgccaatcttataggtcacatcataaccgagncattttttctgacttgtcatacaccgttttacaacgctgttgcgtagtcgtgtaagtatcgctttcctgggagagagccctggg

SEQ ID NO: 63494 - DNA, 1608 bp, Homo sapiens
gggttccgtggccctgcacgtggagaagctgcccaatgagcccaaccgcttgcttatcctccacggcttcctggacgaaaacgtgcactttttccacacaaacttcctcgtctcccaactgatccgagcagggaaaccttaccagctccaggtggccctgcctcctgtctccccgcagatctaccccaacgagagacacagtattcgctgccccgagtcgggcgagcactatgaagtcacgttgctgcactttctacaggaatacctctgagcctgcccaccgggagccgccacatcacagcacaagtggctgcagcctccgcggggaaccaggcgggagggactgagtggcccgcgggccccagtgaggcactttgtcccgcccagcgctggccagccccgaggagccgctgccttcaccgccccgacgccttttatccttttttaaacgctcttgggttttatgtccgctgcttcttggttgccgagacagagagatggtggtctcgggccagcccctcctctccccgccttctgggaggaggaggtcacacgctgatgggcactggagaggccagaagagactcagaggagcgggctgccttccgcctggggctccctgtgacctctcagtcccctggcccggccagccaccgtccccagcacccaagcatgcaattgcctgtcccccccggccagcctcccccacttgatgtttgtgttttgtttggggggatatttttcataattatttaaaagacaggccgggcgcggtggctcacgtctgtaatcccagcactttgggaggctgaggcgggcggatcacctgaggttgggagttcaagaccagcctggccaacatggggaaaccccgtctctactaaaaatacaaaaaattagccgggtgtggtggcgcgtgcctataatcccagctactcgggaggctgaggcaggagaatcgcttgaacccgggaggtggaggttgcggtgagccaagatcgcaccattgcactccagcctgggcaacaagagcgaaactctgtctcaaaataaataaaaaataaaagacagaaagcaaggggtgcctaaatctagacttggggtccacaccgggcagcggggttgcaacccagcacctggtaggctccatttcttcccaagcccgagcagagggtcatgcgggccccacaggagaagcggccagggcccgcggggggcaccacctgtggacagccctcctgtccccaagctttcaggcaggcactgaaacgcaccgaacttccacgctctgctggtcagtggcggctgtcccctccccagcccagccgcccagccacatgtgtctgcctgacccgtacacaccaggggttccggggttgggagctgaaccatccccacctcagggttatatttccctctccccttccctccccgccaagagctctgccaggggcgggcaaaaaaaaaagtaaaaagaaaagaaaaaaaaaaaaaagaaccaacccacctctacatattatggaaagaaaatatttttgtcgattcttattcttttataattatgcgtggaagaagtagacacattaaacgattccagttggaaacatg

SEQ ID NO: 63495 - DNA, 2102 bp, Homo sapiens
ccttttttttttttttatagtttaaagagctttattaatgcaataaattaactttgtacacatttttatataaaaaaacagcaagtgatttcagaatgttgtaggcctcattagagcttggtctccaaaaatctgtttgaaaaaagcaacatgttcttcacagtgttcccctggtgtgaaattggggctccctcgcaaacgctggtttcgctgttcaaaaaagcggaatattgtatagaaaagcatgttgtcttcagtctgctttgcagcatctaaaaattttcgtgcagaaatgttgtcatggccaccaatgccccggataaaccttaaggcagctaacacttggtgtttggaaaggagaacttctactatttcatcatttgctgttgaaagtcgcttcagcatgtccagagatagctgatgagcaggaggatagaaactctctagggataacagcagacaagccaaaggtttggagtcgctgaggacgtggtactgcaggaactgatgcagcatataaaagaggttgtgctggacaagggttttgataacaagttcatgtaggtaatgctgtactgcaatctgaaactggttaagagaacgaatgtattccatcagcacggctatcacaaatttatgaggcatctccttcttttccacgaaggctgacaggacatgggtgtacacatctgactggtccagcaccgcctgggtccgcaccggcctcttgaggagcgggctgcttcggctctgccctgcttccaccgccatcgcataactctgctcggcatccaggtactttttatactcatggttgagtttatcaaaaacagtggctatcacgggcagcgatgctctgtctgactcacttaacatctgtgaacagacagacaggatgaccatcttgcattcctttctctggaggagaaagtccatgagtcttcctttgtctggtaagagatttactatgggctcaagtttcacttggaggttccagaggtaaccttggcttgcgctgataatgatgtcaggttgaaagacaatccaagatgaagaatagagtttacatggaacaggagactggctggtcacggcagcaggacctgtgatggggatctgatagggctggatcgatcgagcaggaagcacggggtggtggaaggtaacggagccgtcaaactctccccgtaacttgatatcgaatattaccgatgtctctgtatcctgatgatgcacgactaccaggttgtccaccacgttcagggcaaactttcccgtcctatttaacttcaatatgtgcatctttttacaggcaccttctcgtggtagatgatagaggaccacctccgctcctgtgctgttggaggtccgagaatgatgcctcaagaagagaacatacagctgcccgtatatggtagccattgcgatgtctctttcggaaaggctgggtttagttgacttaggcgcagctggtaattcaatctcaaatttgggcagcttcgacatagtgccagccctaaagtgaaaaggctgcaggacattctccaggaccgtggtagacagcaagatcacggcgctctcggggcagtacatgtaccaattcacattgagattgtggctcttcaagagtttcagactccgtttctctggtaatacctggtaaaattcgattccttgatctgttatgaagacaatttcagttgaactagtccagcagaatcctagaatgttggcattcttagtcttgcactcctgtgtgtattccagctgggaattatcagggataaaattacaaaaatccacagtctttgaggtcctctgaacagccaatatcttattttctaaggaaaacttaatgcacttcacttctcctttgtcatccattctaaatgagatgggattcctatcatctgggcctttaactaccacgccagtagctccaccagatcgaacagcaaaaacctgcttgttggcctcatcgaagaagacgcagttgacagggttcgccttctcgaactgcaccggccgctcgcacagctccagatagtagtcctcctcgcccatggcgggcgcagcgcccgcggcgggggccccggacgaaa

SEQ ID NO: 63496 - DNA, 1049 bp, Homo sapiens
ggaaggcctggtgcaggagcctctgagctctttccttctgtgaccacggacctgtcagtttccaaacaaaacgcgtgcctcacttgtgtggattttgtcactgtgcatgtatgtatgggtttctggggcattggtcctggtgctctctccacatcctgcatcccgtaccctctgtctcatggcccaggcagtgtgaaggcggagatgctgcacatgtacagccagaaggacccgctcatcctctgtgtgcgcctggccgtgctgctcgcggtgaccctcactgtgccagtcgtgctgttccctatccgccgggccctgcagcagctgcttttcccaggcaaggccttcagctggccacgacatgtggccatagctctgatcctgcttgttttggtcaatgtccttgtcatctgtgtgccaaccatccgggatatctttggagttatcgggtccacctcagcccccagcctcatcttcatcctccccagcatcttctacctccgcattgtaccctctgaggtggagcctttcttatcctggcccaagatccaggccctgtgctttggagtcctgggagtcctcttcatggccgtcagtctaggctttatgtttgccaactgggccacaggccagagccgcatgtctggacactgatcaggccctgctggcccaggtccctgtgcgcatgcacatggaggggtcagggccgctccctagggtccctcctgcccaacatgtggaggtggctggttcccatgaacgtggttgtcagaggcgggggacagcagaggctgcagactggcccacttccctcctccccagggatgccaagcttggatcatggccctaatcccaaccccaaccccatgggaggaggaggaggaggaagaagaggaggaggaggaggaggaggaggaggaggaggaggaggccaggtcctggtggagcctttgcccagcccagtcctctctgcctcctcctggctgaagctgtttgtccaggattaccctcggggctaaagaggaaaaataaagatgttgagctaccaa

SEQ ID NO: 63497 - DNA, 1711 bp, Homo sapiens
  misc_feature (1)...(1711): n = a,t,c or g
ttttttttttttggagttcattagaccttttttattattctaccttttctgcatatgtttgcagttttcccaccgactcctccataaacaaacattttcctagaaacccaaaatatgtagtggccccaaaggagctccttaagccaaagtacttggtacaaagagacccatattcctataaacatgttaagtttgttcctaagcattccagacttttagaataagaacttcatttccaacttttttatttattaacatggggctaaacttttaagaaacaaccctaggtcttctatttcccaggagctggttcaaagtcttaaatgacaatataacttcattatgaaaatatactgaaaaggtacaaggggctgatgtaaaaacggttaatcaagggttcccaggcatccatggggacttaagggtaacctgaaagaataacccccagcccaggctgcaaccagccaggccaggatgtgctggcttnacgtngatgaggtgctaaggcccatcgaatgcctcagaggaaagccggattcacgggggatcatctcaaccctgaggaaatcggttccttggggggtgatttcttgcccttttttttgtttttgtaaggaagagggttcccttcattccagtaactttagttttcccttaataaatattttcaaaaataaaaccaatcatcatccaaacaaacagggagccacttttgtagggtaagggtaaatcacaggataatgtattgggataactctgttttttttaaaataaaaaagccttacatggtcgagggattgatggagtggggatgacgaaatgcacatttcagactttcatcaccaatgaaaaaataaagcattttcatagacttaaaactgtcattagtgcattcggcttttggagaagggatgaaaatgtaaaatacttctacaacaataaaatgttaatagaaatcgtcatgtgctgaggtcattttagtgagctaccattgtttgtttaaatacaagaaaagtaatttcttggtccaaattagtgaaatctttaaaaagattgcctttaaagaacattatttgaggacaatgttttttcagacacattctgatgatattcaaattcacttcataacaatcacagattaacctttaattacacctttcttaaaaagctgtcagatttccatttcttcgggagacattttcaccagtgtgttgttcgattccacaggttaagctttcttcattattattaagaacttcatacatattagagagattgccattcattgctttctcgtcttttcgaaaagacacaggcagacttgctagactaaagctgacgtctttaaaggcatgcaacaagaatatccccccacaatgattgtaaagaagccactcaaagtaccaatgacctcgtcaacaggcatatcttgccactccttaaaaagaatagctgaacaagttaaaactgatgttgtaaagaatacataatatattggagtcacaatggaagtgttgaatatatccagggccctatttaggtaattaatctgtgtgctcacacagacgatgaggctcagcagcagaatccaagccaggggatgccgcagcacaggcttccctgcaaacagctccttgatagcaatgcccaggcccttcacacaggagactgaaaacgcgccgattacagagcagattgttatgtacacaag

SEQ ID NO: 63498 - DNA, 4199 bp, Homo sapiens
cagcacatgaggaacctgcagcaacaggagctgcacaggcttctccgggtggctgacaaccaggaactgcagctcagcaacctgctctccagggaccgcatcagtccggagggcctggagaagatggcgcaactcagagctgaactgctgcagctatatgagcgctgtattctattagatattgagttctctgataatcagaatgtggatcagatcctgtggaagaatgctttctatcaggtgattgagaagttcaggcaacttgtcaaggatccgaatgttgagaacccagaacagattcggaacagacttttggagctcttggatgagggtagtgacttctttgatagtttgcttcagaagctgcaggttacttacaagttcaaactggaagactacatggatggtcttgccattcgcagcaagccattacgcaagacagtaaaatatgccttgatcagtgcccagcgatgcatgatatgccaaggagatattgctaggtaccgggagcaagccagtgatacagcgaattatgggaaagcacgcagttggtacctgaaggcccagcacattgctcccaagaatgggcgcccctataaccagttggctttgctggcagtgtatacgaggaggaagcttgacgctgtctattactatatgcgcagtttagctgccagcaaccctatcctgactgccaaggagagtctcatgagcttgtttgaagagaccaagcggaaggcagaacagatggaaaagaagcaacatgaggaatttgacctgagccctgaccagtggcggaaaggaaagaagtctactttccggcatgttggagatgacaccactcgcctggagatctggattcatccatcccatccacggtcttcccagggcactgagtctgggaaggattctgagcaagagaatgggctgggcagcctgagtcccagtgatctgaacaaaaggttcatcctcagttttctccatgcccatgggaagctgtttacccggattgggatggagacattccctgcagtggctgagaaggtcctcaaggagttccaggtgttactgcagcacagcccctctcccattggaagtacccgcatgctgcagcttatgaccatcaatatgtttgcagtacacaactcccagctgaaagactgcttctcggaggagtgccgctctgtgatccaggaacaagccgcagctctgggcttggccatgttttctctactggtccgccgctgcacctgcttacttaaggagtccgccaaagctcagctgtcctctcctgaggaccaggatgaccaagacgacatcaaggtgtcttcctttgtcccggacctgaaggagctgctccccagtgtcaaagtctggtcagattggatgctcggctacccggacacctggaatcctcctcccacatccctggatctgccctcgcatgttgctgtggatgtatggtcgacgctggctgatttctgtaacatactgactgcagtgaatcagtctgaggtgccactgtacaaggacccggatgatgacctcacccttcttatcctggaagaggatcggcttctctcgggctttgtccccttgctggctgcccctcaggacccctgctacgtggagaaaacctcggataaggttattgcagctgactgcaaaagggtcacagtgctgaagtattttctggaagccctttgtggacaagaagagcctctgctggcattcaagggtggaaagtatgtgtcagtggcacccgtcccagacaccatgggaaaggaaatgggaagccaagagggaacacgactggaagatgaggaggaggatgtggtgattgaagactttgaggaagattcagaggctgaaggcagcggaggcgaggatgacatcagggagcttcgggccaagaagctggctctggccaggaagatagctgagcagcagcgtcgccaggaaaagatccaggctgtcctggaggaccacagtcagatgaggcagatggagctcgaaatcagacctttgttcctcgtaccagacaccaacggcttcattgaccacctggccagtctggcgcggctgctggagagcaggaagtacatcctggtggtgcccctcatcgtgatcaatgagctggacggcctggccaaggggcaggagacagaccaccgggctgggggctacgcccgtgtggtacaagagaaggcccgcaagtccatcgagttcctcgagcagcgattcgagagtcgggactcttgcctgcgagccctgaccagccgtggcaatgaactcgaatccatcgccttccgcagtgaggacatcactggccagctgggtaacaacgatgatctcatcctgtcctgctgcctccactactgcaaagacaaggctaaggacttcatgcccgccagcaaagaggagccaatccggctactgcgggaggtggtgctgttgacggatgaccggaacctgcgtgtgaaggcgctcacaaggaatgttcctgtacgggacatcccagccttcctcacgtgggcccaggtgggctgagggagccacactggggcccccccccccggggaaccgttcctgaaaggccaccaggcgcccagggtagcacggaaaatgcccacgtgcctgagccaccaatccacccagacaataaaccatcctcttccaacccacgccacggccatgctgtgggggacctgctcctcacagagcccctcccaaggatcgggcggaagctgctgggaccctcctgggctgccaggatttagcagggaggtggctggctacagcaacagcagctgggcaagccagataggccgctcatgctctcagcctttctccctcccccgtctcattccaaggctgagggagggccttctcgcctggggacgcagccactttctccagtggagacagggcaggggttctgagtttccgtcagatgcagtgaaatcacagttccctttcatcttcagaacctctgtcgtgaatgtgttcaagaggctttggttaagtcaggaagaagtgcccagggtgtgtgtccccagtctccctgaggcctggactcgcccatgaacccaagtcggcttctagacagcatgtccctaacagcagccctgggcccccacctcttctaccatccaccccagacttaccacacacccttcctgctgctcctcttcctgcccttatcaacctgggtccctcacacttcgccagttgcgtccccgtggacagtcatgagtctagaggaaaggggcatctggtctcaggcccgtgctctcgggtggcctccacctgctccctttctcctcactggcctttctttccgtctagcttcctcttcaggaaatgtcctgactcccctcagctcccccttcacccctccttgcccgcctaccctccctccagaatagcccctcacccttcttccccttctagttgatccttttcacctccctgatccccttcatttcttcaccgcggttcctcgtcataggggttctcactctgaactttccctctctactacccatggcaggaacctagtacaggtctcccacccagggccttccaccctcggctcctgtgctgggagaaacttccaggcgtggacagcccagcctgaggcattccagtgctggggcaccgtcgcctaacctggtttctagctttgccctcactccccggaaaaactgacactgacacaggggccctttccttgcccctttagctggtacctcagtggggaggcttccttaccaagaatgagttcctgaaacccagggccagagacaaggacaacttaggggaagacggggttttcggtggagccaggggcaaatcttaatgggaccagtgggggataccccagagcccatggcctgactgcacagcctgcctggaggatgggtgcgcagctctgccctccctgaggcccaggactatgccagaagcgatggggtaccgtgtaggggagccaaggccagtagtttgggggtaggagtcccctagagtctcagaagactgggctctttggagtacagggtccccggcctctcctttaagattctctccccagctggaaggccgatgactgggtggtcgggagggagacccagctctcctttctgtcccgtttgcagcactggttttgtttccttaataaatttttagttatgaaacat

SEQ ID NO: 63499 - DNA, 1715 bp, Homo sapiens
ggcaaggcgaggcgaaagctgcacagggccctacgcggccgcctcagcatgtcggacttcgacgagttcgagcggcagctcaacgagaataaacaagagcgggacaaggagaaccggcatcggaagcgcagccacagccgctctcggagccgggaccgcaaacgccggagccggagccgcgaccggcgcaaccgggaccagcggagcgcctcccgggacaggcgacgacgcagcaaacctttgaccagaggcgctaaagaggagcacggtggactgattcgttccccccgccacgagaagaagaagaaggtccgtaaatactgggacgtgccacccccaggctttgagcacatcaccccaatgcagtacaaggccatgcaagctgcgggtcagattccagccactgctcttctccccaccatgacccctgacggtctggctgtgaccccaacgccggtgcccgtggtcgggagccagatgaccagacaagcccggcgcctctacgtgggcaacatcccctttggcatcactgaggaggccatgatggatttcttcaacgcccagatgcgcctgggggggctgacccaggcccctggcaacccagtgttggctgtgcagattaaccaggacaagaattttgcctttttggagttccgctcagtggacgagactacccaggctatggcctttgatggcatcatcttccagggccagtcactaaagatccgcaggcctcacgactaccagccgcttcctggcatgtcagagaacccctccgtctatgtgcctggggttgtgtccactgtggtccccgactctgcccacaagctgttcatcgggggcttacccaactacctgaacgatgaccaggtcaaagagctgctgacatcctttgggcccctcaaggccttcaacctggtcaaggacagtgccacggggctctccaagggctacgccttctgtgagtacgtggacatcaacgtcacggatcaggccattgcggggctgaacggcatgcagctgggggataagaagctgctggtccagagggcgagtgtgggagccaagaatgccacgctggtgagccccccgagcaccatcaatcagacgcctgtgaccctgcaagtgccgggcttgatgagctcccaggtgcagatgggcggccacccgactgaggtcctgtgcctcatgaacatggtgctgcctgaggagctgctggacgacgaggagtatgaggagatcgtggaggatgtgcgggacgagtgcagcaagtacgggcttgtcaagtccatcgagatcccccggcctgtggacggcgtcgaggtgcccggctgcggaaagatctttgtggagttcacctctgtgtttgactgccagaaagccatgcagggcctgacgggccgcaagttcgccaacagagtggttgtcacaaaatactgtgaccccgactcttatcaccgccgggacttctggtagaggcggctgggggagggtgggggcagggctggctgggggcttctccccactcccgcccccccccttatccccctctgaagacgatgggcagaggagtgacagccgcagacacacgacagccggcagcaactggaatggcagcaattaagggtggggagcgggggttggggggttggggggttagggcagggaggggactggggaagtgcgcacacagccccacacagacaacacgcacg

SEQ ID NO: 63500 - DNA, 357 bp, Homo sapiens
ctgtgacaagctgcacgtggatcctgagaactggaggctcctgggcaacgtgctgatctgtgtgctggcccatcactttggcaaagaattcaccccaccatgcctggcccctctgctggtcttgattgaagtcattcatgcaactgtaatcatctaatggctcatctgggactgagattgtctcaagcacatgtctggcagttggtgtcacttgttgattgggcctctctcttaacgtaaggaagtgagccaaagcttctcacattatgacagcagggttcccatagagccaagtgacagctgtaagttctcttgaggtatcaacttggaagacacaccattacttctgcattgtat

SEQ ID NO: 63501 - DNA, 458 bp, Homo sapiens
gaattcatgacttaacgtcagttagtattgcttaatggaatcgacatacatattgttataccgtgaatcattttcagtcaagaccacatttctcagagtttgccaaaacaaaccttctgccttcgggttgtcaggccactggaggatggagctcttacagatccgctgccgtagcctcaaatactgagaatgctgtaacactggctccagcaggataaatataatcacatccatgttctcatccattagcctctgcaaagccaagtaaaaagctgttttaaagttccagctttttgcatattttttggttaaaacaaatactgttttcttgctttggttgatgctctgcatgaggttgtcgatgatggccaatcccgggtcccaatccctctcctctagacaaaggagaacgtttttgtctcggctctcttcaaggtggtagcgcagctcatttatca

SEQ ID NO: 63502 - DNA, 345 bp, Homo sapiens
cttggcagccttcgcggtggccacggtgacccagagcttcctgctcagcgccttcttctcccgcgccaacctggctgcggcctgcggcggcctggcctacttctccctctacctgccctacgtgctgtgtgtggcttggcgggaccggctgcccgcgggtggccgcgtggccgcgagcctgctgtcgcccgtggccttcggcttcggctgcgagagcctggctctgctggaggagcagggcgagggcgcgcagtggcacaacgtgggcacccggcctacggcagacgtcttcagcctggcccaggtctctggccttctgctgctggacgcggcgctctacggcct

SEQ ID NO: 63503 - DNA, 369 bp, Homo sapiens
caaacccatatactctatcctcaatacctccctccacaacccattattctgtcctagcaaacctagctgaccccatagatcctaattcctttcgccactcctctttccattccttaaaaacagccctagaagctgccaccacgctagctctccctaactcatcccaacccttttcattacacacagccaaagtactgggctctgcggtcaaaattcttacacaagagccggaaccgtgccctgtagcctttctgtccaaacaacttgaccttactattttaggctggccatcatgtctccgtgcagaggctgccgccgctctaatacttttagaggccctaaaaatcacaaactatgtcgacgcggccg

SEQ ID NO: 63504 - DNA, 1451 bp, Homo sapiens
  misc_feature (1)...(1451): n = a,t,c or g
tataggctaactatataaggttatttcagctgtgatgatccagcagttttgttgaacttaaaagagcctacctattaaggatgctttatcgtgatgtaaagaagatggtgccttggttagtgccttggaattgaggattttgtgattccaggagaaagtacatcaggcagtggtgtaaatgctggtccatggcttacagatgtgactctttcctcaggttcattccgacaggaccaccccagtagcatgggtgtttatgggcaggagtctggaggattttccggaccaggagagaaccggagcatgagtggccctgataaccggggcaggggaagagggggatttgatcgtggaggcatgagcagaggtgggcggggaggaggacgcggtggaatggggtaagagcaaaccttttctccttttacctaattttgtttcatccataggattttcagtggaaagaagggactgaaagacataagaaattaatttctgcatttccatggacaatctgttgagctcaagccatcttctaaaacatggaaatgtcatctttgtggcatatattaagtggcagtttattttctttccctgccagtatacttcgttgggtcggggagaacaaagaatggttttgaaaccagagctttcagttcccttcatggtttccagaggtgagaagcctctgtgggtagtagatttgggatggaacacacacaacccttctaatgaccctaagttgttaactaactgcctttgaatggttgtcttgaaatacctggtgtatatactgcagaaaaggaatgcagctgttttccacagtgtttgtccccaacttctgtttgtactcagaatcgttgaacatatgaagattttggtcccataatccttaaactatagcctgaggtgcacctgattacatagagtttggatggagcaaagaaaaatccaatagcattttgcagagtaatgtatataattatgggctcacttcctactggagatgttgaaagtctaaatcggtttgaccattttgattgatggcacaatctggtttagaaaactttgtttagatcaatgacataaccctgctgcctctgcctgcccttcccctcccttctcccatccccttttccctatctggtgtctgtactttgatgaaggtgagctataatattggtggttaacataatccagaaggcttagttctgtgtgtgttctgtccctatataaactnggaaaaaaaaaaaaaagggggggccgttttaaaggatccaattttacgtccccgggctggcaaggtaatattttttttatggggcccccaaaattaaattcccgggccggggtttaacaacggggggaggggaaaaccccgggggttccccaattaaatcgccttggaagaacacccccttttccccggggggggaaaaaaaaaaaaggcgggg

SEQ ID NO: 63505 - DNA, 331 bp, Homo sapiens
caactgataggggaaaaacccaacacactcttggtcttcatgtaattctgtgaataaaatttgaaataaatatattaaataaatacagtagtacctgctgttggaaaagttcttcctcaacaaccactccagctgcttcttcctcctcctcctcttcttcaggtatggatgctttaaagactgtacttctttgagcaacctcctaaaaacaatagtagtttaagttaataaacacacttaaaatcaccaaatgcggtggatagggaccttttctttgcttaagagacagcatttcttgccaggcgcaatgggtaacaccttgaattccaga

SEQ ID NO: 63506 - DNA, 1006 bp, Homo sapiens
  misc_feature (1)...(1006): n = a,t,c or g
atcaccaagacctattgattccacccattccacttctcctgaagctttccccttctctgcattttcccatcatcacattctactcaacctattgacactgaccacctactatgggccaggcactgcgctaggctgtaagtctacataatgatctcaacaaacaaactggacaaataatagaggatgatttataagaagaagacatcaagcgaggaaaaagaaaaaggctatcctctgtgatgtgtgacagtgatgagagtgatgacagcgatatcctagttagaaaagtaggtgttaaacgtccccgtagagtggttgaagatgaaggttcttcagtggaaatggagcaaaagactcctgaaaaaacattagctgcacaaaagcgagaaaaacttcagaagctcaaagaactctcaaaacaaagatctcgtcagagacgcagtagtggtagagattttgaggactctgaaaaggaatcttgcccaagcagtgatgaagttgatgaggaggaagaagaggataattatgaatctgatgaagatggagatgattatattatcgatgactttgtagtgcaagatgaggagggtgatgaagagaataaaaaccaacaaggagaaaaattgactacatcacaactgaaattagtaaaacggaattctctttattcttttagtgaccactatactcattttgaaagagttgtgaaggctcttctgatcaacgctttagatgaatcttttctgggaacattatatgatggcacaaggcaaaaatcatatgcaaaagatatgctaacatctcttcattatttggataaccgctttgttcagcctcgtctagagagcttggtatctagaagtcgttggaaagagcaatataaggagcgagtagaaaattattctaatgtaagtattcatttgaagaatcctgaaaactgttcctgccaggcttgtgggactgcatcgctactgttaantattcagtgcnttttttcaggagagtt

SEQ ID NO: 63507 - DNA, 1498 bp, Homo sapiens
tttaaaggggaaaggagggtttttccagtttggggaaaaccaaggtttcacgggggggtcaattaaaaaaaaaggggtttttaaccaaaggggtttttttgttgggggtttaaaaattaaccggttttttacccccagggaaaattttttacccaaaaggggggtttgaattttttggggtttttgccccgggaattttttgttttggtatatttacgggggaaattttttttttttttttttttttttttttttttggttaattctgccacatttaatgttggtgagagagtgatctatcctaatgacattttactgtttaaaaaagtttcctagccatgaagccctgctactgatttagacaaggtattatggtcattactttgtacccctatccttccaagcacttctggtacttcagtcgtttttactgatccaccaacacctaaagaggctatgctacagtctctagctaaatggaagacacattcatccttctccctctgactgctttgatcatcatttattgcatctcataactaattttctaaagtttggattgggacttttcaggtcctttttggagggcaaaggaagtgccagcttctctggggaacttgtttttaaatccaaagacttgaaccacattccctgcacatgaacatgtttgcttttatcccttctctcattgtctccttcccatcttagtaccattgtagttataaacatctgcattttttagaagcattttacccatttatttttttaaacattcaagaactgctgacgtactgtggatgtagagtataaaacttgaaaaatgcagatgttgaaggaataataggtatcttgtgctttaatactttatggcaggattgtactataagcaaatgaattaaacagctatgtaaatcataaagaaaaactaaaaatgaaccaaagtgaaaggataacttccaggcagtatctttctattgtaacctgttatttaaggaaatactagtgatttcttctaaataggatgtaaaacttctttcaaattactcttcctcagtcctgcctgccaagaactcaagtgtaactgtgataaaataacctttcccaggtatattggcaggtatgtgtgtaatctcagaatacacaggtgacatagatatgatatgacaactggtaatggtggattcatttacattgtttacacttctatgaccaggccttaagggaaggtcagttttttaaaaaaccaagtagtgtcttcctacctatctccagatacatgtcaaaaaaagaaaggtgtttgtgcttccgttttgtttctgctcagtaatatagtcaagcaagtttgttccaagtgacccattgagctgtgtatgcatttttgtttatttcaataaaatatatttgtattatttgtccttcatactatccatccataccacactatcttctgtatcaggtagtctaatagaaatatacctgttttgttctaaaaaaaaaa

SEQ ID NO: 63508 - DNA, 3127 bp, Homo sapiens
  misc_feature (1)...(3127): n = a,t,c or g
tttttttcgctatctaaggacataactttattggaaacaaagagtggggtgcagaagatggctaggagtcaggctctgagggaggtggtggcttctcatcatcagggggacaatcgatgaagtcggccagcatggcagctgtgtcatcctgctccttttcctggagagcttcggcctctgtctctgtctccatctcttcttctgcaggtgtctctggtgggggctgcaccttgtcactcccatcctcagtctcctcttccaacagggttgggggagcagagggctcttcttcaacaagctcctggggagggggccctgccgcagggctttccccttccctctccacctctccctgggaggggagcgcttcaggggccagggtgggagctgtgtcagccccacgctcctcctccgtccctggctcctccacttccaaaagcagcccgggttcgggttcgggttctggctgcacctttgggggagactcagggggaggcagagctggaggcagggttgggggtggaggtgcaccttcttctacctcccctcctgctgtgccaaactccaggtcttccacctcttccagttcttcttcctcctcctcatcctcctcttcttcttcttcctctaactcaccttcttcttcctcaaattcttcctcaaactcttcttcctcctcttcttcctcttcaaaatattcctcttcatcctcttcctcttcctcaaagtcttcctcctcttcctcttcttcctcttcttcttcttcctcttcttcttcttcttcttcttcttcctcttctccttcttcctcctcctcttcatcactgctgttgatattaataactgtcaaatcctcttccagggctgggggtcctcccccaccaggagtcccttcagggaccaactggggtggagggagngtcacaggaccaggaacaggcggcggcggaggtgggggcggcgggagaggccctggggccgcaggaagttcttcaggctcctccttcgctggcacaggaggggaggctgttggtggcccagtgggggctatagggggtggtgtggcacctgagggtggtgggggtggcagggggggaagcccctcgggcacgatcaccacgctgtcatcagagtcactttccaaggagatctccacatcagatgcctcctccttgtcatagtggacaaaggctggtctgggcactctccccccaaaagtttcatctgggggtatagtaggtgggggagtcccactaggggcaaggatggggtcctcatttgagcctgcccggtggttctcagggccaggaagaagccggggaggacagacactaggcctggacagaaggcctaggaggttggctgtggtggaggtccagggctccgagggcacagggcctgctgagggcatggggcctgctgaagggcatggggcctgctgagggcatggagcccactgagggcatggggcccggaggatggaacggtggggccctgaagggcgatggggcctcaggagggggactggagcaggtgtggggcaggtggggcccatgggctgcaggggaggaacccgggggtgggtcagagcagcacaggtcaccagtgcttctgagcaagaaagaggagacctcaaggctatcttctcgctggccgagggagaaggcttgcagggcacaggcaagaggaggtggcttggcggggccatagcttcccccacatccagctttagcttcttgggggcgctaggcttcccagtctgcaaactcccatcagggctcccccgcgggctacgcagcttaagggcatcagctggcggggagatgtcgctgagcaggtgggtgagcagggcctctccagaggctcctccctgaagcattcccgccgaggccccacaaacctgcacccacagctctaatatcgcatacaccttggtccgaaccgtgctgtaaggcctctcctggcctggagagagggaatctctaccgatgctccaggaattgaggacctggggaagcaggcggccgatcaggatcccaaagcgcaagagccggcttccacacgcgaggatgagtgcagacagcaggtccaaggccttcaaggtggatagagggcagcagcagcagccgcagggaccatctccatgcaagctaatattcttgctactgacgctgagggtccggcagatgaaatccaggatttcctgcacagggacggacacgggagctccaaactcagagctgagcatgagccctaggcagcgggccagtcccgaaaacctctgccgaagctggagaaggacatgggcatcaccatcttctgaggacagcagcatctccaccccagggccttcattctgcacaggagcagtctctgctccctcgtacagggcccccagcagggtgtgcagtgaggccagcagactgtgtagctcctgctcccagctctcggtgtgcttcaggccttgggaaaagccagcccctaaagagggcagccgggaataacactcacaggccaactgttggagctgagggctcaaggcatccaccctagacagaaaaaatgaggccagcttgcctttgagagaaccacaagcccgagggaaataggtcatacaagccttcattccttccaatgctgactgctcacactctggcctgaggcccagcagggaggtgagaaggccagggaggtggttcatggagatgtcccggaacagtgcaggcagctgggctgcatatcggaggaggtccctcaggacagccacggccagctccattgtggcaggcgggtcctgggtctgtaacacctgctgaatgctccgaagccaagacacacagtgctgctggaatagctctgtggggctctcccctaccagcagggacagcagacacaggccctcaaaccgagttttgatggaactgagacgtgcattactgagactcaccaatgccccaagagctgaaaggttctgggccccgcccaccgacccatgcagccgcaataggcacatgagcccgggcaaatgtggggccgagcggtttgggggatgcaccggagcaacggcagaccccgttcgaggttgcagcaaaccagaaacactctccagcagcagcaggcggagccg

SEQ ID NO: 63509 - DNA, 760 bp, Homo sapiens
gggaataagcttgcggccgcggaggacctgtcggacgcgctgtgcgagtttgacgcggtgctggccgacttcgcgtcgcccttccacgagcgccacttccactacgaggagcacctggagcgcatgaagcggcgcagcagcgccagcgtcagcgacagcagcggcttcagcgactcggagagtgcagattcactttataggaacagcttcagcttcagtgatgaaaaactgaattctccaacagactctaccccagctcttctctctgccactgtcactcctcagaaagctaaattaggagacacaaaagagctagaagccttcattgctgatcttgacaaaactttagcaagtatgtgaaacaagaagttctgggtcctttcatcataagggagaagcttcagaaagttccgaggacctgctaaaactaaaatcagctactagaatctgctgccagaggggacaaagacgtgcactcaaccttctaccaggccactctcaggctcaccttaaaatcagcccttgatcccatttctgggcaatttagacagtgaaactgactttgtttacctgcttgcagcatattagaacagacgatccatgctaatattgtattttctcttaaaacatagctttcctgtaatttaaagtgcttttatgaaaatatttgtaattaattatatatagttggaaatagcagtaagctttcccattataatatatttttgtatacaaataaaatttgaactgaaaaaaaaaa

SEQ ID NO: 63510 - DNA, 1368 bp, Homo sapiens
gcagtgtgctggaattgatggacgtagtcggcacaatgaggaccaggcttgctgtgaagtggtgtatgtggaaggtcggaggagtgttacaggagtacctatggagcctagccgaggccagggactctgcttctactactggggcctatttgatgggcatgcagggggcggagctgctgaaatggcctcacggctcctgcatcgccatatccgagagcagctaaaggacctggtagagatacttcaggacccttcgccaccacccctctgcctcccaaccactccggggaccccagattcctccgatccctctcacttgcttggccctcagtcctgctggtcttcacagaaggaagtgagccacgagagcctggtagtgggggccattgagaatgccttccagctcatggatgagcagatggcccgggagcggcgtggccaccaagtggaggggggctgctgtgcactggttgtgatctacctgctaggcaaggtgtacgtggccaatgcaggcgatagcagggccatcattgtccggaatggtgaaatcattccaatgtcccgggagtttaccccggagactgagcgccagcgtcttcagctgcttggcttcctgaaaccagagctgctaggcagggaattcacccaccttgagttcccccgcagagttctgcccaaggagctggggcagaggatgttgtaccgggaccagaacatgaccggctgggcctacaaaaagatcgagctggaggatctcaggtttcctctggtctgtggggagggcaaaaaggctcgggtgatggccaccattggggtgacccgaggcttgggagaccacagccttaaggtctgcagttccaccctgcccatcaagccctttctctcctgcttccctgaggtacgagtgtatgacctgacacaatatgagcactgcccagatgatgtgctagtcctgggaacagatggcctgtgggatgtcactactgactgtgaggtagctgccactgtggacagggtgctgtcggcctatgagcctaatgaccacagcaggtatacagctctggcccaagctctggtcctgggggcccggggtaccccccgagaccgtggctggcgtctccccaacaacaagctgggttccggggatgacatctctgtcttcgtcatccccctgggagggccaggcagttactcctgaggggctgaacaccatccctcccactagcctctccatacttactcctctcacagcccaaattctgaagttgtctccctgacccttctttagtggcaacttaactgaagaagggatgtccgctatatccaaaattacagctattggcaaataaacgagatggataaaggaaa

SEQ ID NO: 63511 - DNA, 4090 bp, Homo sapiens
gtggcacagagaatgacagtggtggtcctcaaagccagacacttgccgaagatggatatcaccggtctctcaggtaatccttatgtcaaggtgaacgtctactacggcagaaagcgcattgccaagaagaaaacccatgtgaagaagtgcactttgaaccccatcttcaatgaatctttcatctacgacatccccactgacctcctgcctgatatcagcatcgagttcctcgttatcgacttcgatcgcaccaccaagaatgaggtggtggggaggctgatcctgggggcacacagtgtcacagccagtggtgctgaacactggagagaggtctgcgagagcccccgcaagcctgtggccaagtggcacagtctgagcgagtactaatcctgttcttctctcctctaatccccgggggccaagctggggagggatgtggaggggaaaaagatgacagagaagtggactccaaacctcattttagttgtagaagaaaatttcttacaaaacaaattccacaaagaacaccctatatgaccacagctgcagatcagttcttagcaatgatgtttttttttctgctttgcaaggcgctagaatcttttattttactttattttttttgaggtggagtttcgctcttgttgcccgggctggagtgcaatggtgagatctcaactcactgcaacctctgccctccaggttcaagggattctcctccctcagcctcccaagtagctgggattacaggcacccacgagcatgcccggctaattttttgtattttcagtagagatgggtttcaccatgttggccaggctggtctcgaattccagacctcaggtgatccacccgcctcggcctcccaaagtgctgggattacaggtgcgagccaccgtgcccggcctctggttttgttttgttttttttttttaatgggggacaaaagagagggaaagacccctataaaatctatatataacaatgtaaccatatacttgcatgtcttaatacaaactgaagaaattagcctaactgccaatatcaagttggcagattttaatccatggaaattgtgttttgtgctgaattgtatttgctgattacctgaaattggcttctttttattgggcttctctggagaatttctcccactccccacctctgcagaagaaaattttgctcttataaaacctcatgttttcatcattcccatcttttctttttattgcctcttatatctctgctctttgacctcaaggtctagaggtctgcagtaagccaagaaacaaaggtggggtggatgaggcaaggtttgcaggagaaagaggaattgagaaatggggtatttttgctatcagctcttctgctatgaagtagtaaaaggcagtctataattaactgacagacctaactgaagcacagagaatacatcagacttatgcatccaagacatcagaacttggattttatcaaacttgatgacttctctaaaaggagctttggaaacttcaaattcagctataggatagtaccaatgaacacatccagctgatcccaaaagctgttttcaggtataaggacaaggagaggagacaagtgacgacagccattcccctttgcagctatctactgtagtgacagccatttcttggttgatgggttggaagtcatcagaggtttgaagaattacactggcctttgtttttctggaaatgccgaccatggagatgctttagagtcttctcaaatagcttagatgttgtaatgaggttagctttgcttcataaaacaggggccctcagaagttctccttaaatttttcaataaaaatttagctcttaaaaaaataacagtgtgactgagtgaatgaagataagttggattctttcagagcattcttttcctcaaaacgagctgcataattcttggaatttatgtcttaccacatggtggagggatggaggaactacaggatgcaattcttcttctaccaatgggcaatagaggttgagagagattcagcatctttctgggattagaattcaagtctctttactcctacagcagctgtgtctccaacgttgagactttgcagatggcacagactccatggataataggtaaacttggggccgggcgcagtggctcacgcctgtaatcccagtattttgggaggccgaggtggaaagatcgcttgagcccaggagttcaagaccagcctgggctacatgacgaaactccatctctatcaaaaatacaaaaaattaactaggtgtggtgctgcacgcctgtggtcccagctattcaggaggctgaggtgggaggatcatttgagcccagaggtagaggctgcagtgagccatgatcatgccactgcactctgggctgggtaacagagtgagatcctgtctcaaaaattaattaattaattaattaaaataaactaggtaaacttggataggcagtagatatttttgcccacctgaggaggaactcagtcaagctgttgcttaacagcttgatccagggcgtgaaaggttagttgagactgaagtgttcacttccatagaagaacatcacttttaaccttgctttggcgaagggagtcggaaagctgagtctctatggacgggggggtgatcttgctttcagtgttccctcagcttttgtggatttaaaaccattctgctcccccttaaccttttgtttgatttcagcccatgttcttgacaatgcagagcaattctgagcagtcacaaagcctactctctgttcttgtccctgccaacccccaccccccataatctgactcacaacttcaccatcagttggggtcataccactagtctctgtcctataccccatgaaatgtaaatactgtatcataagtagaagaaaataatttttgttttctaaaaatgcattttgagatagtttaatgtaaatctgacaggagcattctgaagccccattaggaaaaaatttaaatggttcctcttcatcgccttaatgtctaaagatcagaaatcgctgagcaaacccgcttttgtttccttcccagaaacaatgcaaaacaacaggtggagatagtctggtctttgccctgctgtgtgtgcctctgtagctcctcctgacaaacgtctgggaaaacagcctcaccccactctcctctctcttccccatttccttgtagctttattccttgcatctttgggtctactgagcagtgggtgctgaggtgacaggggaggaaccagttgttctgtagcctaggaactgcctcagtgtctttgccagaaaaaggcaaagaggcggacagtgcagggctcctccctcctacctcaggcctgatccatcgtgcccttgactttgccgtctcaaagtttcttagctgactttggctttcacatttgttctttccagagctaactgataagagtggaggaggaatgccttctcctaagagtcagttgaaagaaagacaagagagtcacatcttagcttttgcacaaggcattcgtggtcaggaataggttagggaatggtcacttctgattttccaacagttgctccttctctgaagagatcttgattcctttgggaagacaagaatttttcttaataacaaaggtccctttatgagttattccttctttcagttcatctcactggagcacagccaagatggacatgtttatggacagtgctctagatgtgaaaacagatagaactggtttgtgggacaggggcagcttgctcaggagagggaataacgcaggtcccttttcttggaaggcttgtactatggccatgacagtgacattgccctcaccatgatccctctccaaagtggttgtctttctttaccttgtgtcttctcttgtaaaaatgaaactcaaaaataaaataaatgtgtcaaattttgaaaaaaaaagaaaactgaaaaagctaacatgaattgtgtgaaattgcataatgctgtaatgctaatctacaatatgtaatgctatcttgtatgttgaatttgttaatgcaccacacaagtgcaaaataaagactgattcacattacataggcaaaaaaaaaa

SEQ ID NO: 63512 - DNA, 2679 bp, Homo sapiens
cttccatgacagcatcaccctcattgttctgtcatctgaggtgggcatctctgagctgaggctggagagactactccaaatggtgtttggagccatggtccttcttgtgggacttgaagaactgaccaatatccgcaacgtggagagactgaagaaggacttgagggccagttattgcctcatcgacagcttcctgggggactcggagctcatcggggacctgacccagtgtgtggactgcgtgattcctccagaggggtccctcttgcaggaagccctctccgggttcgctgaggccgcgggcacgaccttcgtcagtctggtggtgtccggccgggtggtggcagcaacagagggttggtggcggctggggacgcccgaggccgtgctgctcccctggctggtggggtccctgccgccgcagaccgctcgcgactacccggtgtacctgccgcacgggagccccacggtcccacaccggctcctgaccctgactctgctgccgagcctggagctgtgtctactctgcgggccgagcccacccctcagccagttgtatccacagcttctggagcgctggtggcagccactgctggacccgttgcgggcctgtctgccgttgggaccccgggcgctgcccagtggcttcccccttcacacagacatcctcgggctgctgctcctccacctggaactgaagcgctgcctcttcaccgtggagcccttgggggataaagagccttcaccagaacagcgccggcgcctcctccgaaacttctataccctggtcacctccacgcacttcccaccagagccagggccaccagagaagacagaagatgaggtctaccaggcccagctgcccagagcttgctacctggtgttggggactgaggaaccaggcacaggagtgcgtctggtggccttgcagctggggcttcggcggctgctgctgctgctgtctccccagagtcccacccatgggctgcgaagcctggccacccacactctgcatgccctcaccccacttctttgactacctagcagtgggtgatggacacagacatggggctgttagcgtctctctgtttattcgctcacaataatacacagcccctggatggggaggggggtaggaggggctacaacaagggtggggtgggaggggatggagacatccacttccctggcccctctcccctctgtgcttgggggggaaagggagggagggggacttcccctaaccccccagaatgtaaacagcagcagatgaacaaaaaaaaaaatacaaaaggccggaggaaagtcccaggcatcccccaaaccctggtgtcttctctgtcaccagtggaggtcccccatccaccaaaactgcctcagtccaaggggctgcccagtgccggccacatcccccggggcagagtccagggctcagaactgctgtgccagcagctcacacaggtgacgggagacgggctccttgctggtgcgcagggtcagccggtacatctgggcctgggcattgggctccagccgaagcagacagcccacctgcagggctttagtctggatgatccccgcccccacgaagttctcagggttggggtccacattgtccaggagagcagagccaaaccccagaagcttggccttagtaacttctgcgtccatggggtggttggctttgaagattttctgcgcctcctgttgagggaggctcagctgcttccagcgctggaagaaatcctgggccgccatctcggtgggctggaagaacttgttgatggtcactgggagcttcagggtgagggcctggggggcgccaccgtaccggaagcgcacggacagcagcgggggcgtcaggaagtcccgcaggcactcgatattgagcacctgctgcacctgcgcgccgccgtccacctgcgccgccacgcgcttggtctgcacagccagctgagtctggaggtctcccgggtgaaccacagtgggtgagaaattctggaactgcaccgaggtcttgttgccatagaagagatacatgcggcccaggttctgtcggaactctgacttgactccgatctgcagcagctggttctcgaacaggaccccgttgttcttacacacaaacttattcagcaactcatcggcttccggaatgggagggccgatgtcctcaggacctgggctgaggaaggcctcctcgggggtgggccccaggctgggctgggcggccgggccatcgaagacgtccaccagaaggttccctgctcctgcagaagccgggggtgctgccgggggaggggctgcccgcagccccaggaggtcggcggagggcgagggcgtcgacacagtgctgggggtgggctccatgcccccgttgatgtcgttgctgctggggtccctccggccatcgtccagggcgctgccggcccctggccccttcttgcgtttcagcttggccaggatggacgactcgcgctcggggaagggcggcatctcctccagcaccgtggccaggacgtcggtgctggccactgagctgagggtgaggtactccacggctcgctgctgcagctccacgtcagcattgcgcagctgggagccggcccgcaggacgccctggatggtggccttggtctcggggaagaggttgatgaacttgatgtaggtggacagcag

SEQ ID NO: 63513 - DNA, 4049 bp, Homo sapiens
gaacttattcctgcccagagttcagacacagccagaaattaccatttcatacttcacagaatggaggtttcagcagccaaagccccaagtgccgcagacttgtctgagattgaaataaagaaagagatgaagaaagaccctctcaccaacaaagctccagaaaagcccctgcacgaagtgcccagtggaaactctttgctgtcttctgaaacgattttaagaaccaataagagaggcgagcgacggaggcgccggtgccaggtggcattcagctacctgccccagaatgacgatgaacttgagctgaaagttggcgacatcatagaggtggtaggagaggtagaggaaggatggtgggaaggtgttctcaacgggaagactggaatgtttccttccaacttcatcaaggagctgtcaggggagtcggatgagcttggcatttcccaggatgagcagctatccaagtcaagtttaagggaaaccacaggctccgagagtgatgggggtgactcaagcagcaccaagtctgaaggtgccaacgggacagtggcaactgcagcaatccagcccaagaaagttaagggagtgggctttggagacattttcaaagacaagccaatcaaactaagaccaaggtcaattgaagtagaaaatgactttctgccggtagaaaagactattgggaagaagttacctgcaactacagcaactccagactcatcaaaaacagaaatggacagcaggacaaagagcaaggattactgcaaagtaatatttccatatgaggcacagaatgatgatgaattgacaatcaaagaaggagatatagtcactctcatcaataaggactgcatcgacgtaggctggtgggaaggagagctgaacggcagacgaggcgtgttccccgataacttcgtgaagttacttccaccggactttgaaaaggaagggaatagacccaagaagccaccgcctccatccgctcctgtcatcaaacaaggggcaggcaccactgagagaaaacatgaaattaaaaagatacctcctgaaagaccagaaatgcttccaaacagaacagaagaaaaagaaagaccagagagagagccaaaactggatttacagaagccctccgttcctgccataccgccaaaaaagcctcggccacctaagaccaattctctcagcagacctggcgcactgcccccgagaaggccggagagaccggtgggtccgctgacacacaccaggggtgacagtccaaagattgacttggccggcagttcgctatctggcatcctggacaaagatctctcggaccgcagcaatgacattgacttagaaggttttgactccgtggtatcatctactgagaaactcagtcatccgaccacaagcagaccaaaagctacagggaggcggcctccgtcccagtccctcacatcttcatccctttcaagccctgatatcttcgactccccaagtcccgaagaggataaggaggaacacatttcacttgcgcacagaggagtggacgcgtcaaagaaaacttccaagactgttaccatatcccaagtgtctgacaacaaagcatccctgccgcccaagccggggaccatggcagcaggtggcggtgggccagcccctctgtcctcagcggcgccctcccccctgtcatcctctttgggaacagctggacacagagccaactccccgtctctgttcggcacggaaggaaaaccaaagatggagcctgcggccagcagccaggcggccgtggaggagctaaggacacaggtccgcgagctgaggagcatcatcgagaccatgaaggaccagcagaaacgagagattaaacagttattgtctgagttggatgaagagaagaaaatccggcttcggttgcagatggaagtgaacgacataaagaaagctctacaatcaaaatgaatacttgatcaatgaaatgtcacattattcatcctgagtccgagactcaaattttctgccccagccaaaataatcttgtgccaaaagattaaaggtttgcctcaaaatgtccctgtttgaaagattagcacaaaagtcttgatagcacaacacaaattccatccaagaggagaatcttccccagggtttagtcctggggctggcactcgttgtgacttacacagagcaaaattgtgctaaaggcttttctactctgagatctcaatgcgaaatgaaaactcaggcagtttagtccatagtggtactattttgatgatattttccattaataaaatgtaatttcagattattcgtttacaagctttataattttatgattttttaatcgtgttttgtcacagacttccctagtgtttgtactacacgtagtcagaagcgagtgtccttttcttttgcttcaggctaagagctgcctcgctctttgtccccccattaggattctattacatatgcaattgtaggttcaacctgtccctttccctgccagcaaaccccaccaccctaagagaaattttagcttatatatgacggtatatttacaaaaagagaaagagaaaatctggtatttgcaatgatctgtgccttctttttaccaccctcttgattggagcttttgtgatgcagctaccatgattcaaaaaaattaaaaattaaaaaaaaaaaatctgccacttatccaagtccactagaggccactgtcttcaaagcttctctcaccctagccaaaggtcctaaaaggagacagctgtgaagttgggcgtgctctgtggtaccagctgtgacttttctatttctcctagttttaggttgttcatgaaactagaaatgtcatcctgcttgatttttcatcagccaagttaaacccctgctttctgtcctttgcaccttttgcgtgaacagaatatgcattattaaagcaaaaataaataaaagtaaaatgcaaatgaaaacaagggagggaaagttgtattatttcctgcactgggttacccgtgtgtgttatcgtttaaactgtattcacataatgtcatttgccttgctcacttgtaaccccttcctcaggtccaagagaatgggaggagggtcatgttgaagtgtagccactggaactttcttgcatttatggagttgctttttctttcccaaggaaactgatgtttgcctgtccgctttatctttgtagtacatgaacagttcagccttagactatgtaactgttttctcatccttagctgaaaatgaggggcctactgtattgcgagactgttcaggggtaggggtggagggggtggtcccttaatggcccctgaagatgttggatgtgtttctcaaaagctgctttgtctctttcctgagtttaatagtgaaactactaaacattaatagatttgcacagccacaaagaatgagagttgataataccgaagaagtgatgcaaaaacaaaaaatcacattactgatcattgatagtattacaaataaatgtctcttcctttctcttcctcccttcctccccctgccttcctcttaacctatgtgctcatccttgctacttgaggctgttatttccctccgagtatttaaggagcccaaacaccttggtcttcctgggtgggggcataattaagggaagggagtgtataaggaaggaaacctcataccctccattcccatccctggatatattgccttttcagcagcctcgggttcagtgtgcttggggtcaggagtgccaggttcccaagagcagcgtaaaacatccctgtaccccttgacagttataagcatttctgcgttaaacttgaagattccagagattccccacgacctaatgatctaagaatgcagattggattctttgatggtcaaatttctcatttacttatgaaaatccctaattatatagttttatataatgggtatacagagtaggattgttgatgaaattgagcggttggaacaccctcatggaacactggcaacatggaatgtagagagctgatgtcttccccctcatagaggccattggcttcctttgtata

SEQ ID NO: 63514 - DNA, 3482 bp, Homo sapiens
ggccgcagctcgtcgccgcccgcgggcctgtccgacgccggggcccggcccgtcccctccgccgcccggcagccatgtgaccgcgccgccgccctccgcgcgcccggcccgcccgccgcgcgtccgcggcccggccgcagccccaggccgccgagggagcggcggggccggcgccatggccgagcgaggccgcctcggcctccccggcgcgcccggcgcgctcaacacgcccgtgcccatgaacctgttcgccacctgggaggtggacggctccagccccagctgcgtgcccaggttgtgcagcctgactctgaagaagctggtggtcttcaaggagctggagaaggagctgatctccgtggtgatcgctgtcaagatgcagggctccaaacgaatcctgcggtcccatgagattgtgctgccccccagtggacaagtggagacagacctggccctgaccttctccttgcagtatcctcacttcttgaagagggaaggcaacaagcttcagatcatgctgcagcgcagaaagcgctacaagaacagaaccatcctgggctacaagacgctggccgcgggctccatcagcatggctgaggtgatgcaacacccgtctgaaggtggccaggtgctgagcctctgcagcagcatcaaggaggcccccgtcaaggcggccgagatctggatcgcctccctgtccagccagcccattgaccacgaagacagcaccatgcaggccggccccaaggccaagtccacggataactactccgaggaggagtatgagagcttctcctccgagcaggaggccagtgacgacgccgtgcaggggcaggacttggacgaggacgactttgacgtggggaagccgaagaagcagcggagatcgattgtaagaacgacgtccatgaccaggcaacagaacttcaagcagaaagtggtagcgctgctgcggaggttcaaagtgtccgacgaggtcctggactcggagcaggaccctgcggagcacatccccgaggcagaggaggacctggacctcctgtatgacaccctggacatggagcaccccagcgacagcggccccgacatggaggatgacgacagcgtcctcagcacccccaagccgaagctgcggccatactttgaaggcctgtcgcactcgagctcgcagacggagattgggagcatccacagcgcccgcagccacaaggagcccccaagcccggctgacgtgcccgagaagacgcggtccctgggaggcaggcagccgagcgacagtgtctctgacacggtggccctcggtgtgccaggcccgagggagcaccctggacagcctgaggacagccccgaggctgaggcctccaccctggatgtgttcacggagaggctgccgcccagcgggaggatcaccaagacagagtcccttgtcatcccctccaccaggtccgaggggaagcaggctggccgacggggccggagcacatccttgaaggagcggcaggcagcacggccccagaatgagcgggccaacagcctggacaacgagcgctgcccggacgcccggagccagctacaggtgcagctgcagatccccaggaagactgtgtatgaccagctcaaccacatcctcatctccgatgaccagcttcccgaaaacatcatccttgtcaacacctcggactggcaggggcagttcctctccgacgtcctgcagaggcacacgctccccgtggtgtgcacgtgctctcctgcggacgtccaggcggccttcagcaccatcgtctcacggatacagagatactgcaactgcaattctcaacccctgacccccgtgaagatcgccgtggcgggagcgcagcattacctcagtgccatcctgcggctctttgtggagcagctgtcccacaagacacccgactggctcggctacatgcgcttcctggtcatcccactgggctcccaccccgtggccaggtacctaggctccgtggactaccgctacaacaacttcttccaggacctggcctggagagacctgttcaacaagctggaggcccagagtgcggtacaggacacgccagacattgtgtcacgcatcacgcagtacatcgcaggggccaactgtgcccaccagctccccatcgcagaggccatgctgacctacaagcagaagaggaaaaagcattttcattttgactttaccctaagccctgacgaagagtcctcccaaaagttcattccctttgtcggggttgtgaaggttggaattgtggagccatcctcggccacatcaggcgactcggacgacgcggccccctcgggctctggcacgctctcctccaccccgccgtccgcatctcctgcggccaaggaggcctcacccaccccgccctcctccccgtcggtgagcggaggcctgtcctcccccagccagggtgtcggcgccgagctgatggggctgcaggtggactactggacggcagcacagcctgcggacaggaagagggacgccgagaagaaggacctgcctgtcaccaaaaacacgctcaagtgcactttccggtccctccaggtcagcaggctgcccagcagcggcgaggctgcagccacgcccaccatgtccatgaccgtggtcaccaaggagaagaacaagaaggtgatgtttctgcccaagaaagcgaaggacaaggacgtggagtctaagagccagtgcattgagggcatcagccggctcatctgcactgccaggcagcagcagaacatgctgcgggtcctcatcgacggcgtggagtgcagcgacgtcaagttcttccagctggccgcgcagtggtcctcgcacgtgaagcacttccccatctgcatcttcggacactccaaggccaccttctagccccacccaccagggggcccacctcctgccccatgctgtgaggggcccagctgcatttctgttaacatttcagtttactacagagacagacgcttaaaacacaaagagaaacagtcttaagtatgaatgtgctcacaacgtggaaactaacgggggagctcctgccaggagccgaataactgctctgcttattaacccgaacgttcggcccggggctgggaagccagaaggacgatgctgagccatggatcgcggaaggcgtcctctggcctcaggagccacccagagcctcacaggctgagttcttgcctctgtgtcctgtccttcctggaagtcaggactctgcttcctcagggagcccggggaaggcggagctcagtggccacaggccgagggccatggggccgctcagtcccgttggggttgtcctgagttgagcctgggggggcccgtcctgcccgcctaagagatgcccccagcaccgcacactcgtggttcccaataaactcctgcctgcggcggaggttttatagcagcaaatatttttaatgcttttcaaaacatgttttaatgtagctgcccaaaaaaaaaa

SEQ ID NO: 63515 - DNA, 1772 bp, Homo sapiens
agaagaagatgctaggagaagactcagatgaagaagaggaaatggatacctctgaaaggaagataaatgctggtagccaagatgatgagatgggttgcacctggggaatgggagaagatgcagtagaggatgatgctgaagagaaccctattgtcttagagtttcagcaggaaagggaggccttttatataaaggatcccaaaaaggctctccaaggcttttttgaccgagaaggagaagaattagaatatgaatttgatgaacagggacatagcacttggctctgcagggtgagattacctgtggacgattcaactggaaaacaactggtggctgaggccattcactcaggaaagaaaaaagaagcaatgatccagtgctcattggaagcttgtcggattcttgacactttgggattgcttcggcaggaagcagtatctcggaaaaggaaagccaagaactgggaagatgaagacttttatgatagtgatgatgacacatttcttgataggactggcctgattgagaagaagcgtctgaacagaatgaagaaggctggcaagattgatgagaagccagagacctttgaatcattggttgcaaaattaaatgatgctgaaagggaactttctgaaatttctgagagattgaaagcctcaagccaagttctatcagagtctccatctcaggattctttagatgcgttcatgtcagaaatgaaatcaggcagtacattagatggtgtgtcccggaagaaacttcacctgagaacttttgaactgaggaaagaacaacagagacttaaagggttaataaaaattgtaaagccagcagagattccagaactaaaaaagactgaaactcagactacaggtgcagaaaacaaagctaaaaagcttacattgcctctatttggtgccatgaaaggaggaagcaaattcaaattaaaaactggaacagtagggaagttaccccccaagcgtccagaactccctccaactctaatgagaatgaaagatgagcctgaagtagaagaggaggaggaagaggaagaggaagaagagaaagaaaaggaggagcatgaaaagaaaaaactggaggatggaagcctcagtaggccacagccagagatagagccagaagcagcagtgcaggaaatgaggcctcccacagatctcacacattttaaagaaacccaaacccatgaaaacatgtctcaacttagcgaggaagaacagaataaagattatcaagactgtagcaaaaccacttcattgtgcgcaggaccctcagcatcaaagaatgaatatgagaaaagcagaggtgaattgaagaaaaagaaaacacctggtccaggcaaacttccaccaacactttcttccaaatatcctgaagatgacccagactactgtgtgtgggtcccacctgaaggtcaaagtggagatggcagaacccatcttaatgacaagtatggctattgattgcttcagaatcccaaaagaaaaccttgtggaccatgtgacatggaatatttgggataatgtatcaaattgaatggccagagaagtttagatgattatttgtaagatctggtgactggcttttcgttctgtgttcttggcttcctaaatttatctgcccatatgattctcatgcatttgatatttatgtttaaaagtgtttatatatgtatgtaaaaagggaaccatatgttttgagaatttgtaaagtgagagacatgatcctattaaaataagaaggcaaaaaaaaaa

SEQ ID NO: 63516 - DNA, 1911 bp, Homo sapiens
  misc_feature (1)...(1911): n = a,t,c or g
gcggccgccacagccccccagacgacttgggctccagcttctacccggagctggggccctacagctcccgggaccccgaagtgctgcgggacagtatgacccagctcaaggaagccgccatcggcgtcctggtcctgtcctggtacccacctggcatggctgatgataacggggagccctcagatgacctggtgcccgccattctggacaccgcccatcagtacagcatccaggtggccttccacatccaaccctacaagggccgggatgacatcactgtacatgacaacatcaagtacatcattgacacgtatggctcccatggtgcattttaccgctataagaacagcatgggcaagagcctcccactcttttatatctacgactcatacctgacgtcccctgaggcctgggcccacctcctgacaccaaacgggccccattcgatccgcaacacgccctacgatggggtcttcatagcgctgctggtggaggagggccacacccacgatatcctggccgccggatttgacggcatgtacacctactttgcctccaatggtttctcctttggttcttcccatcagaactggaaagctgtgaagaacttttgtgatgccaacaacctcatgttcatccccagtgtggggcctggctacatagacaccagcattcggccctggaacaaccacaatacgcgcaacagggtcaatggcaagtactatgagacggccctgcaggcggccctgacagtgaggcccgagatcgtttccattacctccttcaatgagtggcacgagggcacccagattgagaaggccattcccaagaagacacccacccgcctgtatttggactacctgcctcaccagcccagcctgtacctggagctgacacgccgctgggcggagcacttcatcaaagagaaggagcagtggctcatgtgaggggcctgtaaatgggcgtgaggtgctgatgtccttgccttgctggaagatgtcaccatgtggggttcagctgaggttgtagccactcactcgttcccaggtcagaggtcagcagatgggtgtttctgggtgggccgtcaggcatgggcctgtgcaacacagagcccgttcctcaagcgagtggtgctgaggtgctctgtggtgatgggaacggcagaggctggcaggtgactgaacttagcccagggcagctccacatcctgggaacactttcatgtaaccccttctagttttgaactctgcagcaggctggtgctgtgtagtggccacccagtcaccacccttggaagggtgtcagggtctgggctcgcatgcaccctgctcccttctgccagcctgcatcctctcctcaggcctccttcccacatcatctgtcttctctaagttagggaaccatatttgagactttcaaaaagggaacttctaggtttaagctcctcccagtagattcctgaacccaattatcaggaaatcatcctgagcactcacaggttcatttaacactcactcatcaagcaccttcctatgtgctaggtgctggggaaaacttgaccaaggaagagttcctgtcctgaagcttccaggacccagctttccttttctggtgtggccttgtagctagtgcctgggcacaggtgtttttctttttgcagttttacctagtgctgggagttcagttctttttcctctagaaaaatacctctgtgctccagagcctaatttttcccagatgcatatttagctctagggagaggactaggaggaaatccccctccctttagctgcctgaactgactgaggcccactcactagagccatgttcagtgctactgtgattagtagtaattaaatatgaactggtattctggcacgaggcctgtnnncaagcttggcgtaatgatgg

SEQ ID NO: 63517 - DNA, 396 bp, Homo sapiens
cggacgcgtgggctgtacccggcgttcgcccagcctggccaggagtgctacctgcagaaggagcctctgctcttcagctgcgccggctccaacaccaagtaccgccggctctgcccctgccgcgacttccgcaagggccaggtggccttgtgccagggctgtctgtgaatccgcctctgccaccctgcctggcacccacgctggctctctcctgccgcgggagaaagcaccagcaggttctgagccctggctgcttgtcctcctcgcaacccccccaggccggagcttccttccttagccgggaagctggcagaggagagccgtgcccgggaataggaggaggcagcatgccgagcccctgggacctcccaggcaggctccggttctctcctgggg

SEQ ID NO: 63518 - DNA, 2310 bp, Homo sapiens
ttatatttaaatgtttttactaaaaacaaatatttttactggaagctaacagatcaaatcaaatacctttaggaaaatctaaagcaatgtttaaatattccttcctgcctaaaacctaagaggattttctgatctaccatgctacaaatttctacaaggaatgggcacctctatagagaaaagggaaatgcagcctaagccctttgtaaagaactccacagcaataatattactaatcaaatctattgcttttattgtttttaagtaagtggtggtatatgtcatctttttaaatgtttcttttgggaagatcttatagaaaatggcaccctgaaactttcagctctatgtcccaaaaattatctttcaacaatctgatgaagtttcttaaagaaactcttaaaaatgaagataatatacctggcctaaatcaaaacaatctgaaaaatggatgtgtcccagtggaaagactcaagtcttttcaagtttatcagaaatgccactatacaccactgtactataagtcgaggaggatggatatccaaaggtatcatttgttgacagttcctgatggtctcaggtatatcctataatcactggttactatgcatcatttcttgtagataaatggtattcatgtgataagctgccatccaacttggatgtctctgagcattccaataatatgaatgagaagcggcagcataatattcttgccatgccctgtagtaagctctccagtactcctcataatcctgataggtatcagaaaaactcagacgtatttccctatgacagtcataccaatcatcttcctgggcttcagtctgcaatctgaaggaagaccgcctgggtaggtttctccggctctgcttagctctctggctagccccctctttaagtcttgtcttcatctggattccaggtgattcttgatatttctctggattgggggtgtcacttccatttggtggttgttccaaagaaatacgatcatccacaggcgtagattcagagtctttcagctgattatcagaagagccttccaagtatgacttatttcctttgctctgggaagaggttcttgagctgtaagaatcactgtcactctcagagtctccagattggctactacttgccaacacagggactctctgttcaataactttatttctcacaaaaccattttgaggattcacagtctgatccccagggcctgtgtagtgcctgatgatttccacaggtttctctaacccctctttaatataatgttcataatcctctaccaattcagcaaaagtcaacgtgtatggctgatggattttaaaggaagacagacaaggaatctgggggagtgacacaggtaaagcttctttgacctggtgctgactgttggtggagttttcaacgggagtctgaacagaattcttcatttgctcttcggattgcctgtcacagcccagttcttttggtgacgttgctttttctatgattccacattctgagtggcttttcacaggaagcttttgtttggtattattttttgatttgactgatagtccagatacagaattatttctagaggaagccatgtggtcaccatgagctttctgaatttgaagggttctctctattttctgaatttgcttttttaagggttggttaggtacacttgctataccatatgtatgcacagcagctttaacttccacatcccaatccacacattcttccatcagaccagaaggaatgggatctggtaaagggagaaggttgatattacatttctgggcaattctcatcatcatattttcttcctctccccggcaacagtaggtcactgtcagccccaatgtaccaaaacggccagctctcccaatccgatgcatgtatgtctcccaatccaatggtacatccagatttacaaccagattcaccttctcagcatcaatcccacgagaagtcaaatctgtggaaatgaggactctgcaatgaaagtgcttcagtttagccatagcatcaagacgctgattctgattcatattgcctgaaatgcactcagcaggaaagcctttagaagaaaggatatcagccaaatgttgtgctctgctgtgcaaattagaaaagactaaagcttgattaaatggaattctgctgaacagttcctgtaaatgctgagtcttttcctcaaaaaccttatgtgccaaagggtatgaattgacaactttgtaatactgcttcaaacctatgagacttggatcactggaattcagtcttacaaaagtgggatctctcatgtactttgtcaaa

SEQ ID NO: 63519 - DNA, 2050 bp, Homo sapiens
tctttccaaggttgtaccacctgattccagatggtgaaattaccagcatcaagatcaatcgagtagatcccagtgaaagcctctctattaggctggtgggaggtagcgaaaccccactggtccatatcattatccaacacatttatcgtgatggggtgatcgccagagacggccggctactgccaggagacatcattctaaaggtcaacgggatggacatcagcaatgtccctcacaactacgctgtgcgtctcctgcggcagccctgccaggtgctgtggctgactgtgatgcgtgaacagaagttccgcagcaggaacaatggacaggccccggatgcctacagaccccgagatgacagctttcatgtgattctcaacaaaagtagccccgaggagcagcttggaataaaactggtgcgcaaggtggatgagcctggggttttcatcttcaatgtgctggatggcggtgtggcatatcgacatggtcagcttgaggagaatgaccgtgtgttagccatcaatggacatgatcttcgatatggcagcccagaaagtgcggctcatctgattcaggccagtgaaagacgtgttcacctcgtcgtgtcccgccaggttcggcagcggagccctgacatctttcaggaagccggctggaacagcaatggcagctggtccccagggccaggggagaggagcaacactcccaagcccctccatcctacaattacttgtcatgagaaggtggtaaatatccaaaaagaccccggtgaatctctcggcatgaccgtcgcagggggagcatcacatagagaatgggatttgcctatctatgtcatcagtgttgagcccggaggagtcataagcagagatggaagaataaaaacaggtgacattttgttgaatgtggatggggtcgaactgacagaggtcagccggagtgaggcagtggcattattgaaaagaacatcatcctcgatagtactcaaagctttggaagtcaaagagtatgagccccaggaagactgcagcagcccagcagccctggactccaaccacaacatggccccacccagtgactggtccccatcctgggtcatgtggctggaattaccacggtgcttgtataactgtaaagatattgtattacgaagaaacacagctggaagtctgggcttctgcattgtaggaggttatgaagaatacaatggaaacaaaccttttttcatcaaatccattgttgaaggaacaccagcatacaatgatggaagaattagatgtggtgatattcttcttgctgtcaatggtagaagtacatcaggaatgatacatgcttgcttggcaagactgctgaaagaacttaaaggaagaattactctaactattgtttcttggcctggcacttttttatagaatcaatgatgggtcagaggaaaacagaaaaatcacaaataataggctaagaagttgaaacactatatttatcttgtcagtttttatatttaaagaaagaatacattgtaaaaatgtcaggaaaagtatgatcatctaatgaaagccagttacacctcagaaaatatgattccaaaaaaattaaaactactagttttttttcagtgtggaggatttctcattactctacaacattgtttatattttttctattcaataaaaagccctaaaacaactaaaatgatttgtataccccactgaattcaagctgatttaaatttaaaatttggtatatgctgaagtctgccaagggtacattatggccatttttaatttacagctaaaatattttttaaaatgcattgctgagaaacgttgctttcatcaaacaagaataaatatttttcagaagttatagttgtcttttagtatgtgatactaattaagattacttttgtattatcactatttaaaagatcctagtaatatattctttcaaataccatgttatttgttaccatcaccgatgaatacctcctaggcttatccctaaaaatgctcgctcagagaattaattataaacttgttttgtttttagt

SEQ ID NO: 63520 - DNA, 4188 bp, Homo sapiens
gaacttatgtagcctcattatcccgctccgtgaggtgacaattgtggaaaaggcagacagctccagtgtgctccccagtcccttatccatcagcacccgaaacaggatgaccttcctatttgccaacttgaaagatagagactttctagtgcagaggatctcagatttcctgcaacagactacttccaaaatatattctgacaaggagtttgcaggaagttacaacagttcagatgatgaggtgtactctcgacccagcagcctcgtctcctccagcccccagagaagcacgagctctgatgctgatggagagcgccagtttaacctaaatggcaacagcgtccccacagccacacagaccctgatgaccatgtatcggcggcggtctcccgaggagttcaacccgaaattggccaaagagtttctgaaagagcaagcctggaagattcactttgctgagtatgggcaagggatctgcatgtaccgcacagagaaaacgcgggagctggtgttgaagggcatcccggagagcatgcgtggggagctctggctgctgctgtcaggtgccatcaatgagaaggccacacatcctgggtactatgaagacctagtggagaagtccatggggaagtataatctcgccacggaggagattgagagggatttacaccgctcccttccagaacacccagcttttcagaatgaaatgggcattgctgcactaaggagagtcttaacagcttatgcttttcgaaatcccaacatagggtattgccaggccatgaatattgtcacttcagtgctgctgctttatgccaaagaggaggaagctttctggctgcttgtggctttgtgtgagcgcatgctcccagattactacaacaccagagttgtgggtgcactggtggaccaaggtgtctttgaggagctagcacgagactacgtcccacagctgtacgactgcatgcaagacctgggcgtgatttccaccatctccctgtcttggttcctcacactatttctcagtgtgatgccttttgagagtgcagttgtggttgttgactgtttcttctatgaaggaattaaagtgatattccagttggccctagctgtgctggatgcaaatgtggacaaactgttgaactgcaaggatgatggggaggccatgaccgttttgggaaggtatttagacagtgtgaccaataaagacagcacactgcctcccattcctcacctccactccttgctcagcgatgatgtggaaccttaccctgaggtagacatctttagactcatcagaacttcctacgagaaattcggaactatccgggcagatttgattgaacagatgagattcaaacagagactgaaagtgatccagacgctggaggatactacgaaacgcaacgtggtacgaaccattgtgacagaaacttcctttaccattgatgagctggaagaactttatgctcttttcaaggcagaacatctcaccagctgctactggggcgggagcagcaacgcgctggaccggcatgaccccagcctgccctacctggaacagtatcgcattgacttcgagcagttcaagggaatgtttgctcttctctttccttgggcatgtggaactcactctgacgttctggcctcccgcttgttccagttattagatgaaaatggagactctttgattaacttccgggagtttgtctctgggctaagtgctgcatgccatggggaccttacagagaagctcaaactcctgtacaaaatgcacgtcttgcctgagccatcctctgatcaagatgaaccagattctgcttttgaagcaactcagtacttctttgaagatattaccccagaatgtacacatgttgttggattggatagcagaagcaaacagggtgcagatgatggctttgttacggtgagcctaaagccagacaaagggaagagagcaaattcccaagaaaatcgtaattatttgagactgtggactccagaaaataaatctaagtcaaagaatgcaaaggatttacccaaattaaatcaggggcagttcattgaactgtgtaagacaatgtataacatgttcagcgaagaccccaatgagcaggagctgtaccatgccacggcagcagtgaccagcctcctgctggagattggggaggtcggcaagttgttcgtggcccagcctgcaaaggagggcgggagcggaggcagtgggccgtcctgccaccagggcatcccaggcgtgctcttccccaagaaagggccaggccagccttacgtggtggagtctgtagagcccctgccggccagcctggcccccgacagcgaggaacactcccttggaggacaaatggaggacatcaagctggaggactcctcgccccgggacaacggggcctgctcctccatgctgatctctgacgacgacaccaaggacgacagctccatgtcctcatactcggtgctgagtgccggctcccacgaggaggacaagctgcactgcgaggacatcggagaggacacggtcctggtgcggagcggccagggcacggcggcactgccccggagcaccagcctggaccgggactgggccatcaccttcgagcagttcctggcctccctcttaactgagcctgccctggtcaagtactttgacaagcccgtgtgcatgatggccaggattaccagtgcaaaaaacatccggatgatgggcaagcccctcacctcggccagtgactatgaaatctcggccatgtccggctgacacgggcgccttcccgggggagtgggaggagagggaggggagggattttttatgttcttctgtgttgagttttttctttctttcttttaaattaaatatttattagtacctggcttgaagcctagtgttttcataatgtaattcaatgaaaactgttggagaaatatttaaacacctcaatgtaggtacattacactcttgttgcggggaggggatttaccagaatacagtttatttcgtgaattctaaaaaacaaaaagatgaatctgtcagtgatatgtgtgtattataacttattaatcttgctgttgagctgtatacatggtttaaaaaatagtactgtttaatgctaagtaaggcagcagtcatttgtgtattcaggctttttaaataaaattagagctgtaaggaaaatgaaaagccacaaatgcaagactgttcttaaatggaaggcatagtcagcgagggtaaatcctataccactttaggaagtattaaaaatatttttaagatttgaaatatatttcatagaagtcctctattcaaaatcatattccacagatgttccccttcaaagggaaaacatttggggttctaaacagttatgaaagtaagtgatttttacatgattccagaataacacttgtattgaccaatttagacagataccagaccaattttgcatttaagaaattgttctgattatttacgtcaactcattagaattcagtgaaaagtaacagtcttttgtcacagagaatctgaaagtagcagcaaagacagagggctcatgacaggtttttgcttttgctttgcttttgtttttgaaagagtaaaagtactgatgcttctgatactggatgtttagcttcttactgcaaaaacataagtaaaacagtcaactttaccatttccgtattctccatagattgaagaaatttataccacatatcgcatatgaccatctttccatcaaatcaatgtagagataatgtaaactgaaaaaaaatctgcaagataatgtaactgaatgttttaaaaacagaacttgtcactttatataaaagaatagtatgctctatttcctgaatggatgtggaaatgaaagctagcgcacctgcactttgaattcttgcttcttttttattactgttatgattttgctttttacagatgttggacgattttttcttctgattgttgaattcataatcatggtctcatttcctttgcttctttggaatatttctttcaacacattcctttattttattatacattgtgtcctttttttagctattgctgctgttgttttttattctatttacaggatgatttttaaactgtcaaatgaagtagtgttaacctcaaataggctaaatgtgaacaaataaaatacagcaaatactcag

SEQ ID NO: 63521 - DNA, 1615 bp, Homo sapiens
  misc_feature (1)...(1615): n = a,t,c or g
aaaaagttccagaggaatactttaagcatgatcctgagcacaaatttatttacagatttgttcgtactctttttagtgctgcacagctaacagctgaatgtgcaatagtaactttggtttacttagaaaggcttttaacttatgctgaaatcgacatttgtcccaccaactggaaaaggattgttctgggagccattcttcttgcctccaaggtttgggacgatcaggctgtatggaatgtggactactgccagatcctcaaggacattacagttgaggacatgaatgaaatggaaaggcattttctggagcttcttcagtttaatattaatgttcctgccagtgtttatgccaaatactactttgaccttcgctccttagcagatgacaacaacctgaattttctatttgctcctcttagcaaagaaagagcacagaacctagaggctatttctagattgtgtgaagacaaagacttgtgtagagccgctatgagaaggtctttcagtgctgataacttcattggtattcagcgctctaaagccatcctctcttaaaaggagaaatgaggggttataacgtcatgggaccttcatctacaaagactggagaaataccacctttcctgctcaaaaaccagcaaaattagtgttttcatcaaaaggaaagatctcaaattcaagagactcatggacaacaaggattatactccacaggaaagaatgggaccttgtcaatgcaacaaaacactcttctgtcctttttaatgtaaacagagttacaaaaaccactccaaagtgaaggctcccatcctacacacagatatttgcttactgtgtgggccgatagctgtgaactcatgtaaggttttttaaacaatagtttaaatttttagactttaaagacactaaccatataacttttatgtttcttccagtttctctccctccccccgcattttgctgcatatgcctttaaaatcaatgcagtattaccattaaaacatgggactctaactaaagccacttaggagcagacagcagcgttgttaggtactgaagggttcttcctccctactgttaccattgaagctgctagtcattggcaatcattttaaaccaaaaagctgctggataacatttgtcattcatattctttgcaagcattactttagcattttagcatgtttggggtcataaacagaggaagtatcagttattgatatctacttctattggagtccatgttgcatttcttgtgaactataaatggtgcttctcattttctgataatttttctcttgctaaataaatgtattaaaagatattttcataatgccaaccaacatggtggttcagtgacgatgagaaaaagtgaagcagttttaagcttgaatatagtttgggccctccaaggcactgcagcatgagtataaatgctataaacctttaaaaaacatgatttgaaagttttttgttttgttttgtttgttttaaagngngggggctatgccgccncncttgcccaggctggagtgcagtggcttttcacaggtgcaatcattgtgcactcactgcagcctagaacttnctggtctcaagccatcctctagcct

SEQ ID NO: 63522 - DNA, 3046 bp, Homo sapiens
atgttgttctcctggcgagaagatcctggagcccagtgcctgctgctttctcttctgctcctcgcagcctcggaggtggggagcggccagctccactactccgtctctgaggaggccaagcatggcaccttcgtgggccgcatcgcgcaggacctggggctggagctggcggagctggtgccgcgcctgttccgggtggcgtccaaaagacacggggaccttctggaggtaaatctgcagaatggcattttgtttgtgaattctcggatagaccgcgaggaactgtgcgggcggagcgcggagtgcagcatccacctggaggtgatcgtggacaggccgctgcaggttttccatgtggaggtggaagtgaaggacattaatgacaacgcgccagtttttccaatggctgtaaagaatctgtttatttccgaatcccgacagcctggctctcggttttcgctagagggcgcatcagatgcagatatcggaacaaattcgttgttgacttacagtcttgattccactgaatattttaccttggacgttaaaagaaatgatgaggaaattaaatcccttggactcgtgttgaaaaaaaatttaaatcgagaggacactcctaagcattatttactaataacagcaattgatggtgggaaaccagagctcactggcacgactcaactaaagatcactgttttagatgtaaacgacaacgccccagcgtttgagaggacgatctataaagtcagattactcgaaaatgcaccaaatggtaccctagtggtgaccgttaacgccaccgatttggatgaaggagtaaataaggatatcgcgtattctttcaatacggacatgtcagcagatattctgtcaaaattccatttagatccagtaaatggacaaatcagtgtaaagggtaacatagatttcgaggaaagtaagtcatatgaagtccaggtagaagccacggataaaggaaatcccccaatgtcagatcactgcacagttctactcgaaattgtggacatcaatgataatgtacctgagttagttattcaatcactatctttacctgtattagaagactctccacttagcacagtcatcgccctgatcagcgtgtccgaccgcgactcaggagtcaatggacaggtcacctgctcgctgacgccccacgtccccttcaagctggtgtccaccttcaagaattactactcattggtgctggacagccctctggaccgcgagagcgtgtcggcctatgagctggtggtgactgctcgggacgggggctcgccttcactgtgggccacggccagcgtgtccgtggaggtggccgacgtgaacgacaatgcgccggcattctcgcagtccgagtacacggtgttcgtgaaggagaacaacccgccgggctgccacatcttcacggtgtctgcgcgagacgcggacgcgcaggagaacgcgctggtgtcctactcgctggtggagcggcgggtgggcgagcgcgcgttgtcgagctacatttcggtgcacgcggagagcggcaaggtgtacgcgctgcagccgctggaccacgaggagctagagctgctgcagtttcaggtgagcgcgcgcgacgcgggcgtgccgcctctgggcagcaacgtgacgctgcaggtgttcgtgctggacgagaacgacaacgcgccggcgctgctggcgcctcgggtgggtggtactggtggcgcagtgagcgagctggtgccgcggtcactgggtgcgggccaagtggtagcgaaggtgcgcgcagtggatgcagactcaggctacaacgcgtggctttcgtatgagctgcagcctgggaccggcggtgcgcgcatcccgtttcgcgtggggctgtacacgggagagatcagcacgacccgtgccctggacgaggtggacgccccgcgccatcgcctactggtgctggtgaaggaccacggtgaaccctcattgaccgccacggccactgtgctggtgtcgctggtggagagtggccaggcacccaaggcctcgtcccaggcgtccgctggcgccacgggcccggaagctgcactggtggatgtcaacgtgtacttgatcgtcgccatctgcgcggtgtccagtctgttggtgctcacactgctgctatatactgctctgcggtgctccgcgccgccaaccgaaggcgactgtgggccgggcaagcccacgctggtgtgctccagcgcggtggggagctggtcatactcgcagcagaggcagcagagggtgtgctctggagaggggttgcccaagaccgacctcatggcttttagccctagccttcctccttgtccaattagccgggatagagaggagaaacaggatgtggacgttgatctctcagccaaaccacgacagcccaaccctgactggcgttactctgcctccctgagagcaggcatgcacagctctgtgcacctagaggaggctggcattctacgggctggtccaggagggcctgatcagcagtggccaacagtatccagtgcaacaccagaaccagaggcaggagaagtgtcccctccagtcggtgcgggtgtcaacagcaacagctggacctttaaatacggaccaggcaaccccaaacaatccggtcccggtgagttgcccgacaaattcattatcccaggatctcctgcaatcatctccatccggcaggagcctactaacagccaaattgacaaaagtgacttcataaccttcggcaaaaaggaggagaccaagaaaaagaagaaaaagaagaagggtaacaagacccaggagaaaaaagagaaagggaacagcacgactgacaacagtgaccagtgaggtcctcaaatggaaacaagccacttagccagtttttgtaataatggcaaatctctcccatgtagcaattccctgctcctttttcctatctacatgagccctcttagagacctcagaaatctgcagaaagttccctgtgtctgttttgggacgcatttaacaggttttgtcgtaaaagctttactaagtctgg

SEQ ID NO: 63523 - DNA, 584 bp, Homo sapiens
ccttttttttttttttaacatcgcatggcagatgggtgttggaataattactttctccacaatctatcattttaatagtttataatagtgcagttcatggaaacatgccaagtccaacaaaagcacaacagattagattacagtcagattgagaagactggtgtgcgttggcagatagacgtgctggacatgctccacacgcgacctgcagacgggacatgactgtagctgggcggcgcagctctcacagcacacagtgtggccacagggacagaaggtggagttgatctcctcctcgcagcacaccatgcacagcatggcttccttcagcttgcgtagcttctcctgcagcacccgggtctgctggcagctgaggccctcgcagctgctgcagttcatgctgctttctgaggacttcagaggcgagtgtgaagggctctggttgcttcttgaaacgaggtccacaacgccagcattgtacagacgcctcctggcatggtcatacacctcctttgatgttcttttaatatcaaagacatatttcttgccaaggttaatgttttcattcagaacagagatgccag

SEQ ID NO: 63524 - DNA, 1833 bp, Homo sapiens
atttttcttaagaacacagtcatttctgatcttctcatgattctgacttttccattcaaaattcttagtgatgccaaactgggaacaggaccactgagaacttttgtgtgtcaagttacctccgtcatattttatttcacaatgtatatcagtatttcattcctgggactgataactatcgatcgctaccagaagaccaccaggccatttaaaacatccaaccccaaaaatctcttgggggctaagattctctctgttgtcatctgggcattcatgttcttactctctttgcctaacatgattctgaccaacaggcagccgagagacaagaatgtgaagaaatgctctttccttaaatcagagttcggtctagtctggcatgaaatagtaaattacatctgtcaagtcattttctggattaatttcttaattgttattgtatgttatacactcattacaaaagaactgtaccggtcatacgtaagaacgaggggtgtaggtaaagtccccaggaaaaaggtgaacgtcaaagttttcattatcattgctgtattctttatttgttttgttcctttccattttgcccgaattccttacaccctgagccaaacccgggatgtctttgactgcactgctgaaaatactctgttctatgtgaaagagagcactctgtggttaacttccttaaatgcatgcctggatccgttcatctattttttcctttgcaagtccttcagaaattccttgataagtatgctgaagtgccccaattctgcaacatctctgtcccaggacaataggaaaaaagaacaggatggtggtgacccaaatgaagagactccaatgtaaacaaattaactaaggaaatatttcaatctctttgtgttcagaactcgttaaagcaaagcgctaagtaaaaatattaactgacgaagaagcaactaagttaataataatgactctaaagaaacagaagattacaaaagcaattttcatttacctttccagtatgaaaagctatcttaaaatatagaaaactaatctaaactgtagctgtattagcagcaaaacaaacgacatccaattgtcatgctgcatgcaaaactacacagaattcatgttttgcagagttttgccaaaatgagtaatcatataatatttactgtaatttttaaaatacattatcgttcacaattttattttttcataatcaactaaggaagaacgatcaattggatataatcttcttaccaaaaatgatagttaaaatgtatatatatcctagtcccctaaccaaatcctgacctattgggatacttataaaaatttaagtaagtgggatacacaaagaataataactattaacttttcattattagcaaaaacctaagggatttaaactaattgaaactgtatttgtttggacttaattttttatgtttatttagaagataaagatttaaagaagacctttacaataaagagaagaaatatcgaagtcattaaaataaggagacttacttttatgacattctaatactaaaaaatatagaaatatttccttaattctagagaaactagttttactaattttttacaacttcaataataccatcactgacacttacctttattaattagcttctagaaaatagctgctaattaggttaatgaacattttaccttagtgaaaaaaattaattaaatatgattacaaagttgcacagcataactactgagaggaaagtgattgatctgtttgtaattacttgtttgtattggtgtgtataaaatacaaaatttacattaaactctaaatcattaaaaaaaaaa

SEQ ID NO: 63525 - DNA, 2358 bp, Homo sapiens
ccttctccaattaaaaggaaagtctcactttgggcgggaaaccactattacataagggatggacactacacatttagaatgtggacacttggttagggcagtggaactataaagatagcagccagttttcttccttgccttctcctgaaggtaatcctccctcttactgactgaagctctggttccagctctgctcatgggcaatgcctggctttacagttataaggctgtgctatggactagctgctgactcagctggcagctggcccttcctccggaggagaggacgtgttggggcatggcttactgggcctggcctaccattcccacagggaaccaacgagggagtgagcctgtgagactcagcttgccaccttggccaccacgtgctgccctcatcacaaaaaccacaccaaccactccgaaacgtatctgctggtcaggagcagggaggctgtctggctggctgagggataaggcgcagtgcaacggaagggatcaggaagcctgagaggagccaggtacacacagctgctctgggcagctgccctcttagtctcttccacctcaaggagccaaagcaaaccccaggctccagggacagaggataaactgccttcattccaggccctcgctctggaaaaaggggtgacgggtagcctaggcctctgaggaaccagtctgtcatcaatctttgcaaagcaaagctgttctttttccaactttattcagaatgttctgccttcaaggtactgattgcacacaggaaatgtaccaggtatagttactgagctggggccaccaatggagatggagcactgcagacccctaagagttcaagccatgctggagtgggaagacctatccaccttctgaacatacgaggcagaaggctcagagtcctggaggcagactctctcctggttttccttgtgctgatggcaaaatactaaacaagtcttctctccgtcacttctaagcccagggatgcaatctcactccctggcactctgctttcttctagaagtagtaagcctggctggtagggaaccaccctgaggggtatgggaaggggaagtcggttcactttccctatctcccaaaatactagaggtggggttggcaccctccccaggctctccgagcctacagagctagcccagtctccaggcaaggcccagatgccctgggacttagctcggggagggaggtataggcatggggtgctcgtctgtcctggcggctgcagagccctgccccttttctgggcggcagtaggaatacagaagctaagctcaccaaaatcctattggttaatgtttctagtgaatttcccagaaacatttttaagtagactaccaaactaccctttcttaattaaaaattcattaaaccactaaaacccctcccatgcactttttcttgcaaatcagatatttgtataaacaaacaaaaataggaagaaaaaaaaaagaaaggatattttcaaatggaacttactttttaagtgatggagacatgcacttgggggtgggtgggtgtgagttttcatttgtgttttgaaatcccaaattaatgagcatgataaactgttattgctggcactggctttaccccaagtggccaagtggcactgtctgactctctgagtccttgctgggtccccccaaccttcccctaacccccaccctttccctttccattgacttgggacagcccttgtcgatgtgccaatcacagtgggaagggggagaaggggggaggtcacagtgcatggggttcaaggtcacagtgggcggagcaagggggatcacagtgcaagtaagtcaggtcgttccctctgctcaagtccagctgtctgccacggcagtgcaacccgtggcggacgacccaggaggcggtgacggcagcaacggcggcatcttttcttgcctgcatttatctgcgctgtttgaagccttgagacccatcaggacccaaaggctgtctgatcacattattgggctgcctgctgtcttcgggttgggagatcctggttggcctgtcgaggatgggtttctcctgctcctcctcggggctggcgctgcccaggatccgcttccgggcctcggcgtactcggcctctcgctgtgctagggacttgactggaagggtgggcctgctggtggagttggggctgctgaccacaccgttgctggtgggcctcttgaggatgcggatctgtggagggggccccgcgggaaggctatcgtcctgaatcacaatgggcactttgggaggagatttggatttccccgctgtctgccgcctcttcccagctctcagcgacctcctcatcttccatcttactcgccgctt

SEQ ID NO: 63526 - DNA, 411 bp, Homo sapiens
  misc_feature (1)...(411): n = a,t,c or g
aataaagagaaccgagaggcacaaatggctgccaaactggaacgtttgcgagagacggataagcacattgaagaagtgcggaagaacagagaatccaaagaccctgctgacgagactgacgctgactagttcgttctagagaactgactttctccccatacgcttcctaaatatccacagactgtactggccaatgtcatattattgtttccctgctgactgatatttgagaagctagtgataggactgcataagtagatccagatccagactgtactatgccgtgccatgggctaatggggagaaactgatagagattaactctttttctaaagcggtggtctttctaatgtaactattttgcttgatgcatcttttctacttgaggatcatcatctctttagntgttan

SEQ ID NO: 63527 - DNA, 1485 bp, Homo sapiens
ttttttttttttcagaaagacccaaaccctttattgtccctaccagggagccagtgcttccagcccacaccccacaccccaggagcttcagcaaggtctctgcttgggaggatgctgcccagaactgcagccagggccaccggtgccacctgcaggcttcctcccattccagctaggcagtggccaggctgccccctgaccagccccactgggaaggcagcaggatggcagtggccagtggggtcaggctgggccatctccctctcagacctcagcacctgggtcctcggggctgctgctcttgttccggaagtggtctcgactccgcttcctgctgccatggaagccaacagtttccaccggcgggagacctggcacagacccactgtggacagaccctgacagtgcctccacctcctgcaggcctccatgggggctgccccactcctcagcctctgggctcccgggcccggccagatgggccagctccacagggccctcgcccctgtctgtggcaggattcccaaggccgcccctgcctggctctcccaccttccccaggaccctcttcctctcgtgtctggcttcgacccctcggactggtttggtgaagatgaccctcccctccccacagctggagggatcctggttgaaggaggacacgcagtcagtgggggcagccaggctctgggagcccaggaaggccagggcggtggcctgattgctctgctcgctgacctcggtcacatcttccaggctgtacttggtccagcgctcggggtgtgccacgtagtcggggaccggaggcacccttggtgaggcagggctccgatgggccctgcccaggccttccactggagaccggcctgagggcgctaggggccgcttgaagcctccgttgtcactcatgctggtgtgggccacagaggatggagcccgtctggccgccccctccaggcagtcaaagatgtcacggctgcgctgggagaaggtggagctcatgcctctcagatggaatggctgcaccgtggctgggaggaggcctgacgggggtgagggcggctcatcaggacctgaatcctcctccccaggcagccccatcggggacagtgcttccacttcagcaccaccgggcaagctgaggtcagagtccgagtcactgagggagactgtgtcggaaggcagcgtgtcatactccgtcccgtgttcgccctccacgctgggggacggctcacctgttcctgcctcagccatgcgtccccagggccacgccacacctctcttggctgctgggtgccagtggttgacactggagtgtgattggacagccaagcgggccaagtggacggagccctgatgaaggtcctcagcggcacaggcgtggtcgtctcaggcctcggagtgccccggcatggcctctgttcagctgctcaacggctcaaggctgctcggcagtctccatcttggtcggcgcggacgcgtggg

SEQ ID NO: 63528 - DNA, 952 bp, Homo sapiens
taaaaatcctggtagaacaggcctggtctctttagaaagtcaatgacacaggggaaaaataataggtggaaagttttacattaagagactaaagaaatataactaaatgaaatgcacgagccttgactgaatcctggttcaaaaacaaatattttggggaacatctaatgtggactagatatcatatgatactgaataatgtttaattatcttcaatgcaatgacattgtattacataagaaaatgtctttatcttaggagatgtttgatgaagtatttaggaatgaagtgtcctgatgcctgcaatttcctttaaaatgtccaacaaaaaataggtaaaacaaatacgacacaaggttaacaattactaaatccactcctctgtgcatgtgaaatttttccatcataaaaatatgggagaaattcttattgagtaagtttgtgtttcccagatctcatgtcaggtttcagggcattttcccaatactcatgctataaactacacagagaaacttgaacagaaaagttaagatgtgtaacccaaagcagggttaagtggaagacatggatgggctcggcgtggtctttctggaactgcagtctcttgaaccactacatatggaagactataagatatacacaggattggattttacctgcaagtggacagagccctggaggagtctgctgtcgtacaaaggacagaaattcatactctgcctgctgcaatgtaattgtactctccttcactgccttggtaaggccagactgcaagagagaatccccagccccccaccaaaaacacatgtaaagtcagttttcaaaggcatccagaaatgaaatttcacttttaaaatgggcaaatataaccacaaatagaccatttttagagctcaagttcaaattgcaactgccatctttgcaccatttttttttcttcaagaatccaagc

SEQ ID NO: 63529 - DNA, 1507 bp, Homo sapiens
  misc_feature (1)...(1507): n = a,t,c or g
agcagctgctccaggagaaggcagctttccgggagctgatcgcgcagctagagctcgaccccaagtgcagggggctgcccttctcctccttcctcatcctgcctttccagaggatcacacgcctcaagctgttggtccagaacatcctgaagagggtagaagagaggtctgagcgggagtgcactgctttggatgctcacaaggagctggaaatggtggtaaaggcatgcaacgagggcgtcaggaaaatgagccgcacggaacagatgatcagcattcagaagaagatggagttcaagatcaagtcggtgcccatcatctcccactcccgctggctgctgaagcagggtgagctgcagcagatgtcaggccccaagacctcccggaccctgaggaccaagaagctcttccacgaaatttacctcttcctgttcaacgacctgctggtgatctgccggcagattccaggagacaagtaccaggtatttgactcagctccgcggggactgctgcgtgtggaggagctggaggaccagggccagacgctggccaacgtgttcatcctgcggctgctggagaacgcagatgaccgggaggccacctacatgctaaaggcgtcctctcagagtgagatgaagcgttggatgacctcactggcccccaacaggaggaccaagtttgtttcgttcacatcccggctgctggactgcccccaggtccagtgcgtgcacccatacgtggctcagcagccagacgagctgacgctggagctcgccgacatcctcaacatcctggacaagactgacgacgggtggatctttggcgagcgtctgcacgaccaggagagaggctggttccccagctccatgactgaggagatcttgaatcccaagatccggtcccagaacctcaaggaatgtttccgtgtccacaagatggatgaccctcagcgcagccagaacaaggaccgcaggaagctgggcagccggaatcggcaatgacccccacccagggggccagcgggagcagggcctgcatgagaccccgacagaaggtggggggggggcctctgggaagcacaggccagcacctccccaggtggcaggatctggcttggggtgcccggccctcatccctgcccacgcagtgagtgctcatgtgtcttggccccttgcttgcaaactggataaagggtgcccaagcctctcctgatgcatttgtaaacaagaaggtttcagcagtattacaccacctccctcatgcctccgagggggtggaagggggtgggcacactccagggccccccatgcccctggcccccagggaactggaagaggctcccaaccacgaaatcgtcgacccggggaggtnnnnnggtngcgcntgcgtacagctctctatnntcaaagngncctgcgggnggggnnngggagagagcgataggagagagatatcaggcgtgaagtcgaggcgcatagaggacacgagagagatcatacgagtgtga

SEQ ID NO: 63530 - DNA, 1976 bp, Homo sapiens
  misc_feature (1)...(1976): n = a,t,c or g
attcgctgtctccacgcatgaggagacgtgtaggggccgggttcggccctggtgaactctcacccgagcggtttctctttccgggacaacatggcgccgtccacgccgctcttgacagtccgaggatcagaaggactgtacatggtgaatggaccaccacattttacagaaagcacagtgtttccaagggaatctgggaagaattgcaaagtctgtatctttagtaaggatgggaccttgtttgcctggggcaatggagaaaaagtaaatattatcagtgtcactaacaagggactactgcactccttcgacctcctgaaggcagtttgccttgaattctcacccaaaaatactgtcctggcaacgtggcagccttacactacttctaaagatggcacagctgggatacccaacctacaactttatgatgtgaaaactgggacatgtttgaaatctttcatccagaaaaaaatgcaaaattggtgtccatcctggtcagaagatgaaactctttgtgcccgcaatgttaacaatgaagttcacttctttgaaaacaacaattttagtatggaaagatttatgacataattttattacttactgtaatcgtatacagtttccattaacttttatgacatcatagggttttcctaaatactgttaatctattaatcaataattactcttacatacatttgcataattctttataagtctgaattcagtgaaaatctgtaacacaaaggttttcttttacaataactttttattatctgggtaattgctattaagacatttgaatatcttttcctggaatttaattgctattgaaattctgtgacacaaattttttagatattttatcgtgtagaattttaaacttcagacacctagttctagtaaccatcagcttgtggccaatcttatctcatccatacatctctccagctaccatctcttactaagtgaaagcaaatcccagatatggttatacttttatatacttgttaaatatgtaattgtaaatatttcagagtagatttctgaagattggggcctttcattttttaaacttagccacaaaaccattatcacaaattattaaatatgtgttcaaatttctactaattgcaaatgttacaattttttttaaaactcgggatccaaataaggtactgcacattgtggttgattgatatatcttttatgtttcttttggtcctataagttcccactctatctgttattttattcttcataatttattgtttaagaaacaaggttatttgtctttcacgttttcccatagtttgaattttgcttttgtatcccatggtataatttaacatgttcatctgtcccctataaattgcaagttggctctagagtttcagcttcaggttcttttttaggtgagtaagggtaagactacattataaggtgatgttcacttcttttatcaagaagcacataatgtctggttgtctttaattttgtaggcttagctgacattaatgtttcatgcctggatgcattatttcatcagtggttgcaaattgttgatactctggttttttctccctcacttatttttcagctgtactgcttctataaagaaaaatttccccttctactatttggttacctagtgctgcatttatatagaaaaggcgggataaatattcttgctcttatcagttttaatataatgtattccacctctagcaaccttcattgtaaccaattagctttttccccattcttgtttttcgagagtgggcctcattcttttgtccaagctgagtgcaatcatggctcactgcaatctcgacttcctgggctcaagcaattctcctgcctcagcctcccaagtagctgggactacaggcttgaccaccatgcccggctaatttttgattatttgtagagacaggatctcagaattccaccacgctgngtagagagcaggcaatcag

SEQ ID NO: 63531 - DNA, 403 bp, Homo sapiens
tgaattcccccgtctccctgaccccaatgtggtcttccccccaaccccaaggcgctggaacactcagcaggactctaccttggagagacccaagactctggagtttctgcctcggccgcgtccttctgccaaccggcaacggctggacccttggtggtttgtgtcccccagccatgcccgcagcacctccccagccaacagctccagcacagagacgcccagcaacctggactcctgctttgctagcagtagcagcactgtagaggagcggcctggacttccagccctgctcccgttccaggcagggccgctgcccccgactgagcggacgctcctggacctggatgcagaggggcagagtcaggacagcaccgtgccgctgtgcagagcggaactgaacaca

SEQ ID NO: 63532 - DNA, 1209 bp, Homo sapiens
attaggcctgctgtttagtgtaataaaaacataggctttaaacactgtaaactgtaaaataaatctttcagggatgttaaattagaagacacctactttgatagagatgtggagaaggcatttatgaaggctagctctgaactcttcagtcagaaaacaaaggcatctttacttgtatcaaatcaaaatggaaatatgtacacatcttcagtatatggttcccttgcatctgttctagcacagtaagtataaatttcacctactacttaactccccttatttgggagatgttagatttctaagaccaaatctagtgtcaagcatgttggtggtagatcacagaaaattttatcttgaggctctctaatctgctattgtccattgacttgaaagatgtatgggttgaggctacagttcttccagaagtatttgttaatttcatactggctttcctggcttctgttttcatggttttttaattcttgacctacagttgaaccataaatacctggttgatgaagtaacttgttttgtggcatgactttcacaagctctgtcattccccacaagatgaaaactcacatgctgcaatattaaaactaagttatattccctactgcaatattaacactttgagttagatccttaaaactttaagttagattctacttttacttatagcctaaatttttattgctacttttatagcttcccacacgctgtagctttggatcagttaaacttctgaactattgttacaccctacataggtactcacctcagcaattagcagggaagagaattggagtgttttcttatggttctggtttggctgccactctgtactctcttaaagtcacacaagatgctacaccgggtaagtgctgaatctttcaacaagaatgtattgagaactgagtccaggcacagtggctcacacccgtaatcccagcagtttgggaggccgaggcgggcagatcacctgaggtcaggagttcgagaccagtctggctaacatggctgaaaccccatctctactaaaaatacaaaaattagccaggtgaggtggtgcatgcctgtagtcctagctacttgggaggctgaagtaggagaatcacttgaatccaggagagggaggttgtggtgagccaagatcacaccactgtgctccagcctgggtgacagagcgagactctgtcaaaaaaaaaa

SEQ ID NO: 63533 - DNA, 718 bp, Homo sapiens
caggattcgtgtatttaactattattatttggcctcacatcaccagactgatgcttatagccttcttttcagtggcatgctattttgccgtttgacacctcctttatgtcttaatttcttgggtttgacccatatggattcatctatctctcacaagaatactcaaccaactgcttatacatctattatgggttccatgaaagttttatcctttattgcagatggattctatatatattatcctatgttggtggtaattctctgcattgctacttattttagtttgggaacccgttgtttgaatctgctcggtttccagcagtttatgggagatgatgatatgacatcagacttagttaatgaaggaaaagaattaatcagaaaagagaagagaaaaaggcaaaggcaagaagaaggtgaaaatcgaagaagagaatggaaagaacgttatggacacaatagagaagattccactaggaacagaaatattcatactgaccccaaagagtcaaacttctcagatgttaataccaaccgttctgcattcaaatataccagggctaataacaggactgaaagggaccggatagaacttctccaagatgcagaacctttggattttaatgcagaaacattcactgatgatcctcttgaatctgaatcaggaaggtatcagcctggtggacgatatctctcgatgtctcgcagtgacatattt

SEQ ID NO: 63534 - DNA, 1382 bp, Homo sapiens
aagattgaggcccaatttaacccctttttacaaactgtgtccttgggcagatttttttgtttcatagggggaaagcccctgttccctccagccccccggggtaaggggcccgccagttgttacccccccaaaaaattaaaaaaccttttgtttttttttcaagggttttctttttccaaagtatcccctttaaataagaagcctttgagggtccaaggatccaacggggttttttttttttttctcagcttgaaaagaggctggaaatgggatgcaggttaggttcaaagcttaacctttgtaacaactggacacaaggttcctcagaattgtcaaaagtctcttgtgacacatcctacaaccttttctcaataaacaacaatatatgaaataattaccaaaacatctcctaattcatataatttacatgatataagcttgcttgataacagctggtgttcagtcgtgaaaaaacacacaaagtaaaatggttgctgactacaatgtacagctattgctgggtgtgatggaatgtacaaacggaggtcgatgtagacgagttttttccaccagagatattgcctttccatgcagcacttgtgctctcagctttaacttggcttttggttcttcctttatcttcagtatctgttctgatgctcataatgccaccgattaaaatctatattaaaagctacaatgctaccagaagccatgccagtgatcagagtcctctggtcatgggacaagtccattgctctaatgccagcatcacatccagggtaaatgtacagttgcttgaagtcacaggcctgccagacctctactaccccattgtcccctccggtgaccaggttctggccgtcactgctcaggagaatggcccgtgttgaatcattgatctccatttgagccaaaagtttcccattaatgctgaaattactgaatcgccctcgttcatagtatatgatacagtggccttcgctggagacagatatcaagcgtgggaataagcagttttctggtccttcaagggctctcagcaaatctccagtgatggtgtggacaaggcaagggccctctttagcaccactgataacaagcccaagttctgcacagacagaaacacagacaacttcatggtcatggcctgtgaggacggctcttggtgccggatagtcactgctgttagggttgtctcctatgatatggtgccgcccactccagtaccagagcagcagggtggcatctcgagatccggacacgatgtagcagtccccaccaatgtatgactcggacctggccaagcaagtgaccacatcccaatggccaaatacaatctgagtcaatttccctgtttctgtagaataaactctgaagct

SEQ ID NO: 63535 - DNA, 778 bp, Homo sapiens
gcatctgccggcttctcttctactcaggatactgtagttgctctccaagctcttgccaaatatgccactaccgtttacgtgccatctgaggagatcaacctggttgtaaaatccactgagaatttccagcgcacattcaacatacagtcagttaacagattggtatttcagcaggataccctgcccaatgtccctggaatgtacacgttggaggcctcaggccagggctgtgtctatgtgcagacggtgttgagatacaatattctccctcccacaaatatgaagacctttagtcttagtgtggaaataggaaaagctagatgtgagcagccgacttcacctcgatccttgactctcactattcacaccagttatgtggggagccgtagctcttccaatatggctattgtggaagtgaagatgctatctgggttcagtcccatggagggcaccaatcagttacttctccagcaacccctggtgaagaaggttgaatttggaactgacacacttaacatttacttggatgagctcattaagaacactcagacttacaccttcaccattagccaaagtgtgctggtcaccaacttgaaaccagcaaccatcaaggtctatgactactacctaccagatgaacaggcaacaattcagtattctgatccctgtgaatgaggataggagctggaaactcaattagtcctctgtgacattactggagggtggaacattcttctgtcgcttgaagcagaactcattcaatcaaataatttaattt

SEQ ID NO: 63536 - DNA, 370 bp, Homo sapiens
cactggggaaaaaccgtatgaatgtaatcagtgtgggaaatccttcagccagagttatgttcttgttgtacatcagagaactcatactggagaaaagccctatgaatgcagtcaatgtgggaagtccttcagacagagttcatgccttactcaacatcagagaactcatactggagagaaaccatttgaatgtaatcagtgtggaaaaacatttagcttgagtgctcgacttattgtgcatcaaagaactcatactggagagaaaccctttacatgtattcagtggggaaaagctttcattaatagctataaacttattaggcatcaggcaactcatactgaagagaaactctatgaatgtaactagttt

SEQ ID NO: 63537 - DNA, 1681 bp, Homo sapiens
ttttttttttttgggctagaggtttgggctttaatggcagctggggtaaaaggaaacaaaaacagtaattctgaagagcacagggaacaggcagccaggaccagcctggcccattccaggccagctgagctgaaatgctgattctgtccagggggctgctgtatgtgtagactggtggcagtcttggggactgaggcctcttggagagaagggaagactgtcggctcagaagtccatggagctgtgggccaggtagtccttgcgaccgatgttgctgacctgcttggtctgcatagcctcgagtttggggcagtcagtgatccgatgacccaggcccccgcagaaggcacagccgcgctctcctccaatgtccagcatggactcatccccgcaatgcagcacctgcagcacgggcggcaccttctgcttggcttctagcagcagcgctttgaggtccatcagcactgactcatcacacgctttgttgatgaaggtagtggcgatgcctgtgtttcccgagcgcccggtgcggccaatccggtgtacatagttctcaatctcctctggcatgtcataattgatgacgtgctggatggcagggaagtccaggcccttggaggcaacgtctgtggctactaggacatccttcttgccctcccggaatgcctcgatggccttagtccgttcctcctggtctttgcccccatggatggctacggcctcaacccccttgagcagcaggtactcgtggatggcgtccacgtctgccttcttctctgcaaagatgagtacaggcgggggtgtcttctgcaggcactcgagcaggtacaccatcttggcctcctccttcacatattctacctcctggatgacatccaggctggcagccccagcgcgccccacattgatggtcacaggctttacaagggcactcttagcaaagttctgaatcttcttcggcatggtggcactgaagagcagggtctgtcgctggcccttgaagtaggagaagatggtacggatgtcaccctcgaagcccatgtcgatcatgcggtcagcctcgtccagggccaggtagcgacagatgtctaggctgaccatcttcttctgcagcaaatccatgaggcgccccggggtggccaccatcatgtgtacaccgtgtcggatggtctccatctgctctttcacggacatgcccccaatgcagagggcgcagcgcaggagtggtgagctgtcctcctgcagcaggcggcagtagtactccaggatgccatgggtctgccgggccagctcccgcgaggggcagatgatgagtccatagggcccctcgcgctttgagaagggtaacctcttctcttgttccaggcagaacatgatgacgggcaacgtgaacaccagtgtcttgcctgaacccgtgaaagcgatgcctatcatgtcacggccagatagaatggtggggatgccctggatctgaatgggtgttgggtggtgaatgcctttcttcttcaggcctctcaggatggctgcaggaaacttcatttccttgaagctcttgatgggtggtgggataccgtctccctccaccaggatgtggtatttcttccgcacgcgctcatgtcgctcttcagacatgctcagaacataacggggtggagtccagctggttttgatggggtcatca

SEQ ID NO: 63538 - DNA, 621 bp, Homo sapiens
atcgagaccacccagcccagtgaggacacgaatgccaacagtcaggacaacagcatgcaacctgagacaagcagccagcagcagctcctgagccccacgctgtcggatcgaggaggaagtcggcaagatgcagccgacgcagggaaaccccagaggaaatttgggcagtggcgtctgccctcagccccaaaaccaataagccattcagtgtcctcagtcaacttacggtttggaggaaggacaaccatgaaatctgtcgtgtgcaaaatgaaccccatgactgacgcggcttcctgcggttctgaagttaagaagtggtggacccggcagctgactgtggagagcgacgaaagtggggatgaccttctggatatttaggtggatgtcaatgtagatgaatttctagtggtggaaaccgttttctaataatgtccttgattgtccagtgagcaatctgtaattgatctataactgaattccagcttgtcacaagatgtttataaattgattttcatcctgccacagaaaggcataagctgcatgtatgatgggttactatcaatcattgctcaaaaaaatttttgtataatgacagtactgataatattagaaatgataccg

SEQ ID NO: 63539 - DNA, 1282 bp, Homo sapiens
aggggcagcgacgcggaagatgactcagggcccactttgaacctcctgggtacttgagcaagctcaagggtgttcggacctctagggagacgttgcatcacgcagtttggaaagaacttgggaattctccctggggggctcgctgtatttactgggaactagtcttgcaggaaggcttatgtacagaagtacgtcgtgaagaattatttctactattacctatcaattttcagctgctttgggccaagaagtgttctacatcacgtttcttccattcactcactggaatattgacccttatttatccagaagattgatcatcatatgggttttggtgatgtatattggccaagtggccaaggatgtcttgaagtggccccgtccctcctcccctccagttgtaaaactggaaaagagactgatcgctgaatatggaatgccatccacccacgccatggcggccactgccattgccttcaccctccttatctctactatggacagataccagtatccatttgtgttgggactggtgatggccgtggtgttttccaccttggtgtgtctcagcaggctctacactgggatgcatacggtcctggatgtgctgggtggcgtcctgatcaccgcactcctcatcgtcctcacctaccctgcctggaccttcatcgactgcctggactcggccagccccctcttccccgtgtgtgtcatagttgtgccattcttcctgtgttacaattaccctgtttctgattactacagcccaacccgggcggacaccaccaccattctggctgccggggctggagtgaccataggattctggatcaaccatttcttccagcttgtatccaagcccgctgaatctctccctgttattcagaacatcccaccgctcaccacctacatgttagttttgggtctgaccaaatttgcagtgggaattgtgttgatcctcttggttcgtcagcttgtacaaaatctctcactgcaagtattatactcatggttcaaggtggtcaccaggaacaaggaggccaggcggagactggagattgaagtgccttacaagtttgttacctacacatctgttggcatcggcacaaaggttgtagcgcagatgccaacagatgtgtaggtaacctttgtgccgatgcttcacaggtttctgggattaccctgagtctcaaacagttggaaactagcccactggacatgaaagccaagacataggaaagttattggtaggcaaatcttgacaacttatttttctttaaca

SEQ ID NO: 63540 - DNA, 2207 bp, Homo sapiens
  misc_feature (1)...(2207): n = a,t,c or g
cgaagcatctgcacttttgtatcttttgatgagaaacagctttgagtataccaaaaggaaaccctttttgaggacacatctacagataataattgctgtaagccaactgatagctgatgtagcactaagcggaggatcaagatttcaggagtctttattcattatcaataattttgcaaatagtgacagacctatgaaggcaactgcctttcccgcagaagtcaaagacttgaccaagagaatccgcactgttcttatggccactgcccaaatgaaggagcatgagaaagaccctgaaatgctaattgatctccagtatagcttagccaagtcctatgcaagcaccccagagctcaggaaaacctggcttgatagcatggccaagattcatgtaaaaaatggagatttttcagaggctgcgatgtgttatgtccatgtagcagctctagttgcagagtttcttcatcgaaaaaaattatttcctaacggatgttcagcgttcaagaaaattactcccaatatagatgaagaaggagcaatgaaagaagatgctgggatgatggatgtccattatagtgaagaggtcttgctggagttgctagaacaatgtgtggatggcttatggaaggcagaacgttatgaaataatttctgagatttccaagttgatcgttccaatttatgagaaacgtcgtgagtttgagaaacttactcaagtttatagaactcttcatggagcttacacaaaaattctggaagttatgcatacaaaaaagagacttttaggcactttcttcagagttgccttttatggccaatctttttttgaagaagaagatggaaaggagtacatctataaagaaccaaagctcactggcctctcagaaatttccttgagacttgttaaactttatggtgaaaagtttggtacggagaatgtcaaaataattcaggattcagacaaggtaaatgccaaagagcttgatccaaaatatgctcatatacaagttacttatgtgaagccttactttgatgacaaagaactcacagaaaggaagaccgagtttgaaagaaatcataatatcagcagatttgtttttgaggccccttacactttatcaggcaaaaaacagggctgtatagaagaacagtgcaaacgccgtacaatcttgacaacttcaaactcgtttccttacgtgaagaagaggattcctattaactgtgaacagcagattaatttaaaaccaattgatgttgccactgatgaaataaaagataaaactgcagagctgcaaaagctttgctcctctactgacgtggacatgattcagctccaacttaaattgcagggctgtgtttctgtgcaggtcaatgctggtccattagcatatgcaagagctttcttaaatgacagccaagctagcaagtatccacctaagaaagtgagtgagttgaaagacatgtttaggaaatttatacaagcatgcagcattgcacttgaactaaatgagcggctaattaaagaagatcaagttgagtaccatgaagggctaaagtcaaatttcagagacatggtaaaagaattatctgacattatccatgagcagatattacaagaagacacaatgcattctccctggatgagcaacacattacatgtattttgtgcaattagtggtacatcaagtgaccgaggttatggttccccaagatacgctgaagtgtgaggaaatgcagatgtacgtgacaatgagactgacctttctcaggaatatttggagctgtgcaaatgttaaaatttaaagatttgatatacatggagtgtttcttctcgacaccaaaattttcatgtgttccaacagggtgcttacatatttgtaaataagcaacttgaaagtgcctggaaaattgcaccactgtgcttggtttgtacttttttaggtaaatctatatgctgaaaagtagagctcaaaaacagtagttcaatttgcttaattattgcttaaaataatggtactatgtaaaattgtataatggaatacaataaaaggtaaaacttatttgtaattagaagtgaaagaaataatactttgaacttagcatttttcttgacaagaagctcaattcattatcatactaatccttggtaggaggagaggaaaattgataacatttccgtaatacacggatatttaaaattggngagat

SEQ ID NO: 63541 - DNA, 1707 bp, Homo sapiens
ccgggaacgggcggtggggagcgggcggagctggccctgcctctgcctggccggcgccgcagtcggcgcgggccgcgcccgccgccgccaactgccctgagcgcttgctgaggccgagggagacgtcggggcctgcacctggagggagcctgccgcgctggccccgaggagggggcgttgccatggcgacagcctctcccgctgctgacggggggcgggggcggccctgggaaggagggctggtctcctggccccccgcccctccccttactctcccctggacttggatgggcccgagttgggggcaacaccccgggcattggggctttccagctctcacagaaccttcagcatccccagctgccggtcttggcatcttcgaagtaaggagagttttagatgcttctggatgttcaatgctagcacctttacagactggagcagctcgattttcttcgtatttactttcaagagcaagaaaagtgctgggctcccacttattttctccctgtggtgttccggagttctgctccatatccaccagaaagctggcggcccacggctttggcgcatccatggcggcaatggtgtccttccctccccagaggtatcactactttttagtgctggactttgaggccacgtgcgacaagccacagattcatcctcaggaaatcatcgagttccccatcctaaagctaaatggccggaccatggagattgagtctacctttcacatgtatgtccagcctgtagtccatccacagcttaccccattctgtacagagctcaccgggattattcaagccatggtggatggtcagccaagcctgcagcaagtgctggagagggtcgatgaatggatggcgaaggaaggcctcttagatccaaacgtcaagtcaatttttgtcacctgtggagactgggacttaaaagtcatgctcccaggccagtgccagtacttgggcttgccagtggcggattacttcaagcagtggattaatctgaaaaaggcttacagcttcgccatgggctgctggcccaagaatggacttctagacatgaacaagggcctcagcctgcaacacataggccggccccacagcggcattgacgactgcaagaacattgccaacatcatgaagacactcgcctatcgaggcttcatcttcaagcagacatcgaagccgttctgattggccgaggacaggatggggcaggacagggtagctgtttggcccagcccagaatcctcctctccctcaccagaggggaagagggagagtggcatagctctgtgtccagagtgtccccaaagccttccctgtggggctcatgccccttggccgtgggctttgttgccctttgcaaggggctttggcaacttggccctttctggaagcaagacacttttgtgcccccccatcccccacccctcaatctcagcccagtatcagcccctcccattgcgggcctgggctaagggggaccccaggcactcaccgcctcctcccctggtacaacaggcttctgtggggccaccaagaccctcgctgtgccccctcccatccataagtgcatggtgtgtggtcgccccagggctccaggacagatcaggccccaccttgtgtctacccccatccccgctgtgaacgtgccactgaataaagtcggggaaacgaggcactgggtgtgtgtgcaaagcca

SEQ ID NO: 63542 - DNA, 351 bp, Homo sapiens
agcagcgcgaggtgctgcggcgctgcgtataagtatcaatcagccggttgcttttgtgagaagggttccttggactgcggcgtcgagtcagctgaaagaacactttgcacagttcggccatgttagaaggtgcattttaccttttgacaaggagactggctttcacagaggtttgggttgggttcagttttgttcacaagaaggacttcggaatgcactacaacaggaaaatcatattatagatggagtaaaggtccaggttcacactacaaggcccatacttccgcaaacatctgacgatgagaagaaagattcttgagactgcagcctattaataaagttatatacctg

SEQ ID NO: 63543 - DNA, 468 bp, Homo sapiens
taacgatcgcttctctgcttgctacttcaccttgaaactcaaggaagcagctgttagacagcgtgaagccctaaagaagcttaccaagaatatagccactgactcatatatcagtgttaacttgagagatgtctatgcccggagtatcatggagatgctgcgactgaaaggcagagaaagagcaagtactaggagcagcgggggagatgatttctggttttgaattaattttcaatttatttacaaaagctatgtacaattaactaaaatgataaagcagtgatgtggatttctgtattctgatgatgagtctcttcagagtactgctcatcttaattaatttttgctgatatattgcttcatctactagaatatttcacatcacctataacaactgcacagtgttctgacacatttgagtgtccaaaatagccaattaacacaaccaaatacaactgggcatgtatt

SEQ ID NO: 63544 - DNA, 782 bp, Homo sapiens
aactagtagaatatgatatgcttcgggagatgttcagtgattctagaagtaacaatgatgatgatgaggatgaggatgatgaagatgaggatgaggatgaggatgaggatgaagatgaagacaaagaagaggaggaggaagattgttctgaagagtatctggaaaggcagctgcaggccgagtttattgaatctggccagtatagggcaaatgaaggtaccagttcaatagtcatggaaattcagaagcagattgagaaaaaggagaaaaagctccataagattcagaataaagcacaaagacagaaggatctcatcatgaaagtggaaaacctgacactcaagaatcattttcagtctgtgctggagcagcttgagttacaggaaaaacaaaaaaatgagaagctcatttccctacaggaacagttgcagcgttttctgaagaagtgaggagagccattggcgtggcccacaaaccttggattcaccatccagactgcagattggatgaaactgtgcacgtttttgtcccttcagttgccttatgttgaatcagttatatttatctgtaccttctttgctacttaaaatatgctcacagtttgtagtcatgtagaaaaggccagtataaaaatgtagtagacttaaagaccccactcgaccatgagactttctctttgtcaatttgggaattattattattaatttagaaatggggtcttgttatgttgcccaggctgaattcagactcctgggcttaagggatccttccgcctcagcctc

SEQ ID NO: 63545 - DNA, 318 bp, Homo sapiens
  misc_feature (1)...(318): n = a,t,c or g
gttttttattaggcggaatccagaggctcaaggcccttcataatatcccccagtttagtagttggacttagggaacaaaggaacctttaatagaaattggacagcatgaaagcgagcttagtgatacttgtgggccagggcattagccacaccagccaccactttctgataggcagcctgcactggtggggtgaattctttgccaaagtgatgggccagcacacagaccatcacgttgcccaggagcctgaagttctcaggatccacgtgcagcttgtcacagtgcagcttactcagtggggcaaaggtgcccttgan

SEQ ID NO: 63546 - DNA, 602 bp, Homo sapiens
ccccacccacacctgctgcccaccaccccggcagcacctttccctgcccaggcttcagagtgccctgttgctgctgccactgccccccacactccagggccatgtcagagctcccatctaccctccaccagcatgccgctcctgaagatgcccccaccattctcggggtgcagccacccctgcagcgggcactgtggtgggcactgcagtgggcctctcctcccacccccgagctctcagccactccctagcactcacagggatcccgggtgcaaggggcacaagtttgcacacagtggcctggcttgccagctgccccagccctgcgaggcatatgaggggctgggtgaggaagaggatagcagctctgagcgaagctcctgcacctcatcctccacccaccagagagatgggaagttctgtgactgctgctactgtgagttcttcggccacaatgcggcaaaaggaaaggaaatggcacagagaaagctatgattctgatgagtatgtatacgtgtgtaatcccacagaagtgaacgcttgtgagtgatgaaggcagagtggaagcaaaaaggctctcagtcccccaagtgtgacagccg

SEQ ID NO: 63547 - DNA, 219 bp, Homo sapiens
gacttttatagtcctggaggcgatctgtgatatgtgttagtgggacttgaggataaaggtatacactcagtactgtcgaagctgacgtgattgtttatgcacagcattcacaaaggcgcccacatgttctgggtctatgtgaggataaaggccatggtccatgttggctatgtatcgatgtgggccatagtccatcagcatgtgtgtcgacacgaacgt

SEQ ID NO: 63548 - DNA, 334 bp, Homo sapiens
ctgagaatagaggttttggattacgcataatccacatgctcaaggcccttcataatatcccccagtttaatatgtggacttatggaacaaaggaacctttactagaaattggacagcacgaaagctatcttaatgatacttgagggccagggcattaaccacaccagccaccactttctgataggcagtctgcactggtggggtgaattctttgccaaagcgaagggccagcacacagaccagcacgttgcccaggagcctgactttctcaggatccacgtgcagcttgtcacagtgcagctcactcagtgtggcaaaggtgcccttgaagctg

SEQ ID NO: 63549 - DNA, 2736 bp, Homo sapiens
acaagcctgtgagcaagcacaagcgggatgagttggtgagagccattgaatcacccttgtagaccctgaactatcctgcagagaacagcttcaatcaccgtccttacacggcttgtgatttcatagaagggatctaccgaacagaaagggacaaagggacattgtatgagctcaccttcaaaggggaccacaaacatgaattcaaacggctcatcttatttcgaccattcggccccatcatgaaagtgaaaaatgaaaagctcaacatggccaacacgcttatcaatgttatcgtgcctctagcaaaaagggtggacaagttccggcagttcatgcagaatttcagggagatgtgcattgagcaggatgggagagtccatctcactgttgtttactttgggaaagaagaaataaatgaagtcaaaggaatacttgaaaacacttccaaagctgccaacttcaggaactttaccttcatccagctgaatggagaattttctcggggaaagggacttgatgttggagcccgcttctggaagggaagcaacgtccttctctttttctgtgatgtggacatctacttcacatctgaattcctcaatacgtgtaggctgaatacacagccagggaagaaggtattttatccagttcttttcagtcagtacaatcctggcataatatacggccaccatgatgcagtccctcccttggaacagcagctggtcataaagaaggaaactggattttggagagactttggatttgggatgacgtgtcagtatcggtcagacttcatcaatataggtgggtttgatctggacatcaaaggctggggcggagaggatgtgcacctttatcgcaagtatctccacagcaacctcatagtggtacggacgcctgtgcgaggactcttccacctctggcatgagaagcgctgcatggacgagctgacccccgagcagtacaagatgtgcatgcagtccaaggccatgaacgaggcatcccacggccagctgggcatgctggtgttcaggcacgagatagaggctcaccttcgcaaacagaaacagaagacaagtagcaaaaaaacatgaactcccagagaaggattgtgggagacactttttctttccttttgcaattactgaaagtggctgcaacagagaaaagacttccataaaggacgacaaaagaattggactgatgggtcagagatgagaaagcctccgatttctctctgttgggctttttacaacagaaatcaaaatctccgctttgcctgcaaaagtaacccagttgcaccctgtgaagtgtctgacaaaggcagaatgcttgtgagattataagcctaatggtgtggaggtctttgatggtgtttacaatacactgagacctgttgttttgtgtgctcattgaaatattcatgatttaagagcagttttgtaaaaaattcattagcatgaaaggcaagcatatttctcctcatatgaatgagcctatcagcagggctctagtttctaggaatgctaaaatatcagaaggcaggagaggagataggcttattatgatactagtgagtacattaagtaaaataaaatggaccagaaaagaaaagaaaccataaatatcgtgtcatattttccccaagattaaccaaaaataatctgcttatctttttggttgtccttttaactgtctccgtttttttcttttatttaaaaatgcactttttttcccttgtgagttatagtctgcttatttaattaccactttgcaagccttacaagagagcacaagttggcctacatttttatattttttaagaagatactttgagatgcattatgagaactttcagttcaaagcatcaaattgatgccatatccaaggacatgccaaatgctgattctgtcaggcactgaatgtcaggcattgagacatagggaaggaatggtttgtactaatacagacgtacagatactttctctgaagagtattttcgaagaggagcaactgaacactggaggaaaagaaaatgacactttctgctttacagaaaaggaaactcattcagactggtgatatcgtgatgtacctaaaagtcagaaaccacattttctcctcagaagtagggaccgctttcttacctgtttaaataaaccaaagtataccgtgtgaaccaaacaatctcttttcaaaacagggtgctcctcctggcttctggcttccataagaagaaatggagaaaaatatatatatatatatatatattgtgaaagatcaatccatctgccagaatctagtgggatggaagtttttgctacatgttatccaccccaggccaggtggaagtaactgaattattttttaaattaagcagttctactcgatcaccaagatgcttctgaaaattgcattttattaccatttcaaactattttttaaaaataaatacagttaacatagagtggtttcttcattcatgtgaaaattattagccagcaccagatgcatgagctaattatctctttgagtccttgcttctgtttgctcacagtaaactcattgtttaaaagcttcaagaacattcaagctgttggtgtgttaaaaaatgcattgtattgatttgtactggtagtttatgaaatttaattaaaacacaggccatgaatggaaggtggtattgcacagctaataaaatatgatttgtggatatgaaaaaaaaaaaaaaggggg

SEQ ID NO: 63550 - DNA, 597 bp, Homo sapiens
ctccccaggtccagcctcccccagcccagtctctttgagtaaccctgcacgggtggacctgggggctgccacagcagagggaggagcccctgaggctatcagtggggtccccactcccccagctatcccccctcagccccgccccaggagccttgcctcagagaccaactgagtggctggtttctccctaagcagccctcagcaccccctccctccccacctggccctcccaggacagctctcgccccccacaaaggggcatgggcctccagcctttgcccacaagtgcctcagtgcccactgggtcggcccccatggccaggagggctcaggacaatcctctatttcctgaccttttcctcgtccaccctgggcttggggacccccccaccggactctccactctccggcaggtcctaggggagccaccggaaggaaggagaggtttgcctgctcctacgggactgattcttctcttgccgacatgttttttgtaaggctggtaaataaattattttggacaaaactggagcagctgcccaaatgatagttttattttctgtccttgaaataaagaagccaattttaaaaaaaaaa

SEQ ID NO: 63551 - DNA, 845 bp, Homo sapiens
gtgctgtatggttttctaaaagcttgacaccctgacagtctcccaacaagacagatgaaaagttattagagaagcctgcttaagacactctgttactgttcaaatgtcgacttgctaaagcagaagaaaagcaacatggccaatcaccaaacacaagacctcaactcctgatgtcctttcagccttcctttcttaccctccaattcctgatgtcctttcagccttcctttcttaccctccaattcctgatgtcctttcagccttcctttcttaccctccaaaaggaatttaaggattaggcatactttcagttccgaaaagccaagtttggctccattgtcagcaccagctctgacatctgaaaatgcactgatctccctccagctaaggaaacctgagaaaccactctgaaagaactgtgagacctttgcactaagaccattagggattctacgcaaggttctctctgctccttgcaaaattacaggcgtcatgaaggatggcggctcgtaaatcgaagcctttgaaacaggggctcaccgtccggcggcatcaacaccttgttgttctgtgtgcaccaccccacggggtgcaaatccgcgatgactacgtcacaccagaagtcggccctgcggtcctccccgtaaccgcagtagcgcagaagcagcagctgcccgcacgtggtaatgatcgtggccacccagtacgtgtccgggttgttcttattagccacttccaatttcattcctggctggaagttgctctgaatgctgatttcaaccttaaggaatcagaaatagagaaaacccattactacactagacacaatacatccagaagatgac

SEQ ID NO: 63552 - DNA, 306 bp, Homo sapiens
cggggctcgtgcgtggatgaagaacgcagctagctgcgagaattaatgtgaattgcaggacaacgtcgctatggaacctgcatctaccagggaagactctgggcattctgctgctgagcttgcataataagacgaatgagctcaaaatttgctttgagagctacagggaattgctattactcctgtaccttctgttcaatttccttttgtcatttctagcttcattttctctatgctctctgtggatttcctgcatcgattattttctactctaatcgtatctactattgtctgtattcgtgttcg

SEQ ID NO: 63553 - DNA, 947 bp, Homo sapiens
tccattgatatgagctatagtaatggtttctaaactcattgattcgctgggccagggcctgctgctgcgcagcctgcaggagcgcaaccaggagcaggagaaggtggagcggcgccgtcaggtccccttccacctgcacatcaacctggagctgctggagtgtgtctacctggtgtctgccatgctcctggagatcccctacatggccgcccatgagagcgatgcccgccgacgcatgatcagcaagcagttccaccaccagctgcgcgtgggcgagcgacagcccctgctgggtccccctgagtccatgcgggaacatgtggtcgctgcctccaaggccatgaagatgggtgactggaagacctgtcacagttttatcatcaatgagaagatgaatgggaaagtgtgggaccttttccccgaggctgacaaagtccgcaccatgctggttaggaagatccaggaagagtcactgaggacctacctcttcacctacagcagtgtctatgactccatcagcatggagacgctgtcagacatgtttgagctggatctgcccactgtgcactccatcatcagcaaaatgatcattaatgaggagctgaaggagctgatggcctccctggaccagccaacacagacagtggtgatgcaccgcactgagcccactgcccagcagaacctggctctgcagctggccgagaagctgggcagcctggtggagaacaacgaacgggtgtttgaccacaagcagggcacctacgggggctacttccgagaccagaaggacggctaccgcaaaaacgagggctacatgcgccgcggtggctaccgccagcagcagtctcagacggcctactgagctctccactctgtttcccgcctgggccatccaaccttgaagtcctaaaccacacctcagtcactaaaggtctgtttaaagttaa

SEQ ID NO: 63554 - DNA, 329 bp, Homo sapiens
gctttttattaggcagaatccagatgctcaaggcccttcataatatcccccagtttaatagctggacttagggaacaaaggaacctttaatagaaattggacagcaagaaagcgagcttactgatacttgtgggccagggcattatccacaccagccaccactttctgataggcagcctgcactggtggggtgaattctttgccaaagagatgggccatcacacagaccatcacgttgcccaggagcctgaagttctcaggatccacgtgcagcttgtcacagtgcagctcactcaatgtggcaaaggtgcccttgaggttgtccaggt

SEQ ID NO: 63555 - DNA, 602 bp, Homo sapiens
  misc_feature (1)...(602): n = a,t,c or g
ttactcacttattttcttggttgaaagaatagtctgcagctgttctttttcttattatattttaatttttatatatccaatttattagctggtagtgaaggatgatgaagtttctggaatcttggtttgtcttgtctgtctgactaatccctggggtggggtttggatattttacagcttttggatcttttcatccagtgggattggtcaacctaccttgctgactatggtcagcccaactgcaagtacctccgggtaaacccagtgactgctctgaccctgcttgagaagatatctagagagatgaaggatactagccgcaagaacaacatgtttgcacagtttcggaaaaatgagcgagacaagcagaaactcattgactccgtggccaagcagctccgaggactcatcagcagccaccattcatgaagggtgaccccggacccacagaggggacctgctgcagcctctgtgtcagtctggggtccagccccagctgaccctgcatttgtgcattgttcttcaaagagagcatatgnnnnnnnnnnnnaacccctgcgcagtattcaaaaaacaaatccctatagtaaaagagcactact

SEQ ID NO: 63556 - DNA, 1030 bp, Homo sapiens
ctttactgtcttcattctgggaataactattcgaccactggtggagtttcttgatgtcaagaggtccaataagaaacaacaagctgtcagtgaagaaatctattgtcggttgtttgatcatgtgaagactggaattgaagatgtttgtggacattggggtcacaacttttggagagacaagtttaagaagtttgatgataaatatctgcggaagcttttgattcgggaaaaccaaccaaagtcaagtattgtatctttatataaaaagcttgaaataaaacatgccattgagatggcagagactgggatgataagtactgtccctacatttgcatctctaaatgattgtcgtgaagaaaaaataaggaaggtcacgtccagtgaaactgatgaaattcgagaactcttatcaagaaatctctatcaaatccgtcagcgaactttatcctacaacagacacagtctgacagccgacacaagtgagagacaagccaaggagattctgattcgccggcgacacagtttgcgagaaagcattaggaaggacagcagcttgaatcgagaacacagggcttccacttcaacctcccgatatttatccttacctaaaaatacgaagcttccagaaaagctacaaaagaggaggactatttctattgcagatggcaatagcagcgactcagacgcagatgccgggaccaccgtgctcaatttgcagcccagagccaggcgcttcttgccagaacagttctccaagaaatccccccagtcctataaaatggaatggaagaatgaggtagatgttgattctggccgagatatgcccagcacccccccaacaccccacagcagagaaaagggcacccagacgtcaggcttactacagcagccccttctctctaaagaccagtctggctcagagagggaagacagtttgactgaaggcatcccgcccaagccgccaccacggctggtctggagggcatcggaacctggaagccggaaagcccgatttgggagtgagaagcct

SEQ ID NO: 63557 - DNA, 635 bp, Homo sapiens
tttttttttcatcttataaggaacatttatttggtaaactatctcatagaaatagactctaaaatcaaacagtttcttaaacaacagagagcataatcccaatctctccccatgaaaagcctacttcataactgaagtacctaaagcccatgaactgcattactagaagaaaggagggaaaaagacatttactaaacttccacaggaagactgtataaatctggaagtggttaagtacacatcagcctgtatccaagaatactactcagtctcaaaaattaactgaaaatctaaacttaatatggataccttctttgttctttggtaaggctcagaaaattaccatctatttaagtacgcatggtactagttacatgtcaactgatataataaaaaaggtgaagtggacaatcagtatttcaaacccaatacagggaaatcactagatgtaaataagaacttttaaaagctattcttgagctccactttaaaacaaacattcaggactggaatcttcagaattttctaatatcttgaatatccccatcttctctttaattggtcctgaagcattcatttgatcaataagatcacttcgatctaacaacaactctagatctttatcactaatgacc

SEQ ID NO: 63558 - DNA, 319 bp, Homo sapiens
cttagagctgttactttctaagtacgcaacaccctagacaattcaaggcatcttaatctccatcaagaaaaacaagaaaaaataatttttgtcacgctgttaaatccatcattatggatgaaactggtgcatattggtcaaacggatccaacaaacactgatgtccaagctggcatattggcaactaatacgtaactggtggtcaatagagagtttaaaagatcttccctttcttcttgttcttttccaaggttctcgaagagttctgttctaaaatatgttgttgagcttcccagtttgccttctcatcctcaaactg

SEQ ID NO: 63559 - DNA, 809 bp, Homo sapiens
gcaatatccatgggaattgtcagtgttagttctcctgatgttagttcagtatctgaattaactaataaagaagcagcttcacaacgacctcttagctcttcagcaagtaacagactgtcagtgagttctttgttggctgctggggcccctatgagctctagtgcaagtgtacctaacctgtcctcaagagaaacatctagcttggagagttttgtaaggagagtggcaaacatagcacggactaatgccacgaacaacatgaatctaagccgaagcagcagtgataacaacactaatactttggggaggaatgtgatgagcacagcaacttctcctcttatgggtgctcagagtttccctaatttgaccacacctggtactacatcaacagtgactatgtcaacatccagtgttactagcagcagcaatgtagctacagcaacaacagttttatcagttggtcaatctttaagtaacactttaaccaccagcctcacatcaacttccagtgagagtgacacaggtcaggaagcagaatattccttatatggtaagttgtaatttaaaatgaaagtatttagatactttcataatgatgcttttattatgttttctcctgatattttaaacttttgtttaaagagaattattctctcttcttataaatatgaaatcttcgggccaggcacagtagctcacacctgtaatcccagcactttgggaggccgaggcaggtggatcagttgaggtcaggagttcgagaccagcctgaccaacatggtaaaaccccatttctaccaaaaaaaaaa

SEQ ID NO: 63560 - DNA, 1051 bp, Homo sapiens
aattatattgtgctctaatgttacagaataattggaattcttggcaaaaggacttgcacactcaagaatgaactttttttcacacaaaaagcttatcaagaacaagacagtggctcaaaaaccacttttctaaatatatttccatacaaaataatttcaagatataattattagtttcttgtagagtacgctatttaaacaagaataaaagagtaagtatgtgaaaactgcaacaccacaaaaattgagccattttactagtgtaattaaacattagaacaatcttggaacaggcaagcaaaatattcagaagggtgaatcatggcgggcacagctaactgatttttaccatgacttgcacactttgagacaacacaaataccttatgcagatggttcagtagcagaatggcacttggtttgctcctaatagaaacaacatgaatgcaactgacaatttagagatagaccatggccctatttggcatgctgaaaatctggttgtgttcctctagtccacacaccgttaactgtgcaatctgttgacgagtaaacaaatagtgcaggattcatctcagtgaggtctgggccccttggtctaaccgaaatcaattcttggtcgatactgcagtaccatagggtatgactgatacaaagggccatcctgagagcagacttgcgaagctgagcagttcagacaccgaaagttttcgcctcttagtcgccatcttgtcatgtagatgaattccatagtatgatccttccccataatttcaccattgcacagcacatccaactcataagaacttggaagttttagttttaaacttagaaattttttaatagttcccacagttacacgtgtagaacatcgaatgaatttcttcattaaaccctttactacattgtcccctgattgcccattatttcgtaaacaatctagacagatagcaatttgtgggtcacttctgtgataatctttatcatcttcattttcatcaccttcttcatctactttcggtttgtcagcttttgaagtatcatcttgtccc

SEQ ID NO: 63561 - DNA, 675 bp, Homo sapiens
ttttttttttttgatggttgcacaacaatgtgaatgtatttaatgccacaaaccatacacttaacaatggttaagatggtaaatttgatgtgatgtatatttgaccacaatttgctcaatgcaccattgctggtttgaaggtggagggaccacaggaccagggacaaggacttgggaacctcagtcctacagccatgaggagttgacttgtcaacagcctgaatggtcctggaggcagatgcttccccggagcctccaggtgagagtgcagcccaccaaggcctgacgtcagtctgagagaccccgctcagggcacccactgagcccaccgcgacttctgccctggagagctctgtgggcagccaggtggcaggagaggggcagaggcgcagcatcgctctcctgcagccaccgaagactacccgagcatcctcttggaccaatagcaactgcttcggagtggagacaatgtgtgggtccaccctgggagcatctcaagaggctgggctcctggggctggcggccacatgctctgaggagcaaggggatcatggggctgtggtggaatgttctacaggggacctgtgaggctattgtggaatgttctagaggggatcatggggctgttgcagaatgttctggaggggattatggagctgctgtggaatgttctag

SEQ ID NO: 63562 - DNA, 6227 bp, Homo sapiens
gggagagaaaggagggatgaagccgcctgcccactggacgggagggctgcagccagagcttcagggtagccctgctggatgggacagcactgagggctggacctggggggatggagaacatgggctgggggcagcagccatgcctacctggggggcccgccccgcgtccccagatcgctttgcggtgtctgcggaggctgagaacaaggttcgggaacagcagccccatgtggagcgcatcttcagcgtgggggtgagcgtccttccgaaggactgtccggacaacccccacatctggctgcagctggagggccccaaggaaaacgccagcagagccaaggagtacctgaagggcctctgcagcccagaactgcaggatgaaatccactacccgcccaaactgcactgcatctttctgggagcccagggcttcttccttgactgcctggcctggagcacgtcagcccatctggtgcccagggcgccaggctcactgatgatcagtggcctgactgaagcctttgtcatggctcagagccgggtagaagagctggcagagcggctgagctgggacttcacgccaggaccatcttccggagcctctcagtgtactggagtgctgagagacttctctgccctgctgcagtccccgggggatgcccatagagaggctctgttgcagttgcccctggctgtccaggaggagctgctgagtctggtgcaggaggcgtctagtgggcaggggccaggagcactggcttcttgggaggggcggagctcagccttgctgggtgctcagtgccaaggagtgagagctccccctagtgacggcagggagtccctggacactggatctatgggacccggagattgcaggggagcaaggggagacacttacgctgtggagaaggagggagggacacagggtggtcccagggagatggatttggggtggaaggagttgcctggggaagaggcgtgggagagagaagtggccctcaggccacagtcagtgggtggaggggcaagggagtcagcacccctgaaagggaaggccctggggaaggaggagatagctctgggaggaggagggttctgtgtccaccgtgagcctcccggtgcccatggctcctgtcacagggcagctcagtcccgaggagcctccctcctccagcggctccacaatgggaatgcctctcctccgagggtgcccagccctccacctgcaccggaacccccatggcactgtggagaccggggtgactgcggagaccggggagacgtgggggacaggggagacaagcagcagggcatggcacggggtcgggggcctcaatggaaacgaggcgcccgagggggcaacttggtgactggcacacagcgtttcaaggaggccctgcaggatcctttcaccctgtgccttgccaatgtgcctggccagccagacctccgccatattgtcattgacggcagcaacgtggccatggtgcatggcctccagcactacttctccagccggggcattgccattgctgtgcagtacttctgggaccgtggtcaccgtgacataactgtctttgtgcctcagtggcgcttcagtaaggatgccaaagtcagagagagtcacttcctgcaaaagctgtattccctcagcctgctctccctcacaccctcacgagtcatggatggcaagaggatctcctcctatgatgacaggttcatggtgaagctggctgaagagacagatgggataattgtctccaatgaccagttccgggacctggcggaggagtctgagaagtggatggcaatcatcagagaacgcctgctgccctttacctttgtgggaaacctcttcatggtacctgatgacccactggggcgaaacggccccaccctggatgaatttctgaagaagccagccaggacacaggggtcttctaaggctcagcatccttccaggggctttgcagaacatggtaaacagcagcaggggagagaagaggaaaaaggtagtggtggcattcggaagacccgggaaacagagcggctccggcggcagctgctggaggtgttttggggtcaggatcacaaagtggacttcatcctgcagcgggagccatactgccgggacatcaaccaactgtctgaggccctgctcagtcttaacttttgagcctcacctgcttgagtggctgccgccctgtcagctccagccgcctccagctcagccctttctgtgagagtccctctgctgctcactctgatccagaggcaccctgagttggtgctttggatcagggaagccactttgggacaggtccataaagtgaactgatcttaccgagtcaggacctcagccagctctcaagaggttctgctcagccttaacttctcaactttgccttagcacagggtttctgtagggagtgggggctgctagaggggattagttccggagactgagactgttggctccacctccaagctgagctagggtggagggcagggtgggcaggaagtgacaggaagttaagctgttcctctccctggctgctgctctggatggccagagaacaagatgctcccttgctgagctcctgggagcgtggaaggagatgctaggccctggcacagtgttatgtggactgggccacgatagggtggagtgagctagtgaagaaggcagagggagacttggcttctggtctcagctatgcctgttttgtgaccttgattgagttgcttgggctttacttctgcctacaaatcaggggtaaaaatacctgttgggaggagaaatgagaacatagaggaaagcctcttggaggaaaggtgcttggaccaagtctcaggtgtgtctgcctgtggctgcacaggctctctaaccgaaacctcactttcagagagatgtgggtcctttgtctccaggatccacaccctagattttaacactgcattctcactataacatgccctataatggctgcatcccttttgagcaacctccaaaatctacatttacacagtaggtaaattagggatgactgcattatcaaaatactctcagggttcctataaatggcagctctcctgttgtattcaggtgttgtttacagactaacaaatgtgttggcaaatccctggttagatgcacttcctggtgttgagatgaacacgtcgatttttcaccaatcgatgaagccatgctctgcaatgacaatattaatgtgatccgaccctaacattttctctatggaagacgtatgttgcataaagcaaggcacacttctgctttatgtgtgtgtgtatggggatgggaggacttaacggaagttgaaccagttggttctagatgaaccaattatctggaaaatgaaagaaccagagttggaaggcacttgactggccaccagaccaactctgctgttactgacatgctttcttcaccctgattcctagaggtcattgccctggatctgcttgaagtcctcctgtgccagggaatttactatctccagggtagcacattccctgtgtagacggtattaatcagtactccttactttagtgcagcctaaagtatgcttttctgttacatccacctttgaggctggtcatacctccaggaacaatacagagccagtcaacttcctggaatccaagaccagataaagaagtaggacaggtgcccctgggttctgttctgtgtgggcctgtggggagtctctagacaagatcttttccaggccctgacttctgcctccctctgagtggcacagggagttgaatactgcatggcgagtgtaatgatgatggggagggtccttgtgtcctcaccccttcctttttggtgatttacaccactgtaccatactgacccaggctgggggcaggtgtgttggagacaggctggtcaaagaggtgacaatgattaagagataacccagtggtccctgagaagagattggttagtatggcctgaactggtggctgggggaactgtgtctggtcaagttatggcagatgtcacagctttaggtaggtaaaaagggtcctagatgaaaaccttggagtttttttttttcctgatagggttgtttatacttcttgattggtttcttgccattttcactttcagtgatggtgggtgtgcagtagaccaaaagtgtcttctgcccttttgtgctaagggccctggttgactgagtggccccagtcagatgagaggcaagtcctaagcttcttatagacagggatgttgactttgttctgctgcagcctgataaactgggaccactgtgtggttagtaatgcacttgccatttggtgacacagactgaaggctatcctacacctgggccttacctcttcctctactggcatcctaatggcactctgacagcatccagggtgactacagggcccattggaaatggatcatcattctctcttctagtgtctatctttatcataacctgatgtcccaaacttgtgacaagttcttttggcaactgaaggaccaagaagggaaacggtgatgagagagactgcccattataactttcaaaaccccgtctttggggaagaatcatctagggtgacattccttgaagtaaatcccaggagaatctaggccaaagagatgagccaaggttagtgagacaatttatttttattgcctaaactgcagagcattctctacacagcgtaaaggagaagtggggcagctgcaggacatgtagagaaaccaaaccgggaaatcttacaaggagttgaaaagattaatgtcccaacctgatgagattacggccttgagacaataaggtggagcaacagaacaatgggaaagaggactgggagaggaatctaagaaccagatggcttcagctctctagaggagctgagcctattcacagtgcctaacctggaagcctgtgaggaacaggcctcaggcccttgccatgacctacttaggctacaatttcctttaaggcagcccctagctctgggaaggaatactggtagccagtggccagtgttcgccgtgggatcaccttctggccctccagcagcatgatggcacgctgtcgcccaaagacagcttgcaccacagcgctggggagagggatgaaggctcggcggcccagggcagcaccgaaggtctgggcaaactcagcattagtggcggaggatggagccactccattcaggaccccgtgcacgtggtttgcttcaagggcatgggtcaggattcctgccaggtccccgatgtgtatccaggggaagaattggtggcctgagccgatggggccccccaggcccaggcgaaagggcagcagcatgtggcccatggcaccacccccacggcccagcacaacccctagagcaggaaagagggaaggtacaggggtcttctcagccttgaaggagcccactgctcctcctggtttctgtttccccttcctcactctccccatgctgacttggctctgtaacagaagtgagcagtatggctgtctttaagacctcacaccttctcatctgcaggttggctagaagtggtggcatcctctcactctgtaattgtaatctcagctctcctaatcccatcacttccccagcccagagaagacattccaaccctgtctgatacccaggcccgtttctcacctgagcgcaccaccacctggcgtgtagaatctccaggaagcctggctgcagcttcccatttggttacgaggttggagaaaaagtcaaagtcccctcctgggctgtcttcatcatactccgcagtcagactgggctggtagtaagctgccggtggaacacaatcatttgccctgggtgtccttggtcctgcctggctctctgtagtggaggctccccttggcatcaccttctctggcccttaggatctccccatttggagacagagccatttggatattttccccttgaacttctccatgacctgaagcgttccttccctggaggaactctttggttgcagggctaaacttagaggctgctagagtgtagtggttaagaacaggaacttgggtaccaggcgcctgaattttaatcagctccctcatttattaactctctgacttgatgcaagttacttaacctctctgtatagaattttcacatctttaaaatgggaataatagtacctacctcatagggttgttgtaaggaataaatgataataagcataaaac

SEQ ID NO: 63563 - DNA, 376 bp, Homo sapiens
ggcacgaggaccagctgctgccaaacctgagggctgtggggtggaatgggctggaaggccgggatgccatcttcaagcaggggcaaaacgaaatcttcggcagggcctttggggtcatgacaggagcggccctgccggctgcgaaactggaccaccatcctgaatggactaacgcggacctccaggcccacatcacgctggagacccatgactatgccgaaaattcaaacggagacaagcaaccgttgggccacactgcagtaaccactaattcctgacccactgacctgaagatcacttaggtcacacccaccagcctgaacgcccagaggacaccacccaatgacgggccactggatatcgagtggcggtgacg

SEQ ID NO: 63564 - DNA, 4670 bp, Homo sapiens
gtgtgggaggtcgttcagtgtcatctcagaatttgttgagcaccagatcatgcatactagagagaacctctatgagtatggtgagtcctttatccacagtgtggctgtcagtgaagttcagaaaagtcaggttggagggaaacgttttgaatgtaaggactgtggagagaccttcaataagagtgccgccttggctgaacatcggaagattcatgctagaggttatcttgtggaatgtaagaatcaggaatgtgaggaagccttcatgcctagccccacctttagtgagcttcagaaaatatatggcaaagacaaattctacgagtgcagggtgtgcaaggaaaccttccttcatagttctgccctgattgagcaccagaaaatccactttggggatgacaaagataatgagcgtgaacatgaacgtgaacgtgaacgtgagcgcggggaaacctttaggcccagcccagcccttaatgagtttcagaaaatgtatggtaaagagaaaatgtacgaatgtaaggtgtgtggggagactttccttcatagctcatccctgaaagaacatcagaaaatccatactagagggaacccatttgaaaacaagggtaaagtgtgtgaggaaacctttattcctggtcagtcccttaaaaggcgtcagaaaacttacaataaggagaagctctgtgactttacagatggccgggatgccttcatgcaaagctcagagctcagtgagcatcagaaaattcattctcgaaagaacctctttgaaggcagagggtatgagaaatctgtcattcatagtgggccattcactgaatctcagaagagtcatactataacaagacctcttgaaagtgatgaggacgaaaaggcgttcaccattagctctaacccctatgaaaaccagaagattcccactaaggaaaatgtctatgaggcaaaatcatatgagaggtctgttattcatagcttagcctctgtggaagctcagaaaagtcacagtgtagcagggcccagtaaaccaaaagtaatggcagagtctaccattcagagcttcgatgctatcaaccatcagagagttcgtgctggagggaacacctctgaaggaagggaatacagtaggtctgttatccatagcttagtggcttccaaacctccaagaagtcacaatggaaatgaattggtggaatctaatgagaagggagaatcctccatttatatctcagaccttaatgataagcgacagaagattcctgccagagagaacccttgtgaagggggcagtaagaatcgcaactatgaagactctgtcatacagagtgtattccgtgccaaacctcagaaaagtgttcctggagagggatctggtgagtttaagaaggatggcgaattctctgttcccagctcaaatgtccgtgaataccagaaggctcgtgctaaaaagaaatacattgagcataggagcaatgagacctctgtaattcactctctgccttttggtgaacaaacatttcgccctcgagggatgctctatgaatgtcaggagtgtggggagtgctttgctcatagctctgacctcactgagcaccagaagattcatgatagggagaagccctctggaagcagaaactatgaatggtctgtcattcgcagcttggcccctactgaccctcaaacaagttacgcccaagagcagtatgctaaagagcaagcgcggaacaaatgtaaggacttcagacaattttttgctaccagcgaagacctcaacacaaaccagaaaatctatgaccaagagaagtctcatggcgaggagtctcaaggcgagaatactgatggggaggagacccacagcgaggagacccatggtcaggagacaattgaagaccctgtcattcaaggctcagacatggaagaccctcagaaggatgaccctgatgacaaaatctatgaatgtgaggactgtggcctgggctttgtggatctcacagacctcacagaccatcagaaagtccacagcaggaagtgcctggttgacagtcgggagtacacacattctgtaattcacacccattccatcagcgagtatcagagagattacactggagagcagctgtatgaatgtccaaagtgtggggaatcttttattcatagctcattccttttcgagcatcagagaatccatgaacaagaccagttgtattccatgaaggggtgtgatgatggttttattgccctcttgcccatgaagccacggaggaatcgtgctgcagagaggaatcctgctcttgctgggtcggccattcgatgccttttgtgtggacaaggcttcattcatagctctgcccttaatgagcatatgagacttcatagggaagatgatttactggagcagagccagatggctgaggaagctatcattccaggcttagccctcactgagtttcagagaagtcagaccgaagagagactctttgaatgtgcagtctgtggagaatctttcgtcaacccagcagaacttgcagatcacgtaactgttcataagaatgagccctatgagtacgggtcctcctatactcacacctcatttcttactgagcccctcaaaggagctataccattctatgaatgcaaggattgtggtaagtcctttattcatagcacagtcctcactaaacataaggagcttcatctggaagaagaagaagaagatgaagcagcagcagctgcagcagcagcagcccaggaagttgaagccaatgtccatgttccacaagtagttctgaggattcagggcttaaacgtagaggctgctgagccagaagtggaggctgccgagccagaagtggaggctgctgagccagaagtggaggctgctgagccaaacggagaggctgaagggccagatggagaggctgcagagcccattggagaggctggacagccaaatggagaggccgagcagccaaatggggatgctgatgagccagatggtgcaggtattgaagacccagaagaaagagctgaagagccagagggaaaagctgaagagccagagggagatgccgacgagcctgacggtgtgggaattgaagacccagaagaaggtgaagatcaagagattcaggtagaagaaccatactatgactgccatgaatgcacagaaaccttcacttccagcacagcattcagtgaacacctgaaaactcatgccagcatgatcatatttgagcctgcaaatgcctttggggagtgctcaggctacatcgaacgtgccagcaccagcacaggtggtgccaatcaagctgatgagaagtacttcaaatgtgacgtctgtgggcagctcttcaatgaccacctgtccctcgccagacaccagaatacccacactggctgagggcatggggtaaaggttagaaaaccttcacctaggacttgacccttaccaaaccacagagaatccaaaccaatccatgataatgtcagtaggagacttaaccttagtgtgttacacacctgacttaacatctctaaactcagattgaaaagagaccgaatgtgcagattccacagtcttaagctttccccttcagatgtcagtgtctgcatgtgggaaagccatagcacacatcttacctttccaagtaatcagattgagaaaaccctatgagtattccagactacagagtttgcccaaatcaactgtaaatgacacttgtgtaacgtatatatagtgtttcatgaggtgtatataaaatagcaaattatgacagaacagtgatcacatatatttggatttatatgatatacagttacagtttactctgcagaggtaccttacctggtattctttgaattttttttttttttggggggggaaaagagcaccaaatttgattatatttttaagggcctaaaatcctgaaaaaaatttattgggcattatttgaaccctgccaatatctttttgagaaatggtttggtttcttacccttaaaaagtcttgtgaagctgtaggcatgaaaaaaaacagggcttttactccttactgtttgaaaagataagtactttagtttttttttgcagccatttcatctgcgccaacactttggaacctaatactgtgtaaggctttacaatatacggattggctttttgtgacccagattgattggttgccacatgttatgtttgttgaagtggttctcatgcaaaaatattacacatttgtgttctgggtttttttttttttttttaacccaactcaatatgtgtttggatgatagtgaattgataaaaccccggaagcttttcccctgtaaatcttaccatcttttgccttttaaagaatgggttacaaccatcactagatcacagtagtgcctaatgaaggttgagaaccgtaggagaggctctcatgctgtaaataatgttgcaggctaataacctttcatcacttcctttgtgcgcttcctgccttaagtgacaagtagcaacatggcttgggtcccctgtgcagcatcagcttatgctgccacaagtcagtttgcaccctaggtgcccaggagctagtatccttagatctttctatcgctaacttaattctcttcgttatttatcctgacccctcctaactcccatgtcctaaccttgcattaaaaaaaaaa

SEQ ID NO: 63565 - DNA, 600 bp, Homo sapiens
ggcacgaggaagttcaaattggtccagaaacagttatgaccactctttatactgccaagaaatacgcagtcccagccttggaagcacactgtgtagaatttctcaccaaacatcttagggcagataatgcctttatgttacttactcaggtaagtaaatgtagctaaggtatgtatcattgtagttttaaaattgagtaaactatatatgggcatttaatatttcctggagaattctagattataattttaaagtatataaaatgatttttataatacaaatcagggaaacatgtcagatatctaagattttagaattgaaaagtgtattagaggccatggatggtggttcacgcctgtaattccaagactctggaatgctgaagcgggtagatcacttgaggtcaggagttcaagaccagcctggccagcatgaccccgtctctactaaaaatataaaaattagccggctgtggtggcgcgggcttgtaatcccagctactcaagaggctgaggcagaagaatcgcttgaattggggtggcggggcagacaccctgggagacagagcgagactccatcacaaaaaaaagcatgttagag

SEQ ID NO: 63566 - DNA, 802 bp, Homo sapiens
aatgtgcaacaggctattttcttgaatgaatggattcataataagaacaggacttcaccagcttccaagggaccctccccacctctcggatatattctgaagcctaaatttcacctgcttatcttaggatccttaggcccaggccttctgccacaccaagccacaaccgaagctcagcagtactcacaggcctttaatctataactgcctggccacaccatcacttccccaggatggtggggagggatgaagatgtatagccaggtaggccacaccaactctgagtccaagagggaaggactggggtcaggctggggcttgggcaggggactcccggccccaggcgatgagggagttgctggcttgggcaagctcggcgatggacacccggccccgctgtcggatgaagttggccacggcggccagttcctctggggttatgtagatgaacttgccccggtcgtcaatcacacctgttatagtcccctcagccagcaggtcctggatgcgatttatggtgtcctgagtgcgtaggcccacctgggaagccaggtcttccaagagcacaaccttggactgcttgatgtagttgatgaactctgtcaggaagctctgggactgttcctcagtcatggtctctcctacgccttcctcctccaccacaaaggcctccttcagtttcaggtactcctcatgctcccgctgggcctgctcctcgcgggccttcctctcctcctcctccttctgctcctcctccaggcgaagccgctcctcctccttcttccctcgtgccgctcgtgcc

SEQ ID NO: 63567 - DNA, 1600 bp, Homo sapiens
  misc_feature (1)...(1600): n = a,t,c or g
cgttgctgtcggagactggagaatgtatacacaccttatatgggcatacttccactgtgcgttgtatgcatcttcatgaaaaaagagttgttagcggttctcgagatgccactcttagggtttgggatattgagacaggccagtgtttacatgttttgatgggtcatgttgcagcagtccgctgtgttcaatatgatggcaggagggttgttagtggagcatatgattttatggtaaaggtgtgggatccagagactgaaacctgtctacacacgttgcaggggcatactaatagagtctattcattacagtttgatggtatccatgtggtgagtggatctcttgatacatcaatccgtgtttgggatgtggagacagggaattgcattcacacgttaacagggcaccagtcgttaacaagtggaatggaactcaaagacaatattcttgtctctgggaatgcagattctacagttaaaatctgggatatcaaaacaggacagtgtttacaaacattgcaaggtcccaacaagcatcagagtgctgtgacctgtttacagttcaacaagaactttgtaattaccagctcagatgatggaactgtaaaactatgggacttgaaaacgggtgaatttattcgaaacctagtcacattggagagtggggggagtgggggagttgtgtggcggatcagagcctcaaacacaaagctggtgtgtgcagttgggagtcggaatgggactgaagaaaccaagctgctggtgctggactttgatgtggacatgaagtgaagagcagaaaagatgaatttgtccaattgtgtagacgatatactccctgcccttccccctgcaaaaagaaaaaaagaaaagaaaaagaaaaaaatcccttgttctcagtggtgcaggatgttggcttggggcaacagattgaaaagacctacagactaagaaggaaaagaagaagagatgacaaaccataactgacaagagaggcgtctgctgtctcatcacataaaaggcttcacttttgactgagggcagctttgcaaaatgagactttctaaatcaaaccaggtgcaattatttctttattttcttctccagtggtcattgggcagtgttaatgctgaaacatcattacagattctgctagcctgttcttttaccactgacagctagacacctagaaaggaactgcaataatatcaaaacaagtactggttgactttctaattagagagcatctgcaacaaaaagtcatttttctggagtggaaaagcttaaaaaaattactgtgaattgtttttgtacagttatcatgaaaagctttttttttttttttttttggccacccttggccagggcaaaccaaccccagtttaaccccgggaaaacaaattaaggggggctcccaaaaccatttttaaaggaaaatgtgcccaaaggggggcaagttccccgggtttttggaaccccgaaaaggaattaaattttggaggcgggggcaaaaagaaggcctcaaaaaagggaatggtggccccacccttggcttggcctcccgggggccaattttttttttgcggttannaaaaaaaaaa

SEQ ID NO: 63568 - DNA, 2503 bp, Homo sapiens
ggggcaaagaaaaatgtgaaggattcgaactgcacttctggagaaaaatatgtcgtaactgcaagtgtggccaagaagagcacgaggtcctcttgagcaatgaagaggatcgaaaagtgggaaaactttttgaagacaccaagtataccactctgattgcaaaactaaagtcagatggaattcccatgtataaacgcaatgttatgatattgacgaatccagttgctgccaagaagaatgtctccatcaatacagttacctatgagtgggctcctcctgtccagaatcaagcattggccaggcagtacatgcagatgctacccaaggaaaagcagccagtagcaggctcagagggggcacagtaccggaagaagcagctggcaaagcagctccctgcacatgaccaggacccttcaaagtgccatgagttgtctcccagagaggtgaaggagatggagcagtttgtgaagaaatataagagcgaagctctgggagtaggagatgtcaaacttccctgtgagatggatgcccaaggccccaaacaaatgaacattcctggaggggatagaagcaccccagcagcagtgggggccatggaggacaaatctgctgagcacaaaagaactcaatattcctgctattgctgcaaactgagtatgaaagaaggtgacccagccatctatgccgaaagggctggctatgataaactgtggcacccagcttgttttgtctgcagcacctgccatgaactcctggttgacatgatttatttttggaagaatgagaagctatactgtggcagacattactgtgacagcgagaaaccccgatgtgctggctgtgacgagctgatattcagcaatgagtatacccaggcagaaaaccagaattggcacctgaaacacttctgctgctttgactgtgatagcattctagctggggagatatacgtgatggtcaatgacaagcccgtgtgcaagccctgctatgtgaagaatcacgctgtggtgtgtcaaggatgccacaatgccatcgacccagaagtgcagcgcgtgacctataacaatttcagctggcatgcatccacagagtgctttctgtgctcttgctgcagcaaatgcctcattgggcagaagttcatgccagtagaagggatggttttctgttcagtggaatgtaagaagaggatgtcttaggaggagggcacccagaagtatcgagccatagctatccaaagtggtctgcatttctactgtaaaatgcaatttgaaaaaaataaaacgcaaaaaaagaaactgtaaaggaaaccaagagattttgtttaatttttttggccattttttcttcatcaattttttttcggtctcaacttttaaacttggtttaagcatttgatttgtaaaacagtaaataattgtatctttccatagcttttcaaatgtgaaatcatttttggaagcttggatctcattaaacttcatgtctctattccatttgggccacacacttaaaagttagtgtactgaatggaaagatgagcattcctagttctacacttcttttttccccctcatgtgtaaaatgaaaagaaaactaaatttgccctaataccaaggcgctacgtttattgcctcgtcttattcactgacctttgtaatgatacacagtgaattctttttgacaaagagaaatgcagtgtagtatgcagagctgctgttttaatgcctatgcatttactctttcctgatttaggcagaggtggcattttctttattgcatttctctatttttttaatgtaccctaccttcagtattctctttgtaagttggtgacttgcatctgtggccttgaatattttattatcacatgtggcataacagtatccacactttttagttctttatttttttttttattttgagcaattctcctgcctcagcctcccaaatagctgggattacaggtgcatgccaccacacccagctaatttttgtatttttagtagagacaggttttcaccatgttagccaggctggtctcaaactcctgacctcagatgatccgcctgccttggcctcccaaagtgctgggattacaggtgtgggagccaccatgcctgacccacacactttttacttgtatagatgatttttggcttggacataaaagccaagccacccatttgcttttaatccaaagaacatgtatagtttttgtacccagagactatgatttatattgattgcacttgcctgccatgatttagataagattttttttgcatggtttttattctttcctaatggatcctgttttataatacttccaagcctgtccatggatatatcaaatgtcttcacttgtatattttcatggctaggtatttctaatgtttattcttccctgtgtacttctacacatagctatgcactatgaaaattaaatggaatgaatgatatgtatattactcaaaataaagtttctttcactttaaaaaaaaaa

SEQ ID NO: 63569 - DNA, 750 bp, Homo sapiens
cttgtttttccctctaccagattatggagagaattatggatctacccactttactgaggcatgcattcagggaaatgttttcagtcgggggccttttctggatgtttcgcatcaggataatactttgtttaatgggagcttttttctatcttatatcacctctagattttgtacctgaagccttgtttggaattctaggctttctagatgatttctttgtcatctttttattgcttatctacatctctattatgtatcgagaagtgataacccaaaggctaactagatgaaaaagaaaacaaaactgagtttactaggatatctgagctaatgtagaacatcaaacagaaggacccatggcagtataaagcaatgaagcaatggagtattatctcacaaatataaaaccactataagacaaacatttgattatcatttgacaaatacctaggtataactggaattttcatgtttgaagttctaatattaagtttagaattataatgatctacagttgtatcttgattctatgttgtctggaaaaaatatggaattatataaaaagggatgcttttatatatttttcttttccccagaattacttagattaattagatgtatagtaaaatattgttaaatgtcagtttatccatcttatccttctcagcaggtacctatatgataatatatagctgtgaaactcatctaaatatttttgttccaataaaatattatatactaaaaaaaaaa

SEQ ID NO: 63570 - DNA, 1936 bp, Homo sapiens
ggcacgaggaggcctcggggctgtccgtgtggatggggaagcagatggagcccttgcacgcagtgcccccggcagccatcaccttgatcttgtccttgctcgttgccgtgttcactgagtgcacaagcaacgtggccaccaccaccttgttcctgcccatctttgcctccatgtctcgctccatcggcctcaatccgctgtacatcatgctgccctgtaccctgagtgcctcctttgccttcatgttgcctgtggccacccctccaaatgccatcgtgttcacctatgggcacctcaaggttgctgacatggtgaaaacaggagtcataatgaacataattggagtcttctgtgtgtttttggctgtcaacacctggggacgggccatatttgacttggatcatttccctgactgggctaatgtgacacatattgagacttaggaagagccacaagaccacacacacagcccttaccctcctcaggactaccgaaccttctggcacaccttgtacagagttttggggttcacaccccaaaatgacccaacgatgtccacacaccaccaaaacccagccaatgggccacctcttcctccaagcccagatgcagagatggtcatgggcagctggagggtaggctcagaaatgaagggaacccctcagtgggctgctggacccatctttcccaagccttgccattatctctgtgagggaggccaggtagccgagggatcaggatgcaggctgctgtacccgctctgcctcaagcatcccccacacagggctctggttttcactcgcttcgtcctagatagtttaaatgggaatcagatcccctggttgagagctaagacaaccacctaccagtgcccatgtcccttccagctcaccttgagcagcctcagatcatctctgtcactctggaagggacaccccagccagggacggaatgcctggtcttgagcaacctcccactgctggagtgcgagtgggaatcagagcctcctgaagcctctgggaactcctcctgtggccaccaccaaaggatgaggaatctgagttgccaacttcaggacgacacctggcttgccacccacagtgcaccacaggccaacctacgcccttcatcacttggttctgttttaatcgactggccccctgtcccacctctccagtgagcctccttcaactccttggtcccctgttgtctgggtcaacatttgccgagacgccttggctggcaccctctggggtcccccttttctcccaggcaggtcatcttttctgggagatgcttcccctgccatccccaaatagctaggatcacactccaagtatgggcagtgatggcgctctggggaccacagtgggctatctaggtcctccctcacctgaggcccagagtggacacagctgttaatttccactggctatgccacttcagagtctttcatgccagcgtttgagctcctctgggtaaaatcttccctttgttgactggccttcacagccatggctggtgacaacagaggatcgttgagattgagcagcgcttggtgatctctcagcaaacaacccctgcccgtgggccaatctacttgaagttactcggacaaagaccccaaagtggggcaacaactccagagaggctgtgggaatcttcagaacccccctgtaagagacagacatgagagacaagcatcttctttcccccgcaagtccattttatttccttcttgtgctgctctggaagacaggcagtagcaaagagatgagctcctggatggcattttccagggcaggagaaagtatgagagcctcaggaaaccccatcaaggaccgagtatgtgtctggttccttgggtgggacgattcctgaccacactgtccagctcttgctctcattaaatgctctgtctcccgcggaaagctcc

SEQ ID NO: 63571 - DNA, 2374 bp, Homo sapiens
ggcacgagtcagaattaaaagaagaaataaaagcattagaagatgccagaataaaccttttgaaagagacagagcaacttgaaattaaagaagtccacatagagaagaatgatgctgaaacattgcagaaatgtcttattttatgctatgaactgttgaagcagatgtccatttcaacaggcttaagtgcaaccatgaatggaatcatcgaatctttgattcttcctggaataataagtattcatcctgttgtaagaaacctggctgttttatgcttgggatgctgtggactacagaatcaggattttgcaaggaaacacttcgtattactattgcaggttttgcaaattgatgatgtcacaataaaaataagtgctttaaaggcaatctttgaccaactgatgacgttcgggattgaaccatttaaaactaaaaaaatcaaaacacttcattgtgaaggtacagaaataaacagtgatgatgagcaagaatcaaaagaagttgaagagactgctacagctaagaatgttctgaaactcctttctgatttcttagatagtgaggtatctgaacttaggactggagctgcagaaggactagccaagctgatgttctctgggcttttggtcagcagcaggattctttctcgtcttattttgttatggtacaatcctgtgactgaagaggatgttcaacttcgacattgcctaggcgtgttcttccccgtgtttgcttatgcaagcaggactaatcaggaatgctttgaagaagcttttcttccaaccctgcaaacactggccaatgcccctgcatcttctcctttagctgaaattgatatcacaaatgttgctgagttacttgtagatttgacaagaccaagtggattaaatcctcaggccaagacttcccaagattatcaggccttaacagtacatgacaatttggctatgaaaatttgcaatgagatcttaacaagtccgtgctcgccagaaattcgagtctatacaaaagccttgagttctttagaactcagtagccatcttgcaaaagatcttctggttctattgaatgagattctggagcaagtaaaagataggacatgtctgagagctttggagaaaatcaagattcagttagaaaaaggaaataaagaatttggtgaccaagctgaagcagcacaggatgccaccttgactacaactactttccaaaatgaagatgaaaagaataaagaagtatatatgactccactcaggggtgtaaaagcaacccaagcatcaaagtctactcagctaaagactaacagaggacagagaaaagtgacagtttcagctaggacgaacaggaggtgtcagactgctgaagccgactctgaaagtgatcatgaagttccagaaccagaatcagaaatgaagatgagactaccaagacgagccaaaaccgcagcactagaaaaaagtaaacttaaccttgcccaatttctcaatgaagatctaagttaggaaagacgatggaggtggaatcctttaagattatgtccagttatttgctttaataaagaagaagttacccttgtcaaaatcagaacaaacctgatgtctttctgaagattttctgctgtgcgcttccacgttactttggcctgtattaaagcagtagagcagcatcagttattatagtccagaaaaagtgtgcatcagtcagtcacacagatttatcacaatctgaggtgggcctaggaatctcatttttaaatagtctctccaagtgattcttatgaactctttatgtttaaaatcatgtcattatggaaaacttacaagtgtaactagctagtagcttgcatttgagaagcttatgacttagatgggcagaatcaacaaagatgaaaccgcctgaggacacatttaacaagtaacatttctagggaaaatgaaggaagtaccaccaaactggctagaaaggagcttatcaatcacccagtgaggaagaccagtataacgttcaacaacagttattttggacaaaaacttattttgtgattccctacagtgaaaacatttttggtgatatcctgccctgggaaatctctcttcctaaagtatttgtatatgggagtccttgtttgtgaatgtttccctggattagggaggtgtcaacataaatgtattattaaccatgaagctgctcgctatatttttggcataacaaaataatatttatttactgtggataataattctagtgggaatataatgtgacaggaacttctctttatatacgctaccaatttatgagcactattcactgtcaatttcatttcttgtcttttgaaattgacacttggcctgacttacgaaacttgtactatatg

SEQ ID NO: 63572 - DNA, 2243 bp, Homo sapiens
ggcacgagactagaggaaactccaaataccactactatgggattcgtgtcaagccagattcccctcttaatcgtctgcaagaagacatgcagtatatggctatgagacaacaacccatgcaacagaaacaaaggtacaagcctatgcagaaagtggatggggttgcagatggtttcacaggaagtggtcaacagacaggcacatctgttgagcaaactgtaattgcccaaagccaacatcatcaacagtttttagatgcatctcgagcacttccagagtttggagaagttgaaatctcttctctgccagatggtactacctttgaggatatcaagtcactgcagagtctttatagagagcactgtgaggcaatattggacgttgttgtgaatcttcaatttagcctgatagaaaaattgtggcaaacattctggcgctattctccctctactccaactgatggcactaccattaccgaatcgagcaatctgagtgaaatagaaagtcgacttccgaaagcaaagctgataactctgtgcaaacatgagtctatcctgaaatggatgtgtaactgtgaccatgggatgtaccaggctttggtggagattctcatccccgacgtccttagacctattcctagtgccttgacccaagccattcgaaattttgcaaaaagccttgaaggttggctttccaatgccatgaacaatattccacagagaatgatacaaaccaaggttgccgctgtaagtgcctttgcccagactctgcgaagatacacgtcgcttaatcacctggcccaggcagctcgtgcagtgcttcataacacttcccaaatcaaccagatgcttagtgacctcaaccgtgtcgactttgccaatgtccaggagcaggcttcctgggtgtgccagtgtgatgacaacatggttcagagactagaaacagacttcaagatgactcttcagcagcagagcaccctggagcagtgggctgcgtggcttgacaatgtgatgatgcaagcactgaaaccctatgaaggaagacccagttttcctaaagccgccaggcagtttctgctaaaatggtctttctacagctcaatggttattcgggacttaaccttacgcagtgctgctagctttggctccttccacctgatccgtctactctacgacgaatatatgttttacttagtagaacatcgtgttgctcaggcaacaggagagactcctatagcagtcatgggcgaggtaagagaggctgaaagagctgtgacccactgggttattaaaaataagccagaattacacttcagtctaaatacattattgattaaaaccatggttcctaaccaagtcagcctcagagccaggagggactgtggagttattgcaagagttccttaaattcctctgttcttatgtgcttaatcaaaagattctaaaattgtggattatatcatgtgaaagttcatggaatgtgtctctatattatacaggtacctatgtaaaagaaaaacttgagaaccactggaatatgaaaaatattttaagtgggaaaaagattggtgctcctgataaagcaaagggctaggaatacaatggaaaggattaaatatgtattttgtagactctttcccggtctccaagaacaaagtaaatgattctattttagaaggataaaaatggtaatgatgataactaacattttttggacacttactatgtgcgaggcacagttctatgttttttacatgtaataaagcacttaatgcaagtctttgagatacgttctactttattctgttttacaataagcatccgaggtttatgcagaaagctaaggcacagaaaggttaaatgattactcagctaaaaaatggtagagatttttttttcaaacacagtctgattttcaaacccatatgcttctaaccactaatgatgtaagggggaaaattctcttcttcagaatttctgaatagtcatcaaaatggcttatcaaaaagcttaaactctgaatataaacaagggctggttaatataatgaggaatagatgcaaatgctcagatggttcagcactggcttattttgttatattgaatgcaggaggcgggggtagtttataccttgtcgaatcataccagattattaaatgtgacaaattacccaaggcggtaaaaaagacatgttcacttttaagctatgtgtatgtgcttatataaataaaaaagagtgaaaac

SEQ ID NO: 63573 - DNA, 1308 bp, Homo sapiens
ggcacgagaaagtcttttgaatgcaaagaatgtggaaaatacttcagatataactcattacttattcggcatcagataattcacactggaaagaaaccatttaaatgtaaagaatgtggaaaaggtttaagttcagacacagccttgattcagcatcagagaatccacactggagaaaagccctatgaatgtaaggagtgcggcaaggccttcagtagcagctctgtcttcctccagcaccagaggttccacactggggagaagctctatgaatgtaacgaatgttggaaaactttcagttgcagctcaagtttcactgtccatcagcgaatgcacactggggagaaaccttatgaatgtaaagagtgtggaaaacgattaagctccaacacagccttgactcagcatcagcgaattcacactggggagaagccctttgaatgtaaggagtgtgggaaggcattcaatcagaaaataaccctgattcagcaccagcgagttcacactggcgagaaaccttatgagtgtaaagtgtgtggtaaaaccttcagctggtgtggaagattcattctgcatcagaaactacacactcagaagacacctgtccaagcatagggctatccatagttaggcccactgtgcctctccttttttctctttattttcatgctttttatcagtgtcctcgctgtccttcctggttagacacttggctttcatcatgaactcttctttaagttttttgaacctgtttccccaacatgaagtctctttatggttagagaagaccaaaaaacaaacaaacaaacttagaaacataaaaggaaatgtaagtttccagatttaaaggacatgctgggtgcccagcaggatggattcaagggaaacctacattaaggaaaattgctgtgaattatgaaaacaccaagtttgaataagaggatcatggagaaaaaatgagaccctaaaaagtttctagagagagaaaacaaaagatcagaaatgaaagcggggccaggcgcggtggctcgtgcctgtaatcccagcactttgggaggctgaggcgggtggatcatgaggtcaggagttcgagaccagcccgcccaatatggtgaaaccccgtctctcctgaaaaaaaaaaacacaaaaattacccaggcatgggggcgcatgcctgtaatcccagctactaaaaaggctgaggcaggaaaatcacttgaatccctgaggcaaaggttgcagtgagctgaaatcgcaccactgcactccagcctgggcgacagagtgagactttgtctcaaaaacagt

SEQ ID NO: 63574 - DNA, 2232 bp, Homo sapiens
ggagtaagtaagttttagtgcagtgtaagaactataggaacaaaccagaccagtgaagtcacacaaacccaaaattattaaagtagtaaaagtagaccttagaaaaaataaggcaggggcatatcctgaatggaagtattcttgaattttcatttactctatttacataaatatgcagtgtgacactcaactgatttcactccaccttcaaggcatgtattttggcctcatactattactacatttgagtaaacatttaacctgattagttttaaagtagcaaaggactaccaataaaacgaaagttatcatacaaatgtggaaggaaggacccactaaacccttgaatataagcaaagaggtaggtggcaaagcagcctttttagaactttaaaattatgagtagatattttacattatttgaacaaagaacatgtttagtttcacacttaaggtttacttacttacagattttcttcaatttacattgaacaaaataatacagtatcaagtttagcctgggtgaggggacatgttttggcatcttttccctatagtagtagttttggttcaaattaatttttgaaaaatagcttttgtatggaacagtataaatgggcttatagttcagatactgagcaaatacacaatactactttttactaacaggcacataaaggaaatgacaactattcgtgggctcaaaaaactgcatattttaactaattttcaaaatttacaaatcagtatctcagagaagttaaagaaaatggaaaggaacaaagcccttttagaataattaatatacattgccttgcttctttccaaaaggaacatgtacttgtcaccctagcttttgttatttagagcactggtacagatacgctgtcccatacatcaggatcaaattattagtttcagtttcacattgtaggaatttaagattttttttttttttaacacaggaaataatctcatcatttccaaagatgtcttcatgtcccatcaatgacatgctaccagacatatcagattccacaggataatggcaccaagctacccaagtagatgtttctggtattctagactgccgttcatgcttgtttcctaaagtatacttaaaagtttcaaatacagtttcacttagaaactgcaaccctccaagtaatgttatgtttacttaggtattaatgttatgtttacttaggtatgtatcagaggcaataatttccaaagcagatcttagaatataaccaatttgttagataactaactttatctctatcacatctgtttacaagcaaagtattactttgtctggacttatttcatcttcagtgtctgggatcgtgggcaacagagcagatcgcgttaagccccaaaatttttgaggtgacatgtcttttttggtggccgtaaacttccatccaatatggcttgcacagatcttacactgggcaacagtccaggcatacccaggaaaccagctgtgttctgtagaaggccggcctatcagattcaagttgcaagccttatacacagtaagtgtctcatgcacatatccatgaggattcacataagctgccatcggcccacataaggataaactgaatatttcatttttggttgttatttctgtttcttgacattgtttacagcaaagggaagtacatttattcataatgtctaattcacagcgaagtcgctggatagcactgccaattttaaggagctgaattctcaatacatcatcaataggaagacaagcagctactctgtaagaaaaatctattggatttgaaggaagagaatcatcttttagattttcatcccattcacgtagctgtttcttgattctgtccattaaggtctcagcatcatataaggaatacagccagcgaggccatgaagttagatttgcacaatgaaactttctcttctggtatttctgccaccatttatatgaacattggtcttctcttgagacaggttttgaaggaaatatctggcacttattgagggattctaattgaactgcagacatggttgaaggcaacacacattcgggaagaatttgcactttagcttgctggattccatctgactgtgttcttagctcaaggactttgaacctttgtcttccaattgctttcactttcactatctcaattccaaaatcctgttcttctcgataggcatatatctctgctgttgttccaaactgtgcttccc

SEQ ID NO: 63575 - DNA, 354 bp, Homo sapiens
ggcacgagctggaaaacaattggcttcaacatgagaaagctcctacagaagaagggaaaaaagagctgctggccctaagtaacgcgaacccctcgctgctggagcggcactgtgcctacctctaagccaagatcactgaatgagcggacgactgaggacatatgctttaagctcgacccattcccatagcgacgctcatcactctgcttgcatgctcttcaaccctcagctgtcggctctcgagctaccccctcaatgtcatgcggcctccttcccatccgcccttcctcgccgctgctcagtactccgcgttaggagaccttcgtacttagcggcccgctccagagtaccgcc

SEQ ID NO: 63576 - DNA, 1834 bp, Homo sapiens
ttttttttttttaaaaaagggtcctatgtggaaatgagtgggacaatgataaaaataaacaaataattaaaattccaaatcaaaacataactcctggccctgagatccccagttaatcctctaagaccacaatctccacattgtgaacttgatgctggtgttcttccatctcagccacaactttctcctcagtcctcagctctgtctccaagatgactgctttgccctcagtatcttcagcttctgggtccggggctggatcaatctcaatgatggtctgcccatcctctgaggtgctttcaacagcctgaattgccgaggttaggccggactccatggccaccaattccacagggctaaccatggtggtcatgttgcccagtgtactcccatcctgcatggcagtagagctcagcagcgccaagctagatgaagggtggatggtcactgtgtctggtgagctgctcttggcagaggagaccactgtggcatagcggaagagctgagggccagaaggcagtgtgtggacagtcacaggactggagccctggctgagggtggccactggaatattgcccatggaaaatgactgacccactggggtgatggtgatgggtgagatgactgtgaactcaggctgctggacaggaggagaagggctcaagacagtggtggaggctggccgctggagccggggcctttttggaggcttaggagtgctcacaggcatcagtaccacattttgaactgtctgagatttcagcctgtgatcctggccttgcttcttctgctcctccaactggcgttccaagtctgtcagagtatagagaaactgttcttctccctgctctacttggttccttctgttgtctaaaaccttcttgactgtgtccattaggccaaatgtgtgtgctacattgttgagaacagcagcatctgtgacttggaagggagcctggatgagccgctgctgaactcccctgagtagctcctctatttccttctgtatattgcagacaacctcttccatcagccctacatcagctattcctttccagaacatcaaagtgtcctctgaaatttcctctgagtctttctttacaccctcctccgtggccatggtgacagcagcggtgagagctgagttccattccagccctgcctcttccatgctctcttctgagatggcaatctgcgtgatgctaccatcagccgaagtgggtgtctgcaccacacttgtctgctgtcctggcactggagctcttgcactgctgatcagaagatcaaatttggtgcttctgcaggtattggagcaaactttgtcatgttggtaaaaatcaatctgtccggagtccatcattttcctgagcatgatcccacccagacgaatagctctcttccagtccttcagagtggacttgccagccagatgaacaaagtgcttggggctgatcaactgatcattgaacttgacacacttcacgtttattcctggacatacaaacttcttccagaggaggatggctttgctctccccacaagttatggggtaagcaatttccatatcctcatttgcttctatagtgcctgtatcaatcccttcttcaattttgtgtatcgtgtgagtttctactgctacaactgccgtgttgttctccgacccagcttcataaatcctgttgtaaaagtgtccatcgataaacaaaccttgttgcacaggctgtaactgcaaaatcacttgggttttagtgtcttcaggattctccccttcatttccttcagtaggtaccacaaccacatcccccactgggacactcacttctgcattagccat

SEQ ID NO: 63577 - DNA, 2251 bp, Homo sapiens
acacacctaccttcccctggaggtctgtaacattgtggcaggacaaagatgtattaaaaaattaacggacaatcagacctcaaccatgatcagagcgactgctaggtcggcgcccgatcggcaagaagagattagcaaattgatgcgaagtgcaagtttcaacacagatccatacgtccgtgaatttggaatcatggtcaaagacgagatgacagacgtgactgggcgggtgctgcagccgccctccatcctctacgggggcaggaataaagctattgcgacccctgtccagggcgtctgggacatgcggaacaagcagttccacacgggcatcgagatcaaggtgtgggccattgcgtgcttcgccccccagcgccagtgcacggaagtccatctgaagtccttcacagagcagctcagaaagatctcgagagacgccggcatgcccatccagggccagccgtgcttctgcaaatacgcgcagggggcggacagcgtggagcccatgttccggcacctgaagaacacgtatgcgggcctgcagctggtggtggtcatcctgcccggcaagacgcccgtgtacgccgaggtcaagcgcgtgggagacacggtgctggggatggccacgcagtgcgtgcagatgaagaacgtgcagaggaccacgccacagaccctgtccaacctctgcctgaagatcaacgtcaagctgggaggcgtgaacaacatcctgctgccccagggcaggccgccggtgttccagcagcccgtcatctttctgggagcagacgtcactcacccccccgccggggatgggaagaagccctccattgccgccgtggtgggcagcatggacgcccaccccaatcgctactgcgccaccgtgcgtgtgcagcagcaccggcaggagatcatacaagacctggccgccatggtccgcgagctcctcatccagttctacaagtccacgcgcttcaagcccacccgcatcatcttctaccgcgacggtgtctctgaaggccagttccagcaggttctccaccacgagttgctggccatccgtgaggcctgtatcaagctagaaaaagactaccagcccgggatcaccttcatcgtggtgcagaagaggcaccacacccggctcttctgcactgacaagaacgagcgggttgggaaaagtggaaacattccagcaggcacgactgtggacacgaaaatcacccaccccaccgagttcgacttctacctgtgtagtcacgctggcatccaggggacaagcaggccttcgcactatcacgtcctctgggacgacaatcgtttctcctctgatgagctgcagatcctaacctaccagctgtgtcacacctacgtgcgctgcacacgctccgtgtccatcccagcgccagcatactacgctcacctggtggccttccgggccaggtaccacctggtggataaggaacatgacagtgctgaaggaagccatacctctgggcagagtaacgggcgagaccaccaagcactggccaaggcggtccaggttcaccaagacactctgcgcaccatgtactttgcttgacatgttttagtgtttagcgattgtgtaccgagtgggattcacgagaccagctacactcagaccaacagatggccagcccttccgtgacagccagcatcgaacatgagacgtcattgattttattagattctccgttttccagaatgccttccgtcccagatttcaaacttggattttgaactgcagacctgtatgagaacccaatgtcataggaaatatggtttgctaaaatctataagctgcttattaaaacagagtcccgtgtgtcctaaaaatctcctaaaaccagtctatgaactcagggctttaaaacatttttaatttatttggtcattcaatttacttgtttttaatacatgattctctatgaaattgatgggctcaaactagctgtgaatcttctgagagtgaaagcaacacaaaacacaagtgtggttttaaagccttgaacattctgatgttgtcactaaagttgatttccaggcgatgctcgtgtgcccctggcgtggctcacccaagttcctcgactgagggccggtgcatagcagaggcgtccgcagtgccgtgttctgccagcaccgcccttcacccggcctgaactaaggagcagtggcagaaggtgggccccgtgtgtttacagcatttccaggtccagagaggttggcagacaagtgc

SEQ ID NO: 63578 - DNA, 950 bp, Homo sapiens
gatcacagcccctacccacgtgcctctccagtacatcggccccaaccagccccggaagcctgggctgcctggccagcctgctgtaagctaagaacccacccacagcagccctcgggggtgtcactgcttcctggaggttcaggagaccccggacacctgggacctgtgttcctgagcccgtcctgacatctgtgttcttcctgtcagctccacgcccgggcccctggaccacggggtccacctctcctctgtcctgaccatttattggggactttttgctcagcactgtaggaggaaagaaggaaggagggatggaagcctcttcctctgcttctcctgtccctagaaccgtaaagcccagacgtcctgcttcccactgggaccctcaatgataacacgggtcagtgactgactctgaggcagcaaggacagaggagaggtggaccccgtggtccaggggcccgggcgtggagctgacaggaagaacacagatgtcaggacgggctcaggaacacaggtcccaggtgtccggggtctcctgaactccaggaagcagtgacacccccgagggctgctgtgggtgggttcttagcttacagcaggctggccaggcagcccaggcttccggggctggttggggccgatgtactggagaggcacgtgggtaggggctgtgatccgatcagtgccgaggtaggactggagggcagggggcacgagcactgagccgtccttctgctggttactctccaggagcgcgatgagaaggcgggggacagcacaggcggtggcgttcaccgtgtgggcaaactgcagctccccagcctcggtctggaacatgatgtggaggcggcggctctggaagtctgtgcagttggaagcactggtgacctctccaaagcggcctcggcctggcatccaggcctcaatgtcaaacttgcgctcgtgcc

SEQ ID NO: 63579 - DNA, 1165 bp, Homo sapiens
ttttttttttttcacgtttgacatttattgtttattcccacacccatcccatgaaacaagcaggactttccattttacagatgtgaaaaccaagattcaaagagactcaataacctgctccaggacaaatgacagaactgagacttctgactccaaatcttacgctcccccgccacacctctttgcctttctctttcacaccaatggactctatgggtgaccttggcacaggttcttctaagaactggctcttaacaaaaacttctggccattatctgactgaatgtcacaaacaagtgctgtaagaacttgcttagagcctttttccctaaacctgtacaccagctcttgccttgtgaatttattcaccacaaaacacatgttcccagggggcccaggcaaaagtctccaagtaccccagtccccctttccttcagccttgcccacacccctcagccttcctggttaatccaggcgacccagggttacccagaggtccaggtcccagttgttcacttgagcatctgatgtaccccaaacacctgtgtgaaacgctctctgtccaggatgcgtccatagcgcagggtgacgtagaaggtctgtttcccactgtaccgctggatacgcacaaacatctcctgaggccggtccttggtttctgtcaggggaatcacatctgccatgggacagtatgtgtcctgccgccagccccagaagttcagatgggccacccgcagcatggtgccagactcattcagatacaggataccaaccagtctccgtaagaaatagctcatccagcacagcatggtcagggcaaagcccgatatcccactcatgaggcacacggtgttgagagtgaggaggccctgggagtacaagtaatagcctggtggcaaagctaccactgtcagggcagtctgtgccaacttcagtcgtgacaggaacccgaaggttctgatggcatcaaaacggtaaaacatccagaatttctcagtctctgcgtttggtagtttctccttcgagatgggtgaactgctgcccacccacctcttaggatcctcctgcccactgcagcaccacagcccatggagaggcctttcccacacagcttttccccgaaacctacgcacagctcggagaagggcagccatggcctcgtgcc

SEQ ID NO: 63580 - DNA, 428 bp, Homo sapiens
ggaattcgagcgtgtgactgcggaagctgtgaagccacgggagacctcggagcctagagcagcagctcagcgcttctgtgagaaattccctttcctttgaagttttttgccctttatttgcatccttaaagcagttcgcttgttttccctccttggaaaaattaattatgatagtattggcttatttatgatcaccaagacttgtattcccttagcatagcttacagtataagttcacacttagctttgagcaccagcaccaggaagacagctttttaaaattacttacttacgtaccatcttgttccaaaaaagatttgtggtggtacaaaagctatatagaatacagaagatgaaaaaggaattgagtgtagccagagggtggaagcagcccaggtgtcccatcaacagataaatggataaacaaa

SEQ ID NO: 63581 - DNA, 557 bp, Homo sapiens
ggcacgagctggagaatctggtaaaagcaccattgtgaagcagatgaggatcctgcatgttaatgggtttaatggagagtaagtgtcaaatctgtgcaggggggcaccaagtaagaggaacagactttatactaacctttaggaagtataggtgggctttgggggctgggcagccagttttcacttaatttttcctgatttacatattagaaaatcctgggaagggctctttagggtccctcaccccccacccccttggatctttggtgcaacaaatactactgatgaaagcaccagtgtttgtgacaaacatctccctatcccaagaaaatcgtgcctggttgcaggggacgcttgacagcacttggccccgtgacagcccctctccgggccaggtccctgccacagtcttcggacatcactgcagtgtcttcaacgtggctttggccgccccctcgtccggcccacgctgatcactgcaaattcaccccaccccacctcacgcagatttcaatgtaatgaaccaacacaggatgttttaaactattagggaactg

SEQ ID NO: 63582 - DNA, 2572 bp, Homo sapiens
ggcacgagtctttttttctcttatttgtgtctcatttcagatgactgtttaggttgaaacataaaattagacatcggtcatcgcaaatgtacctgatgtttaacatcatgcaccgtcaggacactcattagtgatacctgaactgatcacgtttcatgaaatccaaacctttcacactgtctttcaaaacggtcatctcccaatcctaaggccagggccctgaggcacccccgccccggctggggacactccgtacctggactctctctgttgctgttggccacagctgccggcacaggactttcttgaggacgtcgggaaggaggctgatggtcaccagcagcacgatggccagccaggcgggcccgctggacagcatctggatgaacacgtagtacatcctctggtagttgaggaacggccagatcactcctccccagagaagtgaaaagacaacgtagaacagcagcgacccccagatgacaaaatggttgatccaagtccagtagtgtgtgtccaatgcaagctttagtgtaactgtgaacaccatcacggtgaataccagcgttccaaacgtccagtttccaaatatctgcccgttgcttgtcacagttgtattttcaaacacgaaataagcaccaaagaagaacaccagtgcgtcaaacagtcccaggagcgtccagtagatgaacacgcgccagcgcagcagggcattcttggcgacgtccctgtacagggtcgggtctctcttgagcacgtcaatgccaacatgctgctccatgaggctgtacaggaggatggggagggaggtgaagctgatgttgtagagggtcagatacgcggtgtcgtacaaagtctgttgtgaaaacccacagaagaactggtataaaaactgagggaagatgaagcagacgttcttatagaagaagtactgcacgagctcagagatcctaatgtaataaaaatgcccgtgaacaagcagcatcttcttcaaatgcttaaactttgggattgcatagtcgctgttcctggcagcctggcggccttccttgccgatgacacctatgcccacgtgcgcttccagaatcatgctgacatcatttgcaccatcgccaattgctaacgtgattgggtgctcttttgaaaatttgattaatttaacaatctgagccttctgcaagggcgccatgcggcagcagagcaccgcgctgcagctccggcagatttccaggaagagctccctgtagttgccggaactcccgtcttctcgaggcttcattatcagagacagtgcagctccgtcgataattaaaccgtagtcctgcatatctgctgaaagtccggagaggttgtctctggtcaggctcccgctgtggcgcaggaccgtcttgctcagctcgaacaggacgtcgtgcaggctctgctcctcgatcctcttggtggtcagctccagcagctgcgtgttcctgcggaagagcttgcaggcgtagcacgtggccgcggccgtctccatcttgtctcccgtgagaacccagactttgatcccggccttctgcagggcctcgatggtgtctgcagctttctcctgcagccggtcctcaacagctgtagcaccaagcagagtaagatctttctctatttgctcataggcttctgctaactttttctctcgatcttgaagggccactttggcagcctgcagcagcttacaaatgccttcatattcttcttggatcagccttttataagcaacacacaaagttcggagcccctccactgcgttacgctccactctggctcggatctggtcaactttgccttctatcactcgggggaatatcgaagaatctgctcctttgcaaaacagataaatttctcctgtagcagattttacaattacactcattctccttctgactgagtcaaaactcaaaatttccagcaattcaaacctttcgatgtggttctccctgtttaatatctccatgtaattgtccttcagccttaggtaggtaaagccaagtctctggacaccttcgaccagcgccacctcgtcgggcgaggatgagatgtacacacaggatttccccccgtccggcgatttcctggggccgtctacgctgtcatcgtctttcacctggacggtgtggcagagacagagggcccggaaaaacagctcctcgcgctccctcccgttgacgctgggggacgagtcaatcatgtcgattcctgacgactctgggaggacctgcccgttgcagatgacgtggggcacgtagacatggccttcgatgcagcactccttgaactccatgttgttttccgtgagggtgccggtcttgtctgtgaagatgtactccacctgtcccagctcttcattgaggtccgacgtgttcaccagaggcccctcgccagtctcctcgtcaaacatgtcttcgtcccaggtgatgaagtaagagccgaggaacttctgcatctcgaccgtgacgtacatggacacagggatgatgtagttaaagaggaccatgaaggccaggaagtccgtgaatgccttgaggaacagattcctctg

SEQ ID NO: 63583 - DNA, 363 bp, Homo sapiens
ggcacgaggacaaagtcaaagaggagacatttcacagatacctcagccaggcgccatgaggcctatgaggtcaagaatggagagaagtttgagaaattaggaaaaaatattagcgtcagcacacaagtcacgtacgaatgagacaaatcctagtggtcagatatgttaggagggtggacgagtggggagatatgtgatggggatgcgggacttgcgtgatgtgggggagtgggtggcgggggttggttgggggattggggctgtggggaggagatggagagtggtgaggtggggtgtgtgggtgtggggatgggtgaaggggaggagtgggggatggttgtgatgggtgtgggtgaggggggg

SEQ ID NO: 63584 - DNA, 1153 bp, Homo sapiens
ttttttttttttgcattgtatgtattacagaagttagaaacaaacacctggatcaattgtaaacataatcctgaattacagtattttccataggacaaaacacagcaagacattttctatttagacaggcaactttttgatatagagcttatttatactgaagaatctggaacaaaacacaggacacagtactaatctgtcaaatatactatgaaatgcatagtctccacttaaaatgctgaatgacacacacgttttgcaagcattactgctttccacaaaaactgctgaataggagttccgtccctgccaagatcagtgtttaagagatactttatgatgctgataagtattattggtggtggtggtgttcagaaagtttgtcactcatgcagatgtctgaaatcttgttccgaatccatggaacatagggtggaggccagctcccccttttttagatgatcacatagttctgagcagagatgtggtcctcaccctgcagttcctgcaggagctgctgctgctgggatggctgctggacagaggcctccatggagcccgctgtgctggtgtcatcagaaagagacgtaaaggaaacccgggatgagagctgctcaacggtcagagttgccaaagctgagctctggccagagttaggagagttcttgagcataaggtcagaagcaggtaagagggggcctagaagttttacaggacagaaagctgatccggttgggatgaaattaaccttgtttttgtcaggacatgaaaagagaggggccgagataggctgacgagacgccatttcctcaaagaccttcactcgctcacatccctctgggggctcccgtttgaacatgtagctgttgtttggtttgggagatgaagcatacttgggtaacggtgagctactcccactgtctgtaaatttaaagcagttatattaactagtgattgaaagctcttttaaatttgatttccaaacaaacagccttttgcacaatttatccactactgcccctatgctttgaccagtctcctttattgcaaagctatttcttataccctgtgtagcacatttcttgtaaataaaaactgcaatgcaacagtcatctgccacaccatagaacataaaaaggacatttctcgtgcc

SEQ ID NO: 63585 - DNA, 406 bp, Homo sapiens
ggcacgaggacaatggtgtttggaggaaagggaagggggtggggcggcctccgtcctttagtcctgatcaaggtgaggagatgcaagtccattaaaaaaacatttgcttccaaccagactcctttctcagtggtgccggtcccgttctctatcccggtgtctctcatgctcccggttcctttcttggaaataatcatcatgccgatcttcattatgaagcagatcccggtgcctcctgctgctctcccgggaccggctaggtgacctttcccgggagcgatgtcttttcctggaagagctcccactggcacccacactgtaggacttggcttcaatgccatgaagacagtccttaagagaggagatgaggacacggcaacgctcatcattggcaacccgggtattt

SEQ ID NO: 63586 - DNA, 925 bp, Homo sapiens
  misc_feature (1)...(925): n = a,t,c or g
ggcacgagcggcacgagggctgaacaggaaaagcgagagaaaacggcctcaccagcttacacagcactgaccaccacagccaaagtccggccaaggaaactaggattttcacacttcggaaacataagaaaaaagaagttcgatgaatcgacggactacatttgcccaatggagcccagtgacggtgtcagtgatagtcacagggtctacagtggctaccggggcctcagcccccttgatgcccctgaactggatgggctggaccaggtgggacagattagctgatgcccttgtcacctgccctctgtgcaccctgagagctcacagtaacactgtgtgtgtcaccatataactgcacctcacccccgcacgtgtgcatgactcgcagagaatattccagcaattgtgtacccctgggccagtctctttgaaccctgagggtggccaggatctggagctgcatctctaaggggccaggctttggggaccattgccaaaggtggactcaggaggaaagacacttaaagacacttttacatgtctagtaattcttgatgttcatcttcagcaccagtggaaacacatgaacttcgatgcaggtccagagaccatggacactcccacgaggctcagctctcaggcaccccctacacttcagttgagggaaaagctcaagtgccttaggcccgtggaccacagtcttggctgagatcaaagggatgagcaacagggacttctgccacagtgacaatggaattgtgttgtgccttacttcagaggtggtctcttctttcttgtaataaaagcaatatttatgcggnnnnnnnnnnnnnnggggcggccgttttaaaggatccaagttatacgccgcgggctggcaaggtaatagtttttttatggggcccccaaaattcaatccacgggg

SEQ ID NO: 63587 - DNA, 645 bp, Homo sapiens
ggcacgagctggaagaaatttaacaaagaataggaggatttgtacactaaaaagtacaaaacattgttaatagaaattaagtaagaccaaataaatggaaaaacattaaatgtttttgtatcagacaacttaatattgttaaggtggtaatactacccaaattgatgtgaagaaccaacacaattcctataaaaatcccagctggttttttgcagaatcaataagctgatcctaaaattcacatagaaatgcaagaaatccagaagagccaaaacaatactgaaaaagaacaaagttggaggattcactcttcccaatttcaaattgtatgacaaaactattcaaggttgggtgaggtggctcgtgcctgtaatcccagcactttgggaggccaaggtgagaggatcacttggaaccaggagtttgagaccagcccaggcaacacagtgagactccaactctataaaaaattaaaaattagccagggggccaggtgcaatggctcacacttgtaatcccagcactttgggaggccaaggtgggcagatcacctgaggtcaggatttcaagaccagcctgaccaacatggagaaaacccgtctctactaaaaatccaaaatcagctgggtgtggtggtgcatgcct

SEQ ID NO: 63588 - DNA, 1049 bp, Homo sapiens
ttttttttttttaattagaaaaagtatttatttctgctccgttcatacatcttattgttcaggaaacagttttacatacatatctgaaataatctaccatcacacactctagttaaaggcaaagcaccataggtaaagctgatcaactgtccagagttctcagcttacggaatcttgcttctggattttatgttaatttctgaaaatcagaaatgtcatctccaaaaaatgttaagagggttgtaaaaaataatcactttatttgatattatagttgtagatatggaatatattttaatgaaaaactaaaaagaaaatgccactcaacatcattggtatagcaataggccagcaggaaaaaaaattctgtgataaacttgtctctttaataccaagaagaaattctagtccaagcttcaatacgcttcctgttttttcactagatatttcttttactgctgctcttcattcttttccacatttcatattagaggattggtacagcctttaaaacttcattgacaggagcaaatccagtatccactgatttcttctcaaaggcactctaacccatcagatagcccggcagtttcattctcatgaatactctagccatgaaaaaactcaataggacacagacgaatccaatgaacagaagaaggaatctattgagttttgggatatttggtgcattcgatcggtccaggattatgaaacctaaacctcccattgtaaataggaagctggatgcaagtccttccataatatattgtccatttactctgtaggccaagaaagctactggcctctgatgcccatgttcatcagtcatagaaccgacacttggaggttcaacaataacatcatagattattcctccggtgatgaggaagtaagacaccaccaccagagcatacacagtcatggccgacggcatgtgcaaccagggcggcttcttcagcttcaggttgggacattcgagcactaagaacgggacacggtacaaagtctccatgttggtccccttctgtcgtcttctcgcagccgta

SEQ ID NO: 63589 - DNA, 951 bp, Homo sapiens
atgcgggcggcggcggcggcggggggcgtgcggacggccgcgctggcgctgctgctgggggcgctgcactgggcgccggcgcgctgcgaggagtacgactactatggctggcaggccgagccgctgcacggccgctcctactccaagccgccgcagtgccttgacatccctgccgacctgccgctctgccacacggtgggctacaagcgcatgcggctgcccaacctgctggagcacgagagcctggccgaagtgaagcagcaggcgagcagctggctgccgctgctggccaagcgctgccactcggatacgcaggtcttcctgtgctcgctctttgcgcccgtctgtctcgaccggcccatctacccgtgccgctcgctgtgcgaggccgtgcgcgccggctgcgcgccgctcatggaggcctacggcttcccctggcctgagatgctgcactgccacaagttccccctggacaacgacctctgcatcgccgtgcagttcgggcacctgcccgccaccgcgcctccagtgaccaagatctgcgcccagtgtgagatggagcacagtgctgacggcctcatggagcagatgtgctccagtgactttgtggtcaaaatgcgcatcaaggagatcaagatagagaatggggaccggaagctgattggagcccagaaaaagaagaagctgctcaagccgggccccctgaagcgcaaggacaccaagcggctggtgctgcacatgaagaatggcgcgggctgcccctgcccacagctggacagcctggcgggcagcttcctggtcatgggccgcaaagtggatggacagctgctgctcatggccgtctaccgctgggacaagaagaataaggagatgaagtttgcagtcaaattcatgttctcctacccctgctccctctactaccctttcttctacggggcggcagagccccac

SEQ ID NO: 63590 - DNA, 2260 bp, Homo sapiens
gaggcggaattctagaggagttggagagaaggcgcaaagaagaagaggagaggagacgggcagaagaagaaaagaggagagttgaaagagaacaggagtgccgatggcgggagatggaggagcaccggcaggcagagaggctccagaggcagttgcaacaagaacaagcatatctcctgtctctacagcatgaccataggaggccgcacccgcagcactcgcagcagccgccaccaccgcagcaggaaaggagcaagccaagcttccatgctcccgagcccaaagcccactacgagcctgctgaccgagcgcgagaggttcctgtgagaacaacatctcgctcccctgttctgtcccgtcgagattccccactgcagggcagtgggcagcagaatagccaggcaggacagagaaactccaccagtattgagcccatgtttttgtgggagagagtggagaagctggtgcccagagctggcagtggcagctcctcagggtccagcaactcaggatcccagcccgggtctcaccctgggtctcagagtggctccggggaacgcttcagagtgagatcatcacccaagtctgaaggctctccatctcagcgcctggaaaatgcagtgaaaaaacctgaagataaaaaggaagttttcagacccctcaagcctgctggcgaagtggatctgaccgcactggccaaagagcttcgagcagtggaagatgtacggccacctcacaaagtaacggactactcctcatccagtgaggagtcggggacgacggatgaggaggacgacgatgtggagcaggaaggggctgacgagtccacctcaggaccagaggacaccagagcagcgtcagtccccggtctcttttagagcggatgagagtattctctcagagcctgctttccactgggacctagttgttcctagactattccgtgaccccatgagcacttactatgtagttctcgtggattcagcagcaggtcgccttgtgtttccccttctcttcgttggtgtgtgcatatgtcagtgcttcccccagcaccccagcgtgtactttattttttccttttgatttgaggatatatgatccaggggaaatttcagtttggtataactactttaattagccataattattcattctaagtttttgctcagaaacaaatggcactggaaagaaattctttgttaaagggagaaagctaagcagttgcttttttggaggaggctttatatcggtagcctcatctcatgttttgattttgagaaggcgaaaagcctaaacaggatctccttgactccagagattaaggcctttcacgtctggattttttctccataggtcatctctgaatttgagcaatggtgaaacggaatctgtgaaaaccatgattgtccatgatgatgtagaaagtgagccggccatgaccccatccaaggagggcactctaatcgtccgccaggtacccgtgtcttctctgttgtcagaggctgagcttctcctgtggtcattaacccacttgctcattcactcactcatgctgtttctccatcatcatctgttttcatgttaacaagtcccagagggtcaagtgtcgagtgtcgggggctagggaggcaggtgtgtactgcatgcccagaaggtagcgagtagtctccaccccacatcgctgctcctctgcatgtctgcggcagccctcattcaagcaccgcgctgagtctcacagtctatgtctgagcgggagagaagcccacagggagtccttaaacaggctcacagagtgaggaagccaggtctggagtctggcagagccagccaccatggctctgcagagccacgctgggctctgagtgtctgcagtgccacagtgggagcgggtgaggcaggcaggacgagcctcatcacaggcccagagactcggagagcagaagggttcgggaggtttctcttctatgttccaaaatgttagttttctcacttgttgaataattaaatgtgtgccacccagatatgctcagtttggatcactaagctttataactgtctgttcatttcttagcttagacttaattaaagtgatacgcttctcatttaaatagaacagggcacctatttagtattttggactttgccctaagtgtgtttcatgctatggcaatgcattcggatggaaagtaggaagaatgtggaaaagaccaggattcagagaatccacaggtactttctggagctttgcaaagaaagattt

SEQ ID NO: 63591 - DNA, 2077 bp, Homo sapiens
tttcgtctaacctcggctcttcccagtcctctggactataatggggaacacattgggcctggcaccaatggggactttgccccgccggagcccccgccgagaggaacccctgcccaaccctgggagcttcgatgagctgcaccgtctatgcaaagatgtattcccagcacagatggagggagtgaagctcgttgtcaacaaggttctgagcagccatttccaggtggcgcacactatacacatgagtgccctgggcttgccgggatatcacctccatgcggcctatgcaggggattggcagctcagtcccactgaggtgttccccactgtggtaggggatatggacagcagtggcagcctgaacgcccaggtcttgctcctcttggcagagcggctccgagctaaggctgtcttccagacgcagcaggccaagttcctgacatggcagtttgatggcgagtatcggggagatgactacacagccactctgaccctaggaaatcctgacctgattggggagtcggtgatcatggttgctcacttcctgcagagcctcactcatcggctggtgctgggaggagagctagtttatcaccggcggccaggcgaagagggggccatcttgacactggctgggaagtactcggctgtacactgggtagctacattgaatgtgggatcaggcggggcccatgcaagttactaccacagggcaaatgaacaggttcaggttggagtggagtttgaggcaaacacaaggctacaagacacaacattctcctttggttaccacctgactctgccccaggccaacatggtatttagaggcttggtggatagtaactggtgtgtaggtgctgtgctggagaagaagatgccccctctgcctgtcaccctagcccttggagccttcctcaatcactggcgcaacagattccattgtggcttcagcatcactgtgggctgaggttgtccagagccagcccccacagcagctggaacctctgagtcaggtgccctagggccaaagactaggcccctcttcagagcccaccttgctgggtgatctctaggacccaggagcagagtggtggacaggaccatgccctcctcagaactggagctgccacaggggcagttgatgaggcagaggtttgaggatcccccctctgctaccagccccagtatcaccttccccatgctcttgtggctgtggactaagggagaaggattaaggggtatggctgaattcccccggcaccccttgccctcaggcttccttcttcctttccctttggttaatcctgcatgggattagctgaccatcctgttttccatcccagagcctcccaaggctgggaaagtagggctgaagggctagatgtttggtctcaggaagtggggcccacccattcccagaaggagcttctttacctcttagccctgaggtttcctccttcccatcttctgtgcttccagagaacaactttgttcctatggtcacccccactatccccatgaccgcatgaagaggcagttattgctttagtctttcattgcaaccactgggctccctttgaacccggcccaatctttggtcccagcattttcccactccagtgtatccagggtgttccaggtgagctggggaaggaagtgagcatggcctcagctgcagatctcctggagcagcggcatcatggcagacaggccctggatgtgctggatttggtacccgtaggcctcattaatgctccggagctcagccagcaggcctagcaacttcgcatacagaaacctttggaggaagtagtggggttgccaggaaaacaggagggaaataaggcagttgggagtcttgtctctaggccctgatcccctgaactattcctcagtgaagccaggtctgaacattatagaaaatcatgctctggtatgacagactatcagaggttccaaaggtcctccagggggcctcggtctgacactgtcttctctcaccatgctcagttttttctgaacccagagctctgagagccgagtgtgaagaaagctccagacttggccagaacctcac

SEQ ID NO: 63592 - DNA, 2398 bp, Homo sapiens
ggcacgaggctaatgatcctgattatctgaaacgtcaagttggtttctgtgcccagtggagcttagacaatctctttttaaaagaaggtagacagctgacctatgagaaagtgaacttgagtagcattagggccatgctgaatagcaatgatgtcagcgagtacctgaagatctcacctcatggcttagaggctcgctgtgatgcctcctcttttgaaagtgtgcgttgcaccttttgtgtggatgccggggtatggtactatgaagtaacagtggtcacttctggcgtcatgcagattggctgggccactcgagacagcaaattcctcaatcatgaaggctacggcattggggatgatgaatattcctgtgcgtatgatggctgccggcagctgatttggtacaatgccagaagtaagcctcacgtacacccatgctggaaagaaggagatacagtaggatttctgttagacttgaatgaaaagcaaatgatcttctttttaaatggcaaccagctgcctcctgaaaagcaagtcttttcatctactgtatctggattttttgctgcagctagtttcatgtcatatcaacaatgtgagttcaattttggagcaaaaccattcaaatacccaccatctatgaaatttagcacttttaatgactacgccttcctaacagctgaagaaaaaatcattttgccaaggcacaggcgtcttgctctgttgaagcaagtcagtatccgagaaaactgctgttccctttgttgtgatgaggtagcagacacacaattgaagccatgtggacacagtgacctgtgcatggattgtgccttgcagctggagacctgcccattgtgtcgtaaagaaatagtatctagaatcagacagatttctcatatttcatgacacatgtgaagaggcatcgtggacttttttctactcaattccagccaatgttgaaaagaaaaagaaaaaaaaaactctctaatcagttgtacacacattgaaacttatagccatggccagattttatgctaaaaatggtagtttgtcaaagacaaaattctcttagaatctaatccaacttgccagccctgagaaaatcccttttaaggccaaggaaagctgaatgctagcagccaggcctgtggtacttccatgagaaaccatagcagacaatgccctcccaagtactgaaatcacactggaatcccccttgttgggttcatttgattgtttaacacaggatgtgttgtgtcattctgaagtttttatttggggcagaagtctttatggagatgtaaatgacagcgtttctgggttatgcataacttctcactggtcagagacaccggtgtgtcaagcatggatattgcattgcaagacttgaatctataaaaattagaatcacacagtcagtactacaagcaaaacagagaacctgaaagaaggtgcacagactgtaagaaaaaacccaagtttgtgatatttcagtgattccaaagaacattctaggttttttgtttgtttttttgttttttgggttttttttttttactgcaaaaaatggggggtattttcacattcatagtgtttctatccaatttcagtacccacatttaatgaggaaaaaatgttttaccaatgaaggaggaattcttaaattagctgtaatgttaggttggagaaaatttggtatttagggtattttcaaggtaccatcaaatcagatttctgtttttttgttaaaaaaaatttttttaatcagtattgtttttacaagtaatatactttgaaactcttgaactaatagtctcaaaaactctagaggacagtctgagaacacgtatttctattgttctaaataaatacatgtttttgaatagttcaatcatgaattattgactatgtcttcatcaaaagtgttaatccctctcagggtctctggtgaagaccttcaagagtttggttttttctcccaggaaattggaaggtagaattgtaaattcatagaacttcttttataatggtgtacctcagcagctgcctttcaatttatgccaagtccttacagagtttatacttgaatagtaaatatgtcttctgagttttacagtgtcttaaactcaatgcacatttttttttcttctttttccaccccttcttgtttgtagttcattatacctgtcctattacagaactgatttccttcctggctgtacatgttggggtgctggatttttttccgtgtctttagtcttccataaatccacacacacacacacacacaaaaaatatatatatatataaatatatatgtaggatacatgttctcttctttagcttgtggtgaatacagtaatttgcattgaagaataaaacatctgttgccttttttg

SEQ ID NO: 63593 - DNA, 1246 bp, Homo sapiens
  misc_feature (1)...(1246): n = a,t,c or g
ggcacgagcaaaaggatgacatccaaggaaagataactgaatcaatgtgaagtctgtgagtccctccagttgtcttcctcctcatcaggactaaaactggacttaagaggcagcgatccactaagcactgcttctgttcagaaataagaaggaaggaattcatacagagaactcgtattaagccagtagtttgtgtctacttgtgatcctcttgtggtatgtgataccatatagaaatagtaaagaaatggctatatctttgcttttatgattagaagtagcacattaaatgatgtggtctgtctgttgccactcactcagctccatctgatccactggaactccactctgtttggcagcattgatgaggctgtggggaagccgcacggaatcgccatcattgctctgtttgttcaggtaaacggtctgctgtgattatcgcattgtttagagatgctaatttctaaatcattttgtaaaatttttttattctcaattttattgcttagagatgaaattacacacatagagagaacacctgataaaaacagaaaacttgatccttatggtttatcggagttcagacatattcattggtagaaaatagttcctttatttattagaaattttcttcagagtagcattcagggtctttggagaaatgatttagaaaatgactcctgaaggtagagtttattttatgaaaaaggatttcagaaaatgtctttagaccctggtttacagaaaaatctacaaaaaaaatcaataacaataatagaagtatgtagtagattactttagcccttctttattaacaattttcactctgagatgacttgaaatgccttataggaaacactgataaaaatcagactggcaaagaccttggcagatatagtcaatataacatttggatttgagctctgtggtaggcaaagaagagtatataaatttacccaaacatatgaaagcaggccacgtgctttcagaggtaaaaacttaactccagtttttaaggcgaacttctaaattttgtcttattacctgtttgacatcgtaaaagatttagaggtgaaagagtatccgggaaattttagccttaaagctgcccatcaggaccaggaacccagagttgcagctccgnggtggctccgggctgcccattgggatacccggggattagagcctgttagcncagtggtcctccagaaccttaatttccccaagagagtccgataatgggccc

SEQ ID NO: 63594 - DNA, 1214 bp, Homo sapiens
ttttttttttttgacagtaagagcaggtttactgttggcaacagcacagccctgtggcacccaagggtagcgggtggggtggcggccgggtctcctggggccccgttctccctcccattctctaggtccctggaggccagacccctgggtgcggcccatcctagcagtggttctggctgggtctgtcctgggcaggagaggagggtccctggagaggcagtgatggctacagcgtctgtagggagctggggacacttccggccagccatgacaggcccaagcctgctcagctctgcacttctggggatccccttattcctgactctcccccctcccccacctggaagagacctaggccctgcaccctaatgaggaggaccggggtgagggggtgcagagtgtcctgggggggctccgagcgcttggcaggggactcagcaaggggagcgtagggcgggcctcacgtctgcagctccaggaggcagttgggctctgagggtggggagccggccgggctggagctatgggcctcgcggaggtcctgcagcacccggagcagccgggccaatgagtcctcggggactttgccagggctcgtgggcaccgtgcctgcctctgcgcccccgctcagctcccggtgcctctcccacagcatggcctccacgcccagcaggtgccggtagatgagctgggcctcaaggtcatggtcaagagggtcattccactcctgcagggtcacccgtgaccgggtcttatcgcagccctgacctgtcttctctttttggtggcagcagctccacttgtccccacggaagacgccagggtggtaggagcccagcagtccggtgttgttgatgctcaccttccgcagcgcagacagccactggttaagctcattcacacacttggagctgggcgtcttcgcgaagctgagggcctcggtagtgagggagaagtagagcttcttgaaggaggaggacatgagggggcccttgcccttggtcctgtggatgaagagtggcccctccttcacaggtggcgcctgcaaactcagcgtccgctgcaggtccagctctgccaggccagggagggaggggaatagagagcccagtgaatgagggcgggactggggggagcggagcagtgggaggggccatggggctcaagggctgagcaaatctgaacagcaggcagtggacgtagtcactcgtgcc

SEQ ID NO: 63595 - DNA, 345 bp, Homo sapiens
  misc_feature (1)...(345): n = a,t,c or g
ggcacgagcccgcaagcagatcgtagctggggtgaactacttcttggacgtggagctgagccgaaccacgcgtaccaagacccaacccaacttggacaactgccccttgcatgaccagccacatctgaaagggaaagcattctgctctttccagagctagcctgacaacccggcattcaagtaacacattcccaattaacaccggtgctcaaatcatcggcaatcccatgccaacaggactcggctccgcatctaagccattcaggggtggacctccgcgacgattctgacgatgagctctctgccatggttgtaagataatcgaccgcaatgtcctgtcaactn

SEQ ID NO: 63596 - DNA, 1945 bp, Homo sapiens
ttttttttttttaaatatttaagagctcaaaggtatacaggcagaaagtggaaaatctcactactactttttattctaagctcacggtgtttcagatatctatttcacaaccaagaccatgaaacccatcatagtatttgtgactactatgaaaactatgacatgtcagtcagccttgctgcctgctgtgtgctgtatataagtccattacatattccttataggctgggattgaaaacctgaaaatgaaatgaagtccctagagaaacttggccatgctgggtgctttttaccaagtttggcmathaaaaaaaaaaaaaatcagtgttcaaaggagacatacaaaagtccatttaatgtaggcagaggatgtttaggggggttacaatttctatcccctgggggaaaacccaatacttggtagaaggataaagaaaaagccacgtgaaataatactgaatagcaccagaatagccttacactaaagctcgcatgcgcacagggctgggaggatggcttcctcttgccaggccctttaggtcatttcagcaattgttctgttaaacatagcattaatgttatcaagacacagcaagcagcagaaagcttgtggagtcacatttcatagtgtctcatctccaaatcagataaaagtggtatacagggttccatccagaaagcattcagtcagagcaagttaaagtcagtactttctaacatacttttaagatacttatgctgaattagcccaagggagaaaaattaatgtgcttgatgtatttactaagacttgcatctcaagtcttcaataatgcctatttttgaaagaaacctaggcaacgaattgaagagacttggaaatgtgccaattccctaaatgtttttctccctgtgggataattttttttaaagggacaatatatttgaggagaagagattattcctggtgcacctacctaaccactgtacaaaagacttcaccatagacattatactcttgatatcccaaacataggagtacatgtcataaagaattgtcctgttggcacaattggagagccgagtgaacattcccatcactagtccacacatctcttcaaacttggctgctcgtgaccgccattcttcaattttttcagagtcttttcctttgcaattgacactgacaacactactatttgctcgaagccattgaaattcccgtaacatctgtgctcctttgggtccatgctcgtaaggaaggtagaatagatcagcaagtaactgcaaatcctccagggtcactggttccgcagtgtacaaaggcttttcatttggacctggcacaaactgctccttgtttgtctgttcatcagtttgcatgggggcaatgtcactaatacaatcttcttgcatggacatctctggggattttgattcagctatgctctctttatcagtgtccattggtttcaattcctctgccattttcgcttcaacaatttcactcagtatttgattgtcattcttgtggtccgtttcttcttgtttttccaccaccatgtccatgggttcttcatcaggctgtttcttttcttcttccttggtcagagtagtaggctcaccactcaaggctgctccctggctcataatgggctcctgataaactgttgttactacggttgtggcatttaaagagggtgctgcaactaaaggagtcccatcaactacacttgctttagctccactgtgtgcaacttgcctacctacaaaaataaataaatgtataaataaaatggtcacacagataatcagaattagagatagaacacattagattcagaaagatgctttatcatatttgttaagtggaacctcaattttagatccaaattaatttgacctctaagaaaaatgagatttctctatactactagggatgcaggaatggaagggcgttgggagg

SEQ ID NO: 63597 - DNA, 2298 bp, Homo sapiens
tcatcacgcctagcttggcacgaggcaatagacgcccagatagtaaggaggctgaggcaagacaatttattgaacccacgaggcggaggttgcagtgagctgagattgtgccactgcagtccagcctgggcaacagagtgagactctgtctcaaaaaaagaaaaaaagagctaaatgtttttaaatttccagagctaaatattttgtaaagaccatttacaaaaggccttcattttatagtggtacccaggtcacccctttccatccataacctgaggaacaggaaattaggacccctgtgaaggtggctgagggcaaggagagagggttcctcctctgtggcctgcatttgagtgctccttcttcccagtagcaagaatttcgactgggagtgcgactctactcagaggaacagccacaggaagctgtgccccacctagaggcggcgctgcaagaatactttgtggcctatgaggagtgccgtgccctctgcgaagggccctatgactacgatggctacaactaccttgagtacaacgctgacctcttccaggccatcacagatcattacatccaggtcctcaactgtaagcagaactgtgtcacggagcttgcttcccacccaagtcgagagaagccctttgaagacttcctcccatcgcattataattatctgcagtttgcctactataacattgggaattatacacaggctgttgaatgtgccaagacctatcttctcttcttccccaatgacgaggtgatgaaccaaaatttggcctattatgcagctatgcttggagaagaacacaccagatccatcggcccccgtgagagtgccaaggagtaccgacagcgaagcctactggaaaaagaactgcttttcttcgcttatgatgtttttggaattccctttgtggatccggattcatggactccagaagaagtgattcccaagagattgcaagagaaacagaagtcagaacgggaaacagccgtacgcatctcccaggagattgggaaccttatgaaggaaatcgagacccttgtggaagagaagaccaaggagtcactggatgtgagcagactgacccgggaaggtggccccctgctgtatgaaggcatcagtctcaccatgaactccaaactcctgaatggttcccagcgggtggtgatggacggcgtaatctctgaccacgagtgtcaggagctgcagagactgaccaatgtggcagcaacctcaggagatggctaccggggtcagacctccccacatactcccaatgaaaagttctatggtgtcactgtcttcaaagccctcaagctggggcaagaaggcaaagttcctctgcagagtgcccacctgtactacaacgtgacggagaaggtgcggcgcatcatggagtcctacttccgcctggatacgcccctctacttttcctactctcatctggtgtgccgcactgccatcgaagaggtccaggcagagaggaaggatgatagtcatccagtccacgtggacaactgcatcctgaatgccgagaccctcgtgtgtgtcaaagagcccccagcctacaccttccgcgactacagcgccatcctttacctaaatggggacttcgatggcggaaacttttatttcactgaactggatgccaagaccgtgacggcagaggtgcagcctcagtgtggaagagccgtgggattctcttcaggcactgaaaacccacatggagtgaaggctgtcaccagggggcagcgctgtgccatcgccctgtggttcaccctggaccctcgacacagcgagcgggacagggtgcaggcagatgacctggtgaagatgctcttcagcccagaagagatggacctctcccaggagcagcccctggatgcccagcagggcccccccgaacctgcacaagagtctctctcaggcagtgaatcgaagcccaaggatgagctatgacagcgtccaggtcagacggatgggtgactagacccatggagaggaactcttctgcactctgagctggccagcccctcggggctgcagagcagtgagcctacatctgccactcagccgaggggaccctgctcacagccttctacatggtgctactgctcttggagtggacatgaccagacaccgcaccccctggatctggctgagggctcaggacacaggcccagccacccccaggggcctccacaggccgctgcataacagcgatacagtacttaagtgtctgtgtagacaaccaaagaataaatgattcatggttttttttaaaaaaaaaa

SEQ ID NO: 63598 - DNA, 1006 bp, Homo sapiens
gtcgacttttcagaatgtgaagattttactcttggcttaatttttccctccactcagtgctaagctgagcctccagatgctgttacctcagatttaatcactggttgaaactccgtataatctgtagagcctccatggctctaaaatttggaattaacttctctttctttaaaatgaagcttttatacatagctatccacatatgtacaagcagctcttaaggcaagagaagttaattccaaattttagagccatggaggctctacagattatacggagtttcaaccagtgattaaatctgaggtaacagcatctggaggctcagccttagcactgagtggagggaaaaattaagccaagagtaaaatcttcacattctgaaaataatagtggcaaaacataacactcctggactgcgggaaataaaattgagagggacatgattagaagtaaacttctagaattctactaattccaggttcttcaaattggtacaactggtgacaatcccagagtcaccagtcatcacatcaaagtttgatagagaaagatgacccacaggagcagccttgctgtgcttgaggattgttcaacacttgaaatgagcttcggatcagttcttggctgaagtccacctgggcccctttcacgaaggccaagctatcagagtcaaccaccactcttgccccaccctgttcaaataccctgtcgtcggggttgataactgtatccagtgaaaatttgtattggaatccggagcatccacctccctccacttgcagcctgaggaattctgacccttcggtgatttccaaaagcctctggacgcaactgtctgtgaggcggatctgcccttcgccggcctcggggctggaggacgacgcctcccgacgcgcctggggtcccagggaggccgtgaggagcctgcccctcggccagggagtgaccgctctctgcgtcgcggccgttagggacgacccccaggcggcagccatcttctcgtgcc

SEQ ID NO: 63599 - DNA, 990 bp, Homo sapiens
catgtgtatctgctgtctcttagcccagacttcccgtgtcctttccactgggcctttgggaggtcacagggtcttgatgctgtggtcttgatctgcaggtgtctgacttccagcaactgctggcctgtgccagggtggaagctgagcactggagtggagttttcctgtggagaggagccatgcctagagtgggatgggccattgttcatattctggcccctgttgtctgcatgtaacctaataccacgaccaggcatgggggaaagattggaggaaagttgagtgagaggatcaacttctctgacaacctaggccagtgtgtggtgatgccaggcatgcccttccccagcatcaggtctccagagctgcagaagacgacggccgacttggatcacactcttgtgagtgtccccagtgttgcggaggtgagaggagagtagacagtgagtgggagtggcgtcgcccctagggctctactggaccagcgtctcctgtctcctggagaggcttcgatgcccctccacaccctcttgatcttccctgtgatgtcatctggagccctgctgcttgcggtggcctataaagcctcctggtctggctccaaggcctggcagagtctttcccagggaaagctacaagcagcaaacagtccgcatgggtcatccccttcactcccagctcagagcccaggccaggggcccccaagaaaggctctggctggagaacctctgcatgaaggctgtcaaccagtccataggcaagcctggctgcctccagctgggtggacagacgggctggagaaggggagaagaggaaaggaagttgcctgccatgtctcctacctgaggctgaggaaggagaaggagatgcactgttggagagacagctgtaactcaaagccttagcctctgttcccacgaaggcagggccatcaggcaccaaagagattctgccagcatagtgctcctggaccagtgatacacaccggcc

SEQ ID NO: 63600 - DNA, 972 bp, Homo sapiens
ttttttttttgatgttttagaactttaattatgaaaaagggataaacaattcaagatgggggaaccagccccaaactgggctggggcagagagagaccagtccccagccatacaatagcagcaaggggaagaccccaccccacagatgctctgccccagcccttcccagagaccttaaataatttaaatagcagggatggcggagggcaggttgcctttggtgtctgcccaatgctaagatgaggggcagcgccggcccagcctcagcctcgggcagggctctggggctgctgcagggctgggaggtatttgagggcagcagccccatggtggcgggacaagtcctggtggaattcgtccttgagggcctggaggcagtcacgataggtggggctggagcggaagcgggagatgtccaggcttggagcgtggggcagatggatggtgaaggcctcgggcagcaccaggagctcatattcctgggcatccagctccacaatgtgggccactttgttccagccgaagcccacaaagcgaggatcatagcggggacagtctcgtggcaccaccacgtagggttcatagttggccgcccattgcacacggtacggggcctgagcctcccgccagcgggcatagtctgtgggtgcgtggcctcggggccactcgtggtacctgaaggtgtagagagtgcccgcatccagcaaggccaacagctccaccttggaatgggggaagctgaagcggtagcgcagggtctcaaatgccggcaccaccagtgctgccttgcgccggctgcccagccccagctgctcaatggaggccctgaggtagtcgtagagagaataggcaggcaggaagtcaatgtcactgaggaagacgtaaggcgtgagggcctgggccaaggccacgttgcgaagctggttgacggggtatagggggctggctggggcacacaaagagcctcgtgcc

SEQ ID NO: 63601 - DNA, 2671 bp, Homo sapiens
cccacgcgtccgctttgactccagtcgtgtgtatgctgtctgcaattgccttttcaaatgtttttgagcactatttgggggatgacatgaaaagggaaaatccacctgtggaggacagcagtgatgaggatgacaaaagaaaccaaggaaatttgtatgataaggcaggtaaagtgaggaaacatgcaactgaacaggaaaaaactgaagagggattaggccctaatataaaaagcattgtcaccatgttgatgctgatgctattgatgatgtttgctgtccactgtacctgggtcacaagcaatgcctactctagtccaagtgtagtcctggcctcatacaatcatgatggcaccaggaatatcttagatgattttagagaagcttacttttggctaaggcaaaatacagatgaacatgcacgagtaatgtcttggtgggattatggctatcagatagctggaatggctaatagaactacgttggtggataataacacctggaataacagccacatagcactggtgggaaaagctatgtcttctaatgaaacagcagcctataaaatcatgaggactctagatgtagattatgttttggttatttttggaggggttattggctattctggtgatgatatcaacaaatttctctggatggttaggatagctgaaggagaacatcccaaagacattcgggaaagtgactattttaccccacagggagaattccgtgtagacaaagcaggatcccctactttgttgaattgccttatgtataaaatgtcatactacagatttggagaaatgcagctggattttcgtacacccccaggttttgaccgaacacgtaatgctgagattggaaataaggacattaaattcaaacatttggaagaagcctttacatcagaacactggcttgttaggatatataaagtaaaagcacctgataacagggagacattagatcacaaacctcgagtcaccaacattttcccaaaacagaagtatttgtcaaagaagactaccaaaaggaagcgtggctacattaaaaataagctggtttttaagaaaggcaagaaaatatctaagaagactgtttaaatgcactgttctggttcctaacttgaagcagttgtccttgtgagaaccggtctttgcctttagctcatgtcgtgtttcacagcaaagagggtacagaaccatcactggtccaggttaatgtacaaaattttctggcaatgcctgattaaaaaaataaaattggcttgttgagaacagctgttttcgatttctaatgtgaagcaagacagagcactgctgtaaatgtctagcagcagattttttttttattggtacatattatccttcaaatctgagaatttggactaactgcaccaaagaaccctctaatttggtccctggcacatgcatacttgtcaatgtttttattcttttacaagacctgcattttatttgaattacccgaatagcaatatgtaaaatacaagtgacaaaatgtgatgagagcttcttgaaccggtaaactagtacaggtctgagaaagacatattagaagaatcattatacttccttgaattatatttattttcatgtttctctaatgcaaagaatgtttcatcaaatgtatattttctgttgcttactgtttgctctgagaagaagctgctgtttcaaagatggacctctgagtagctaattgattcaagtagtttttttatgttgacacattattactgctgttagcagtcgttttcaccaggtacttacagagcagatttcatacatcattcattcaagggctaaatttatattttttggaaatcatggcaactacacaggatgttgcttaccaggacggagttttggtatcttagtactgaagttagcactatgtttacatgcaaaagattaaggaaaaaacccttaaagtggacaggtatccaaagttcattttctgtgactcatcaaagtgacaaaagacttgtaacaactttgcctggacttttttcattttacaacagttcatccattcacaatgattttgttctctgctccatattttttaatcccttaagcatttgatgaaacactctttagtgctatatgcattttcttacttttgttaaaaatgtgacaattgtcaaaaaatgcactaaaatgtaaatggagattgaacaagttcactttccagcttataggcaactttatacagacttgaacattttctccagttgtttagtaaaagtgaaagagaaagggtttttcctgccacaggatataacttttttttatataacaagcataacacaccactgcttttggtggaaaagtgcagaatagtatgtaccttttatgaagaaaaatgtaatttacaatattcagtgagaatgttactgctgattttcttttccaaggtgtagaatattctttgatttatagaattcatttttgacccagatgatggttcctttacagaacaataaaatggctgaacattttcacaaatagagtgtaacgaagtctggatttctgataccttgtcatttgggggattttattttactttgttgctttaaaattcaatgcagagaagttgttgactgtaggggaaataaagttaattcaaattttgtgtcaaaaaaaaa

SEQ ID NO: 63602 - DNA, 391 bp, Homo sapiens
ggcacgagagcacatcatcagtaacatcactgtccccccattgcaagcagcaaccgtgactgtaccttcctttcccctgcatggatgtggggtctcattcattcattattcccttcctaaatcatgcagggtttgggcagggtggcctgcggggagcagagagaaggcgtccattgcccattgcactagctagagacacacccatctgccttcttccatttacctttctgcctggggtttcctttcagattccccacctgaaaaggggacacattgaggactgtgggcactggacacagatggacaagtaaggaggttgggggctcctggggtcggggagagcagggccccccgttcaccttccataaaagctttcctggtttcattgtgc

SEQ ID NO: 63603 - DNA, 1054 bp, Homo sapiens
tttttttttttgactggatatcatctttaattaataatgccacagcccaatgtcttttttgttgctgtagcaaattgtgattgtgtgtgcgtgtgtgagtgtgtgtgtgtgtgtgttcctgaacagatgaagggccagcagagactcccaagcaggtctcagccaacaactctgttgagcagcaactggaagatagtctccatagaggcacagaggccagacttctgcctcctatgggcattgatcctttctcctgggccacctttcgtgcattgagggcaaggctgaggcctgtaccagcccagattaaaggacttctaagcacaggtcagcctccagttcccagtactcactggcctctgaccagagggatgccctgggtagagtatagacttccaggcagaggtggataacctgcgctggccttggtcccatgtcatactggggcagcaccacaatggcccagccctggcagaaaatccagagctactggagccacttgattgattactttcagagataatcaggatgtagcaaaggccttttttggggccagctggagaaggccagactcagcttgtgggggccacaggaagttgtctccaacccaaacttaaaagcctgccctcttgccatctccattctccaattcctcaaatgcccagtaggtccacagcccaggcatggcagcatagtgtcagcgtgacagtgggttggaagataaccatgagagacctgggctgaactggacctgcggccatatgtcagcctgaaaccagccctttcccccatggtcaatgccagccagagctctctgaagccggatgggaccccccacaggcaaggcagcaagttcttggcctagtgcagagggagaaaaccaaactggctccactgtcccatctccatctgctctgtgccttatgaaggcaagaagcccaagtccccaggacggcggtatcagctgttggggaagcaccgttgtccaggtgaggcctcgggccggaagctgtgtttgttcagggggcttgggtagtaagtagtcgctcgtgcc

SEQ ID NO: 63604 - DNA, 1532 bp, Homo sapiens
tttttttttaacttggcaaagaggcttttactggaagttcaggaaatacaaatgcaaaggcaaatggccaagccagcagtacgtagttggtgctaatggacgaagccataaggtagccatgatgtggcaggggagggagggaggctgaggctggtgggctggaagctgcctgtgacctcctcccggccccactgtgtccctgtccccccaggtgctgcggctgctcatcacggcctgggagagaagactcatcttcactatcggcacgtccaacaccacgggcgagtcggacaccgtggtgtggaacgagatccaccacaagaccgagtttggatccaacctcacgggccacggctacccggacgctagctacctagacaacgtgctggctgagctcacagcccagggcgtatccgaggctgcagccaaggcttgaggcccaaggctgcccaccttccctcctgctttgcccctggtccggcaaatgcctccttcgccaggtgtgtcctggtagcccaggttcagggctggggaggagcctgcggaaggggccgcagccattcaggggacctgcctggtggcagctgggatgaagagagatggcatgtcaggctggccccgaatcatagctccctgagagggccaagcagagagtactggaaacctccctaccaaaaagacagagacccgccccctcacacacaaacacacatgtcctgttgaactcatgcacgcacacccacgtgcctgtacttgcccccaggctggaagagaagagacagaaagaccccatgacccccccatgtggatccccatctgtgtctcagttgcatctgtacagccttgtctgcaaactggaggatgcggggcaagcccttaggggcctgccagggctcggggggcaaagagggactcgggaaactcagtgtaccccagatgcctcacccattccgtgtcatcacccatgtctgccacccactgattgggcaattgtgggcccatggggtggaagcccccagatgactgagcagttctacaaaaaatggccagcacgagcggggactagagggtcctgattttgtgtctgtgcctcttcatctctctggactctgatctccttctcccttcccatctccaggccttctgtctgtcccagataaaggcgctgttctcccatcctccctaccccatcctctccaccaaatcgctcccaattttgagagccaaaggctggcgcttctgacttcaggagcgaaaggaggaggcctagtttgggccgatgtattttaaagcagagtggacagcagagagtcaatttccctttcgttgggagtgggcagtggggtggctaattgtcttcggccaacccaggggcctgttgcccaggcaactcaccagctccgcctctgctgattggctgccacggtgggagtcagccaagatttaaagggatgccagcgattgctcttttcaaaacctaccagtcccactgtgggtggagaaataaatggtctttctcctcaaaaaaaaaa

SEQ ID NO: 63605 - DNA, 3109 bp, Homo sapiens
ggtggtggaattcggtactccgagcactatgtcgtccccggcgtcgaccccgagccgccgcggcagccggcgtggaagggccacccccgcccagacgcctcggagtgaggatgccaggtcatctccctctcagagacgtagaggcgaggattccacctccacgggggagttgcagccgatgccaacctcgcctggagtggacctgcagagccctgctgcgcaggacgtgctgttttccagccctccccaaatgcattcttcagctatccctcttgactttgatgttagttcaccactgacatacggcactcccagctctcgggtagagggaaccccaagaagtggtgttaggggcacacctgtgagacagaggcctgacctgggctctgcacagaagggcctgcaagtggatctgcagtctgacggggcagcagcagaagatatagtggcaagtgagcagtctctaggccaaaaacttgtgatctggggaacagatgtaaatgtggcagcatgcaaagaaaactttcagagatttcttcagcgttttattgaccctctggctaaagaagaagaaaatgttggcatagatattactgaacctctatacatgcaacgacttggggagattaatgttattggtgagccatttttaaatgtgaactgtgaacacatcaaatcatttgacaaaaatttgtacagacaactcatctcttacccacaggaagttattccaacttttgacatggctgtcaatgaaatcttctttgaccgttaccctgactcaatcttagaacatcagattcaagtaagaccattcaacgcattgaagactaagaatatgagaaacctgaatccagaagacattgaccagctcatcaccatcagcggcatggtgatcaggacatcccagctgattcccgagatgcaggaggccttcttccagtgccaagtgtgtgcccacacgacccgggtggagatggaccgcggccgcattgcagagcccagtgtgtgcgggcgctgccacaccacccacagcatggcactcatccacaaccgctccctcttctctgacaagcagatgatcaagcttcaggagtctccggaagacatgcctgcagggcagacaccacacacagttatcctgtttgctcacaatgatctcgttgacaaggtccagcctggggacagagtgaatgttacaggcatctatcgagctgtgcctattcgagtcaatccaagagtgagtaatgtgaagtctgtctacaaaacccacattgatgtcattcattatcggaaaacggatgcaaaacgtctgcatggccttgatgaagaagcagaacagaaacttttttcagagaaacgtgtggaattgcttaaggaactttccaggaaaccagacatttatgagaggcttgcttcagccttggctccaagcatttatgaacatgaagatataaagaagggaattttgcttcagctctttggcgggacaaggaaggattttagtcacactggaaggggcaaatttcgggctgagatcaacatcttgctgtgtggcgaccctggtaccagcaagtcccagctgctgcagtacgtgtacaacctcgtccccaggggccagtacacgtctgggaagggctccagtgcagttggcctcactgcgtacgtaatgaaagaccctgagacaaggcagctggtcctgcagacaggtgctcttgtcctgagtgacaacggcatctgctgtatcgatgagttcgacaagatgaatgaaagtacaagatcggtattgcatgaagtcatggaacagcagactctgtccattgcaaaggctgggatcatctgtcagctcaatgcgcgcacctctgtcctggcagcagcaaatcccattgagtctcagtggaatcctaaaaaaacaaccattgaaaacatccagctgcctcatactttattatcaaggtttgatttgatcttcctcatgctggaccctcaggacgaagcctatgacaggcgtctggctcaccacctggtcgcactgtactaccagagcgaggagcaggcagaggaggagctcctggacatggcggtgctaaaggactacattgcctacgcgcacagcaccatcatgccgcggctaagtgaggaagccagccaggctctcatcgaggcttatgtagacatgaggaagattggcagtagccggggaatggtttctgcataccctcgacagctagagtcattaatccgcttagcagaagcccatgctaaagtaagattgtctaacaaagttgaagccattgatgtggaagaggccaaacgcctccatcgggaagctctgaagcagtctgcaactgatccccggactggcatcgtggacatatctattcttactacggggatgagtgccacctctcgtaaacggaaagaagaattagctgaagcattgaaaaagcttattttatctaagggcaaaacaccagctctaaaataccagcaactttttgaagatattcggggacaatctgacatagcaattactaaagatatgtttgaagaagcactgcgtgccctggcagatgatgatttcctgacagtgactgggaagaccgtgcgcttgctctgaagccttgtgagcaaggaaggctccctgcatgtcctgcttgctgcacgccacatgggtgtggtctgcatctcagttggccgccatcagtgtaaatagagcttaaagtcatggtttggctgcataaaaattttctaacttgggttcaatatttgtagtgaagtatctgttttcatttttttcacgttataaataaaaatactatgctggccgggcgcggtggctcacacctgtaatcccagcactttgggaggccaatgtgggtggatcatgaggtcaggagttcaagaccagcctagccaagatggtgaaaccccgtctctagtaaagataacaaaaaattagctgggcttgatggcatgcgcctgtaatcccagctactcgggaggttgaggcaggagaatcgcttaaacccaggcggcagaggttgcagtgagccaagatcgcgccactgcactccagcctcagcaatagagtgagactgtctcaaaa

SEQ ID NO: 63606 - DNA, 783 bp, Homo sapiens
gaaaaaaatgatgtttctgagaataatcggaaaagggaagaaataccactggattttaaaaccatagacgatcacaaaaccaaggaaaacaaacagtcacttaaagaaaggagaaacaccagagacgaaacggatacttgggcatacattgctgcagaaggtgatcaggaggttttagacagcgtgtgccaagcagatgagaattcagatggcaggcagcagattctgagtttgggcatggacctgcagttggaatggatgaagttggaagatttccaaaagcaccttgatgggaaagatgagaattttgctgcaacagatgcaattccaagtaatgtgttaagggatgctgtgaaaaatggggattatattactgtaaaagttgcacttaattcaaatgaagaatataacctggaccaagaggattccagtggaatgacactggtgatgcttgccgccgccggagggcaggacgacctcctgcgactcctcatcacaaaaggcgcgaaagtgaacggtcggcagaagaacgggaccaccgccctcattcatgctgcagagaagaactttttaacaacagtggctattcttttggaagcaggagcttttgtaaatgtccagcaaagcaatggtgagactgcactgatgaaggcctgtaaaagaggaaattcagacatcgtacgactcgtaattgaatgtggagctgactgcaatattttgtcaaagcaccagaatagtgccctgcactttgcgaagcagtctaacaatgtgcttgtgtacgac

SEQ ID NO: 63607 - DNA, 349 bp, Homo sapiens
ggcacgaggccttctggagaagagcagagatacacatgccatgtacagcatgaggggctgccgaagccggtcaccctgagatgggagccgtcttcccagtccaccgtccccatcgtgggcattgttgctggcctcgctgtcctcgcccttctcttcctggaaccccgtccgtcgttgacttcgtggctggagatgttccctaggccgatatcaccgctaatggctgaatggtgtagtttacgcccctgaactccctcttgccttgactaaaaattctggagctatcattgtcattttcagacgtatgctacgcccagctctgcttttgcaccttattccttggtggtag

SEQ ID NO: 63608 - DNA, 3076 bp, Homo sapiens
tttttttttggggttatacggaccatttaatgctttttccactcacatggtttcaactttgggcttatttgccaaaatctaggatggaaaagtccagttatgaacatgttcctcccggctggattttgatcttgaagacactaaacccaatttcagagcatatttaatcctgggctattgctgaggccgacttagaagagacaaagtgagatgcgaaagaggagaatttttatgatagtttgtacgttacaaatacccaagaaactattttctttacaccattattgccatgactttttgtggacagtttcacataactgtaaagtccaggctgctcgggtctgacccctacagacctgccatgttgaagcccagctttttcgctcccgcacaggtaagaagctgctgatcttctgcagacccgccatgttggggcccagctccccacgccaagtcagaagctgctcatcttctgcaacagggtttggcgccgttcttcagggccgatgccctcagcaatggactttaagaagcactgctcgtgtgccctctggagcaaggagctgacagaagggttggtcttgctcaaagtctcatagcaggtgagggtttccaaggctaaaacgtagagtggctcacagacctccgggtggagcatggccatgatgtgcagagcatggcagaacacctgggtgtaaacaaacagggcttcctgggtcaggtcctgctctggtccttgaacccaagggccagctgcctgtatcgccctgactgagtccaggaggcgggtcagactgccacagaggagtttgaccacgtggttccagccttccagaggaagccaattacgacagctatggctgcagagaaactggaaagtcctcaggaagaggacggagagttgcaactcctgggcaaagggcttcaggttgagcaggggaacaaactgaatatattccaggctataagggacatggaggagctgcttctccagcagtctcctggtcagctggtgaaggcgctgccactcctgagggctgcaccaaggcatgacttgcaccagggccaccagaaagcctttgctgaacagtctgacctcctcaggattgcccacgtccaccaccaagagagacagcatcctctccgagatgccgctggagacgcagcagcactccatccaggccaggagccccgtgccagccccgtaccctgggtgggcctgggaggtccactcgtcttctgaaagcttacagatctcaaaaagtgtggctggcacttcacacttgaagtgcccctcgaagaagctcttcagcctcaggcccacagtccagtctagctgttctaacttgcggtggagccaggacagggacttgatccagacatccggggagaaggtctcagcattggctgatacaatctcacacaggagctccaggatatggatcgctagatccttcctatccaaagagaggcaccgcttctccttgggaagctgccagtatttgctgaagcggtccaagagctggcacaagctgaagaggagtggaaacggggagcaggtctggagccagtattcctctcggcacgcgtttgcctctagagtctggatgaagatcctcagactgaggtctacctcttcaacatctaacctcaagaaaggcaggacaaattccttcagcacctcgtctggctcaagaagagcagccactggaatcccttggggtttcacgggactcatcaggcagttcaggagctctaaaaattgcttttcttccttgggtgtagagaacttcatccagacggtttctttgaggcatgacaccatgaaagtggcagatgaattgggaccctgctcttccacaaacctaagggcagggaaggcagtgagaatctggcccaggaacttgtgggtgccgagattgaccacagccaggctgcacattttcttcaccgtgacttccgggtgcactatgaccaggcgggccacggaggccacagcttttgccaagccctgttcggaggcactctgagtgagctggttaaaagttgtattgaggtcttcctgaaaaccctccacataagccagcaacttttcagagaggccctttcgcccccaggaacgcaggatacctgcaaggactttatttttacctggcagggagaggtctgcgtaacattccaggatcaggtggatcacctgccggatctgagactcagggatggctctgtcagctgtgctgacgtctatcactgtttccagcagcctcaacaccaagtctggctctcggaagagggccctgttactccccaggcaggctacccactcgtccgagaaggcccacttcttctcagaggcaaaaatgtagcacacttccatatggcggtccatcttctgctggatgacggccatggcaatggaagctgtgatatcctccaaggccctgttcttcagcaccgtgctcgttttcctcaggaagtccctgacacactccgccagctcagaggccacctgcctgtcctccttggacaggctggtgcggttcaggtagagcgtcgcgttctggctgaaggaagtcagactgtcgcacagccggtagctgtcgtaacttgtcccctggctgctgcggagcacggcctgcaactcctccccccactcccgcagcaggtggtgcaggaactcgcagcccacgaaaatggtctcactggggagtttggccagcgaggtcaggctgacatcccgttctgcctccttcaccttctctgccagcgcctgctggtggtagggattctgggtgtccgagttccacacagagatcaccgtggccagtttgtccagatacacggttgcagacacctcctgggggtcgtcctctgtcagcgcaaacacagtcagcatgtcagccaggttggccagcgcacagcacttcctccccgggcccaggatccgactctggatctgtgtcagcccgcggagcagcatggccaacaggggcatggtggggcacgcgtctgggtctgacctaagcctctttggaggatgggggaactcatctaaggcaggcaggtacttatgggc

SEQ ID NO: 63609 - DNA, 1171 bp, Homo sapiens
ctcaaccgcaagactcctgggatagttttcctcttttccaactgcttaataatttcctccgaaatgacacacttttgtgtaatggaaaatttcacaaacacttgcaagaaatctttgtacccttggttgtccgctatgtggatctcatggagtcttccatcgcccagtcaattcacagaggttttgagcaggagacatggcagcctgtcaagaatatcgccaacagtcttcccaatgtagctcttccaaaagttccaagtctgcctcttaatcttccacagattcctaacatttctactgcttcgtggatgccttctttatatgagtccaccaatggctcagcaacatcagaagaccttttttggaagcttgatgcactgcaaatgtttgtctttgatctgcactggccagaacaggaatttgcccaccacttagagcaaagacttaaactaatggccagtgatatgctagaggcctgtgtcaaaagaacaagaactgcatttgaactcaagctacaaaaggcaagcaaaacaactgacttgcgcattccagcttccgtttgcactatgtttaatgtattagtcgatgccaaaaagcaaagcaccaaactctgtgccctggatggaggacaagagtttggtagtcaatggcaacagtaccattcaaaaatagatgatctgatcgacaacagtgtaaaagaaatcatttcactgttagtttcaaagtttgtttcagtgttggaaggcgtgttgtctaagctgtcaaggtatgatgaaggcactttcttttcatccattctgtcattcactgtgaaagcagctgcaaaatatgttgatgttccaaaaccaggaatggatctggcagacacctatattatgtttgttcggcaaaaccaagatattcttcgagaaaaggtcaatgaggaaatgtatatagaaaagttatttgatcaatggtacagcagttccatgaaagtcatttgcgtgtggttgactgatagattagacctccaactccatatttaccagctgaagacgctcatcaagattgtgaagaaaacctacagggactttcgattgcagggtgtgttggaaggaacactgagcagtgggacttatgatactgcgcacagacgtttaacaggaaaggagggcacagcctctgtttcaac

SEQ ID NO: 63610 - DNA, 1116 bp, Homo sapiens
aaaaatcagaagggaacgagaaaagtgaagatgctgaagttttggatgccacaccttctggtattatgaagacagataacacagaagttcttctctctgctgacttcactggagcaatcaaagtgtttgttaataaaagaaaaaatgtatcttaatttgaaatggcatttaaaataaacatatcagtaagtttctatatgtatcaaaactgaaaaaatagtgttccaggctaacatacttttttaatttttattgaaagttgttcaaatataatatattttttgagaggcagtgttaatgatctaggaaaccctgggctgatagagtagaaaggaatatggctagaataacattgccaaacattaggctttatgttttgttatgtttgtgttttcgttgtataattatgaacatgcacaagtttctgcatgaaaagatattaatatattaatcacatgtatgtgccttttggttacatgcattaaatctaacagagttaaattatttcagtggctcttttggcctcttactaggggggatagtcttgtttctagcttaaacaattttttttttgcacaaaatttcatttttaataaaagtggtatcttttgactgagttattgttttgaaaatggtatataggtttccagtaggtcaacaaccatatgtaaatggtttttataaatttctcaattgggggacaagatttttttgtggtctaaattgtggggcttaagattcttttctttatatgtgtacatataatttttttttctttgccacactggagcacaatgtttctatgtaaagaattattttcattctttatccatgagcaccaggctttgctcacttaaaaaaaaattaagccacattaaggagtgagtcttcttttttacaataatgtaaaaattaaactgtttacatttttttaaagcattgtagtttttaaaaattaagctgttttgttttgtgttgttgaatttgaaagcctttgtaaatatcaatataatgtaccaatgaaataacatctggggcaatgaaaccctgatcatgttgttgatggttagcatatgtttctgaaaattaaatatgtattattaaaagttggtctcc

SEQ ID NO: 63611 - DNA, 1016 bp, Homo sapiens
tttttttttaacataacaccagtgtttattggaagcacaagcttcttttattttaaacaaaacaaaaccaaaaaccaaaaaccaatgaggctaccaaacaggcatctttatttgtaaacagcttaacactgaaaataaaaataagactatgaaagaacaatacactctccattcttctagaatcagaacttagcatgtcattatgacttaagagtcacgagagatgcaccactgaagaagtgtattgtcaacctttcatgctcaatttagctagtcctcttgacaaattaaccttacagaataccacacaaaatggtgattcctcaactcatattagctcaaattccatacacaaacacacctcctcttcttcatcagtgctcttccctgatggcacattagaagcactttttgtctcctcccctaaagtagaagcatcaccattagaagcctgggttccttgttctgcttcccactcctgcaatacctcctctaagttaaaccgacgcctgtagtttacaaagaagttcttcacttggccaacagtcttgttgccaattacatctgcaatagcttgaaaatctttaccatatttgcggacaccttgcactgctagaagctgctcctctgtggtccaacgggcattaattttctgatttgactacaaaattaaagagaagtttcctaatgaggatatgaagacagacattttccaaagcgcttatttttttaaattttcatcaaatcacagacatgagattactacaactctgattcatgaagattccatttttagaaagattaaaaatatatattctgagttaccttttacccatgcagaaagataatgaaagggaaatgtaccaatttgcaagaaggagcaacattcgcatttatgctctaattaccgatatcgccccatgagaaagtctattagtttcacatttcccaaaagggtttcactgtgtagcagcactggtctcgctttcctgccgtaagctcggcgaatctccccc

SEQ ID NO: 63612 - DNA, 843 bp, Homo sapiens
tttttttttcaaggtaattaacctagatatttatttgtatcactgctgtgtgactgtcaagtatttgtcattagtttgtacacacacccagccctactctcaaataagacaaagagatgaatatactgcaagtgtgtgtacaccatggggaagggctggaggtgtgtgagcactataggacctataggcagcctgtaattgtcatcacctatggacagagggattaagaactctgtaatcaccaagatccccagaattgttaacaacttgtcttccagatagttttcatcaaagatgctattatttcagtctccttcttttactttttaggtggtccgagacattctgctgattggacatagacaggcttttgcatgggttgatgagtggtatgacatgacaatggatgaagtccgagaatttgaacgagccactcaggaagccaccaacaagaaaatcggcattttcccacctgcaatttctatctccagcatccccctgctgccttcttccgtccgcagtgcgccttctagtgctccatccacccctctctccacagacgcacccgaatttctgtccgttcccaaagatcggccccggaaaaagtctgccccagaaactctcacacttccagaccctgagaaaaaagccaccctgaatttacccggcatggcactcttcagataaggccatgtcggcccaaatctgagtaactttatataaatatctcatgggggttttatattttcatttgttgttgttgtttttttttaaggaatcttctgataggggaaaaagactgctttgtcattcaaacatgttccttcgaccttaaaaaaaaaa

SEQ ID NO: 63613 - DNA, 2736 bp, Homo sapiens
  misc_feature (1)...(2736): n = a,t,c or g
ctcacaaaatgggatctctttggtaattgctacagattattgaagactggaattgaacatggagccatgccagaacaggtagtcgtgcaagcactgcagtgttcccattattcgattctttggcagttggtgaaaattactgatggctctccttccaaagaggatttgttggtattgaggaaaacggtgaaatcctttttggctgtttgccagcagtgcctgtctaatgttaatactccagtgaaagaacaggctttcatgttactctgtgatcttctgatgattttcagccaccaattaatgacaggtggcagagagggccttcagcctttggtgttcaatccagatactggactccaatctgaactcctcagttttgtgatggatcacgtttttattgaccaagacgaggagaaccagagcatggagggtgatgaagaagatgaagctaataaaattgaggccttacataaaagaaggaatctacttgctgctttcagcaaacttatcatttatgacattgttgacatgcatgcagctgcagacatcttcaaacactacatgaagtattacaatgactatggtgatattattaaggaaacactgagtaaaaccaggcagattgataaaattcagtgtgccaagactctcattctcagtttgcaacagttatttaatgaacttgttcaagagcaaggtcccaacctagataggacatctgcccatgtcagtggcattaaagaactggcacgtcgctttgcccttacatttggattggaccagattaagacacgagaagcagttgccacacttcacaaggatggcatagagtttgcatttaaataccaaaatcagaaaggacaagagtatccacctcctaatctggcttttcttgaagtactaagtgaattttcttctaaacttcttcgacaggacaaaaagacagttcattcatacctagagaaattccttaccgagcagatgatggaaaggagggaggatgtatggcttccactcatctcctatagaaattcattagtcactgggggtgaagatgatagaatgtctgtgaacagtggaagtagcagcagcaaaacctcatcagtaaggaataagaaaggacgacctccacttcataaaaaacgagtagaagatgagagtctggataacacatggctaaacaggactgacaccatgattcagactcctggccccctgccagcaccacaactcacatccactgtactgcgggagaacagtcggcccatgggagaccagattcaagaacctgagtctgaacatggttctgaaccagactttttacacaatcctcagatgcagatctcttggttaggccagccgaagttagaagacttaaatcggaaggacagaacaggaatgaactacatgaaagtgagaactggagtgaggcatgctgttcggggtctaatggaggaagatgctgagcccatctttgaagatgtgatgatgtcatcccgaagccagttagaagatatgaatgaagaatttgaggacaccatggttattgatctgcctccatcaagaaatcggcgagagagagctgagctaaggccagacttctttgactctgcagctatcatagaagatgattcaggatttggaatgcctatgttctgaagtctgaagaaaatttacaaatctggaactctattatttagagctagaggcctatatactgtgatagcttgtatggggaaaaacacttttgatgtgatctgatttgttttttaatcaaatgattaaggtcaatccctttttgcagtgacagaagaggagcatgtaaattacccaagggaatgttggtgaatgtcaactcagaaagactgacctgaaaatcatttgtgtcctactattggacttatcccaatacagatgtgtgtgtttttctggagggaggaagaaattttaaatttttaaaacagctgtcaagataaacactgttatacacctgttttatgaaaactcaacattgagtaaaaaaaaacatatttttaactttattttcctgttgtacaatttaaaaaccgttttaacattttgcctttttatgttttaaaagctaaccatttttattaaacctatgaggtaaggcaggctcatcctaattgcgaagagtgttttgggagttcactggggatttgggttggacctttgtgggggacnacaaataatgaaggagcagaacattgacaagctaagatggaaattccctgaccataggtaccatcctcctgcccaaaaacccacacacccctctgtggatatggatatgaattccccccagattttatanacctccttgaataaaaggtttatttttatttataagtgggcataaaataagaaatgtccatgcagccatttttccaacagatgctgtacaccgttcattttatatagactagggagattcaaatacagtgcattttctattggtatttgttctgtgcatttttagcaacttctaccagcaaataaagtattctcagtaaaacgaaaatgattctcaagttatcagtttgctgtttttacccacttatttcatgccctgccaaattcaagttacacagacttccattttcttaagataatcaatcatgaagaaatcctttatcaatcattcaaaagtaattttaagtgtaacataactgtgattacttcccatgcacttaatacccttatgcgctaattttg

SEQ ID NO: 63614 - DNA, 808 bp, Homo sapiens
gctccaaggatcattacatcaaaatgtttgatgttacacaaggagctcttgggactgcgagtcccacccacaattttgaaccccctcattatgatggcatagaagcactaaccattcaaggggataacctatttagtgggtctagagataatggaatcaagaaatgggacttaactcaaaaagaccttcttcagcaagttccaaatgcacataaggattgggtctgtgccctgggagtggtgccagaccacccagttttgctcagtggctgcagagggggcattttgaaagtctggaacatggatacttttatgccagtgggagagatgaagggtcatgatagtcctatcaatgccatatgtgttaattccacccacatttttactgcagctgatgatcgaactgtgagaatttggaaggctcgcaatttgcaagatggtcagatctctgacacaggagatctgggggaagatattgccagtaattaaacatgaatgaagataggttgtaaactgaatgctgtgataatactctgtattctttatggaaaatgttgtcctgtacttactaggcaaaacgtatgaatcggattaactggaaaatatatctgaattcaactgctgactataaatggtattctaataaaattgtgtactatcctgtgtgcttagttttaagatcaaccaatagatatatatcctacaattgatatattgctttattcacacttttattgtggctgaatttttgtgcctatctataaaacacactttcaaattatttgaattaccaagacgtctgcttttgt

SEQ ID NO: 63615 - DNA, 2006 bp, Homo sapiens
ccagtccaggctgtgaatgttgggcagttgctggccgtaaatgccgaggaggacgcctggttacgggcacaggtcatctcaacagaagagaacaaaataaaggtatgctatgttgactatggttttagtgaaaatgttgaaaaaagcaaagcatacaaattaaacccgaagttttgttcactctcatttcaagctacaaaatgtaagcttgcaggcttggaagtcctaagcgatgaccctgatctagtgaaggtggttgaatctttaacttgtggaaagatctttgcagtggaaatacttgacaaagctgacattccacttgttgttctgtacgatacctcaggagaagatgatatcaatatcaatgccacctgcttgaaggctatatgtgacaagtcactagaggttcacctgcaggttgacgccatgtacacaaatgtcaaagtaactaatatttgctctgatgggacactctactgccaggtgccttgtaagggtctgaacaagctcagtgaccttctacgtaagatagaggactacttccattgcaagcacatgacctctgagtgctttgtttcattacccttctgtgggaaaatctgcctcttccattgcaaaggaaaatggttacgagtagagatcacaaatgttcacagcagccgggctcttgatgttcagttcctggactctggcactgtgacatctgtaaaagtgtcagagctcagggaaattccacctcggtttctacaagaaatgattgcaataccacctcaggccattaagtgctgtttagcagatcttccacaatctattggcatgtggacaccagatgcagtgctgtggttaagagattctgttttgaattgctcggactgtagcattaaggttacaaaagtggatgaaaccagagggatcgcacatgtttatttatttacccctaagaacttccctgaccctcatcgcagtattaatcgccagattacaaatgcagacttgtggaagcatcagaaggatgtgtttttgagtgccatatccagtggagctgactctcccaacagcaaaaatggcaacatgcccatgtcgggcaacactggagagaatttcagaaagaacctcacagatgtcatcaaaaagtccatggtggaccatacgagcgctttctccacagaggaactgccacctcctgtccacttatcaaagccaggggaacacatggatgtgtatgtgcctgtggcctgtcacccaggctacttcgtcatccagccttggcaggagatacataagttggaagttctgatggaagagatgattctatattacagcgtgtctgaagagcgccacatagcagtggagaaagaccaagtgtatgctgcaaaagtggaaaataagtggcacagggtgcttttaaaaggaatcctgaccaatggactggtatctgtgtatgagctggattatggcaaacacgaattagtcaacataagaaaagtacagcccctagtggacatgttccgaaagctgcccttccaagcagtcacagctcaacttgcaggagtgaagtgcaaccagtggtctgaggaggcttctatggtgtttcgaaatcatgtggagaagaaacctctggtggcactggtgcagacagtcattgaaaatgctaacccttgggaccggaaagtagtggtctacttagtggacacatcgttgccagacaccgatacctggattcatgattttatgtcagagtatctgatagagctttcaaaagttaattaatgactgcctctgaaaccttgacaactaattcagattttttagcaataacaaaatgtagtaggcttaaaaaaaatcttaactctgctacatggctctgactgctgtgggggattgaaaagaatatgcttatgtttgatgaaagatatttaacaagttttgttttaacagagttgacttttcaaagaaaattgtacttgaattattactataatattagaataaaaatgtttatcaat

SEQ ID NO: 63616 - DNA, 2008 bp, Homo sapiens
ttttttttttttcacaacaaagaccacgccatttatttacaaaggccagtgtgggagctgggggaggcagggagggaaagccacacagacatcttctctggactgcttgggaccctttcccacttggagcaaactctgttcctcttgccgtcatattctcagccatggggtcggtcctccaagcagctgggccaagtaggagagggaagaggtgatatgagcctcctctgtgctctgacagagaaatgtccaattccagatcaaaggcatcattgccaccctctcctctccttcctcaaagaaaactttctggcctggagggaaatagttaagaactgaaaggccagggggtctggaggaaaaaaaccctctactattcccacaaggcagtgaggggtgataagggtgctagtcacagccctgacagcttcagaaagggtacccacattacctctgggttacccagcatccagagccccaagggacctagctctcccggatatatattcctgcaatggactgacctttttacccacttgtctctggtggtgggagagcactctgaaccagaaaccaacaaggaatcctcttcccacccaacttaagagtgtatgcacacatgtggatacacatgcacctccccactactcacacagaccccaacccccttcatgtcttttgaggggggctcaaactactggtgcctggggacacaagcaagacctgggtccatggaaatgtgtgtgtgtgtgcatataagcacatatgcttgaggaactaaagccaatatgaccccttgtggggcgtggcgcttagcttcattgggctccttttttcagtttaaattccattagcatctctaagtctcttctgccagctcgggcctggattcttctgcctaaaagagctatgagtgcttccgctccccactgttaattccaacttccaagccttttactcaggctgtctcccccattcccttcctccgaataatctcattccctcctctttcacacgaatttcctctgggctgctccagcgtttgttaattcctgtccagagagctgtctcatctccctcttcagacagggagaacaggcatcttcctccttaccctggaatttccaacagttcccaccaaaaagtgctgaatgaaccagaataggggccgagaaggaaaattaccacctgtttcacctgctcctccttcagagcaagaaattctagcattggttgggctaggggttggggggtagggagaaaaagaaggaagagagttaccaaaagtaaacataagacaaaaccctagtggtatagatggaagactatgttccagtaaaccagagagctggttcctccctcgactctgcacagccactgaaagtttaaagattgcaaaagtggtgtggggcaaggaggtagagtcaatcaatgaaactgtgaaaactgtttaagtagcactgctcaaggagaccaggagagaagagtctgttagagacgtagcagtaaaaccataattctcagacagagctaaggggttggagcccatgcctctaaagtcaccctgctgtttggaaaggatgagggagaagacggaagggaggacaagctgcagagggtaaggattgacagaagaaccgaatgctgacatcgagggaggggagaggcaggaggcatgggccgagggattaggagagctgggagcccagcagtctctcgatagctgcgttgatgtcccctcctgtggcaatcagggcctgcaggttagcctcacgattgatgaagcccatggagttgagctgctccagctgctgctgaaatctcacttctggcgtctgcacctgtgagtttccacttccagccaaaagctggatcatctgctgcatgagttgctgctgggcgctggaagcccctgttggagaagatgtggctggcgtggctggtgaggaagtgggggcctcggacgtagaccctgcgttgctgcctgctgagggtgctggggtccggg

SEQ ID NO: 63617 - DNA, 2091 bp, Homo sapiens
gacataattgacctgcagtaccgttccggattcccgggccgatccgcatgtcccgcgcgacccacgcgtccgggctgccatctgccgcctcctcagcatccggcaccccgaggagctgtccctgctccgggctcctgagaagaaggagaagaagaagaaagagaaggagccagaggaagagctctatgacttgagcaaggttgtcttggctgggggcgtggcacctgcactgttccgggggatgccagctcacttctcggacagcgcccagactgaggcctgctaccacatgctgagccggccccagccgccacccgaccccctcctgctccagcgtctgccacggcccagctccctgtcagacaagacccagctccacagcaggtggctggactcgtcgcggtgtctcatgcagcagggcatcaaggccggggacgcactctggctgcgcttcaagtactacagcttcttcgatttggatcccaagacagaccccgtgcggctgacacagctgtatgagcaggcccggtgggacctgctgctggaggagattgactgcaccgaggaggagatgatggtgtttgccgccctgcagtaccacatcaacaagctgtcccagagcggggaggtgggggagccggctggcacagacccagggctggacgacctggatgtggccctgagcaacctggaggtgaagctggaggggtcggcgcccacagatgtgctggacagcctcaccaccatcccagagctcaaggaccatctccgaatctttcggccccggaagctgaccctgaagggctaccgccaacactgggtggtgttcaaggagaccacactgtcctactacaagagccaggacgaggcccctggggaccccattcagcagctcaacctcaagggctgtgaggtggttcccgatgttaacgtctccggccagaagttctgcattaaactcctagtgccctcccctgagggcatgagtgagatctacctgcggtgccaggatgagcagcagtatgcccgctggatggctggctgccgcctggcctccaaaggccgcaccatggccgacagcagctacaccagcgaggtgcaggccatcctggccttcctcagcctgcagcgcacgggcagtgggggcccgggcaaccacccccacggccctgatgcctctgccgagggcctcaacccctacggcctcgttgccccccgtttccagcgaaagttcaaggccaagcagctcaccccacggatcctggaagcccaccagaatgtggcccagttgtcgctggcagaggcccagctgcgcttcatccaggcctggcagtccctgcccgacttcggcatctcctatgtcatggtcaggttcaagggcagcaggaaagacgagatcctgggcatcgccaacaaccgactgatccgcatcgacttggccgtgggcgacgtggtcaagacctggcgtttcagcaacatgcgccagtggaatgtcaactgggacatccggcaggtggccatcgagtttgatgaacacatcaatgtggccttcagctgcgtgtctgccagctgccgaattgtacacgagtatatcgggggctacattttcctgtcgacgcgggagcgggcccgtggggaggagctggatgaagacctcttcctgcagctcaccgggggccatgaggccttctgagggctgtctgattgcccctgccctgctcaccaccctgtcacagccactcccaagcccacacccacaggggctcactgccccacacccgctccaggcaggcacccagctgggcatttcacctgctgtcactgactttgtgcaggccaaggacctggcagggccagacgctgtaccatcacccaggccagggatgggggtgggggtccctgagctcatgtggtgccccctttccttgtctgagtggctgaggctgatacccctgacctatctgcagtcccccagcacacaaggaagaccagatgtagctacaggatgatgaaacatggtttcaaacgagttctttcttgttactttttaaaatttcttttttataaattaatattttattgttggatcct

SEQ ID NO: 63618 - DNA, 1298 bp, Homo sapiens
ttttttttgaatcatacaaattttcagtatcatttaattctttaatactttggggacatttccttttcctttaacaaaaagaatagaagtgatactatatactgctagtagaaaattaagagcttttctataaaatcctatgaaattaaaattaaatcgtcttatttttaaaaatgcaaaagaagccagacagtagacttaacaaccatgaagcaggacccacttccctctgaaccaaggatttcctatgctttctagatatcccttcaggaaaagggccttctctaaattaactggaacaattcggaataccaagaagtaggtagagagcaggaatgtgagcagatcatcgaatatatgtttttactccatggtgactaaaatgaagtccatagataggagcaggtgaagaagaaaacaacacaatctcctgatgtacagttgtcactgacccagagcagtctgctgctgtgattctctctgcctgtgacctgagggtcagttgcttcattagatgcaatggaaataaaactgaacgggatctcaagaaaaattttaaaatggaaggtacacctcaatagtttttacttttggtgaagtcatatggtttccaccactgagcaaactgcagtgcttttttcctctgatcctcaaagctttctcggatgcctttcctccaaagtcttggttctatatccagcatcccacctatgatttcctttccaaagtaatgagggaatttgtgctgatcttcaatgacatgggcaaaccctccgtgaaggccaaaatccacagagaagtaaggtaaccctctgggtacagactttctgatatcttttgaagagagatctatcaacttcttgttcatggaccactcttcatcagattccattatggctttcttaaaatagatgggagccatgtcacccacttccttgggaagaggaatacattcataaaccatgtgatactgtttcttcatgctcatattagtttccaaaaaaatgcagtctaatcctttatcttcaaacatctttaccaatgattttctgaacatctggatctcctcccagatgtcttcatccaacaaagtagctgctctatggtgctgcaaagggactatcaggcagtgcccctcagtaagagaccgtacgttgggtaaacataaataaaccttaacacctattgcaacaataagatgcttgggaaattgagagctgtcaaaacaatacagacatttttccatttgtgcagcaagactccgatgctcagcaatagcttttttcctttggttctct

SEQ ID NO: 63619 - DNA, 836 bp, Homo sapiens
ggtggctctgcacgaaaggagtagctctgtttccactattgacactgcccggctgattcaagcttttggccatgaaagagtatgcttgtcacccagacgaattaaattatatagcagcatcaccaaccaacagaggagataccttgagaagcggagcaaacacagcaagaaagtgctgaatacaggtcatcccctagtgacttctgagcacaccagaaggagacacatccaggtagcaaaccatgtgatttcttctgactctatttcctcttctgccagtagtttcctgagctcaaactctactttttgcaacaagcagaatgtacacatgttaaacaagggcatacaagcaggtaacttggagattgtgaacggtgccaaaaaacacactcgagatgttgggataactttcccaactccaagttccagcgaggctaaattggaagagaacagtgatgtgacttcttggtcagaagaaaaacgtgaagagaaaatgctctttaccggttatcctgaggacagaaagttaaaaaagaacaagaagaattcccatgaaggagtttcctggtttgttcctgtggaaaatgtggagtctagatcaaagaaggaaaacgtgcctaacacttgtggccctggcatctcctggtttgaaccaataaccaagaccagaccctggagggagccactgcgggagcagaactgtcaggggcagcacctggacggtcggggctacctggcaggcccaggcagagaggctggcagagacctactgaggccatttgtgagagcaacccttcaggaatcgcttcagtttcacagacctgacttcatctccc

SEQ ID NO: 63620 - DNA, 1511 bp, Homo sapiens
cccacgcgtccgggcatataacagatacactcgccctcaagcctatgaactgccctgcacactgcctgatgttcgcccaccggcccagatcctggcgggaactgcccctgcgactagctgactttggggctctacaccgggccgaagcctctggtggtctggggggactgacccgactgcggtgcttccagcaggatgacgctcacatcttctgtacaacagatcagctggaagcagagatccaaagctgtcttgatttcctccgttccgtctatgccgttcttggcttctccttccgcctggcactgtccacccggccatctggcttcctgggggacccttgcctttgggaccaggccgaacaggtccttaaacaggccctgaaggaatttggagaaccctgggacctcaactctggagatggtgccttctatggacctaagattgacgtgcacctccacgatgccctgggccggccacatcagtgtgggacaattcagcttgacttccaactgcccctgagatttgacctccagtataaggggcaggcgggtgccctggagcgtccagtcctcattcaccgagcagtgctcggttctgtggaaagactgttgggagtgctggcagaaagctgcggggggaaatggccactgtggctgtccccgttccaggtggtggtcatccctgtggggagtgagcaagaggaatacgccaaagaggcacagcagagcctgcgggctgcaggactggtcagtgacctggatgcagactctggactgaccctcagccggagaatccgccgggcccagcttgcccactacaattttcagtttgtggttggccagaaagagcaaagtaagagaacagtgaacattcggactcgagataatcgtcgccttggggagtgggacttgcctgaggctgtgcagcgactggtggagctacagaacacgagggtcccaaatgccgaagaaattttctgagcctttgtacatagatgaggcaaaaacctgcgagtgccatcagcctccctcacatgggagaccccaacccagctgacaatgtggagcccccagaacttcagaactgtgtggaggcacatgtctgctctcctgaaaagagacttggtttggggaccccacaaaaggagggaagctgtagctgtttggatgtgaggagaatgaaactacaaaaaaaaataaattgggccaggcgcagtggctcatgcctgtaatcccagcactctgggaggctgaggcggacggatcatgaggtcaggagatcaagaccaccctggctaacacggtgaaaccctgtctctactaaaaatacaaaaaattagccgggcatggtggcacacgcctgtaatcccagctactcaggaggctgaggcaggagaatcgcttgaacccgggaggtggaggttgcagtgagctgagattgcgccactgcacccccctatggcgacagatgcgagactctgtctctaaataaataaataaataaataaa

SEQ ID NO: 63621 - DNA, 663 bp, Homo sapiens
  misc_feature (1)...(663): n = a,t,c or g
tgtggacaaagaacatgacagtgctgaaggaagtcacgtttcaggacaaagcaatgggcgagatccacaagctcttgccaagcctgtccagattcaccaagataccttgcgcacaatgtacttcgcttaaatagtccaagtatattctctgagagcaagtactgaaagatgaattgacatacgtcgtatgtttccagtgaagtccattgagtaaggacacctccagccatacagaaaccaacactgtgtgggggccaaggtctgatccttatgttaatacaaggaagattgtttacttcatcaaggaacacagcatcattatgcaatatgaaaccagccaactgctttttgtgcggtctcctataggaagtatcgcaattgttttgttttcatttcttgtagnctaacccttttaatgcctttacctcaagttgcttggcagcacaactatctttgcgnnnnnnnnnnnnnnnnnnnnnnnnnnnnnnnnnnnccctttaaaaaaaaccaattttaacgcccgggggggggaaaaaaaaattttttttaagggggccccaaaaataaattccggggccgggttttaaaaacggggggaaggaaaaaacccgggggttccccaaattaatgggtttggaaaaaaacccctttttcccagggggg

SEQ ID NO: 63622 - DNA, 2013 bp, Homo sapiens
agggccaccacttattatctagcagatcgtcgctatgacatgctgccttccgtcctcagtgcagatttgtgttcccttctgggaggcgttgataggtatgctgtaagcatcatgtgggaactggataaagcctcttatgaaattaagaaagtgtggtatggcagaaccattattcgatcagcatacaaactgttctatgaagcagcccaagaactactggatggaaacttaagcgttgttgatgatattccagaattcaaagacttgggtgagaagagcagacaagccaagctggaggagttggtgtgggcaattggaaagctgaccgacatagctcgccatgtcagagctaaacgagacggatgtggtgccctggaactggaaggggtagaggtttgcgtacagctagatgacaaaaagaacattcacgacctcatccccaagcagcccctggaagtccacgagacagtggctgaatgcatgatcctggccaaccactgggtcgccaaaaagatctgggagagcttccctcatcaggccttgctgcgccagcaccctcctccacaccaggagttcttttcagaactccgggaatgtgctaaagccaaaggcttcttcatagatacacggtccaataaaacactggctgattctctggataatgcgaacgacccccacgatcccattgtgaacaggctactgcgctccatggccacgcaggccatgtcgaatgctctgtacttctccaccggatcctgtgcggaggaggagttccatcattacggtcttgcattagataaatatacccactttacttctccaataagaagatattcagatattgtagtacaccgcttgttaatggcagccatttcaaaagataagaaaatggaaattaagggaaatctgttcagcaacaaagatcttgaggaattatgcagacatatcaacaacagaaaccaagcagcacagcattctcagaagcagtctactgagctcttccagtgcatgtacttcaaagacaaagaccctgccaccgaggagcgttgcatatctgacggagttatttattcaattagaacaaatggtgtgcttctatttataccaaggtttgggattaaaggtgctgcttatctaaaaaataaagatggtttagtcatctcatgtggcccagatagctgttctgaatggaaaccaggatcccttcaacgatttcaaaacaaaattacctctactacaacagatggggaatctgttacgttccatttgtttgaccatgtaaccgtaagaatatccatacaggcctcacgttgccattctgatacaatcagacttgaaataattagtaacaaaccatacaagataccaaatacagaacttattcatcagagttcccccttgctgaagagtgagttagtgaaagaagtaactaaatctgtggaagaagctcagcttgcccaagaagtcaaagtaaacatcattcaggaggaatatcaagaatatcgccaaacaaagggaaggagcctatacacacttctagaggagatacgggacctagctctcctggatgtttcaaacaattatggaatatgagaggctcttacttcactaagagctgtcatatgtgaatgttttacagtcttttcaaacttaacatttaatgtgtgtcactcagtgctctagtcgatcaggactgggtagctatttcgcatatatgtaaaatgttctcagccgggcacggtggctcacgcctgtaaccccagcactttgggaggctgaggcgggcggatcacgaggtcaggagattgagaccatcctggctaacacggtgaaacccagtctctactaaaaatacaaaaattagcccggcgtggtggcatgcgcctgtagtcccagctacttgggaggctgaagcaggagaattgcctgaacccaggaagaggaggttgcagtgagccgagatcgcaccactgcattccagcctgggcaacagagcgagactccatctcaaaa

SEQ ID NO: 63623 - DNA, 1518 bp, Homo sapiens
ggcacgagtgatcactgggctgaccgctttgaggacctgcccctctatttcatgactttccatggacagcaaagcatcaggactgtaatagatacaatgcaacatgcagtctacgtctatgacatttgtcatgtgatcatcgacaacctgcagttcatgatgggtcacgagcagctgtccacagacaggatcgcagctcaagactacatcatcggggtctttcggaagtttgcaacagacaataactgccatgtgacactggtcattcacccccggaaagaggatgatgacaaggaactgcagacagcgtccatttttggctcagccaaagcaagccaggaagcagacaatgttctgatcctgcaggacaggaagctggtaaccgggccagggaaacggtatctgcaggtgtccaagaaccgctttgatggagatgtaggtgtcttcccgcttgagttcaacaagaactccctcaccttctccattccaccaaagaacaaggcccggctcaagaagatcaaggatgacactggaccagtggccaaaaagccctcttctggcaaaaagggggctacgacacagaactctgagatttgctcaggccaggcccccactcccgaccagccagacacctccaagcgttcaaagtgaaggccgtgcagagctggtcactgaaatgagcctgataggataggctggagcataaaactctgcaagggctcctctatcctgtggtcctgagctgtgtgcccttctcagtctgaggggcctaacctagagcaggtttccatagtgagaaaattcaatgtagcagactactgagaaactactgtgttgctcaggctttgtttgaggtcctgtatatacagcactgaaaagagagataaagtccctgcctgcatgcattctggcggaagagacaagcaagcaatgaacaaattagcagaaaacctagttttagtgaaaaatgctgtaaagaaaatagaaatgcgatagagtgctggcaggctagtgtagataagtggtctgaaaaggtgtctctgagccgagggcatgtgagctggggcctaaacaactagaaggagagagccacgtgaacatccggcgaaggggacccaggcagagagaaaaggaaatccaagccctgaggtaggaatgagcaggtcagattcaaggcagtgaggtcaggccgcatgaacctggaggggaatcggggacttcatgcgaaactccagcctaggctttcaaagtcaaagggtgatacagtgggtaccaagctcctctgctccccactttgtagagcctagcatgaggtggcatgtactagaattgaatcctaggtgcttagccctgcaatatcagggcctcactggtgggagctgcctcgggctgggttgcttggtcatagagccatagaaggaagctgtcagcccggattgtcctgcctatcctagtcactgatgccattgtgtgcttcctcaagactgtctggagtcagtgacattttatagagccttt

SEQ ID NO: 63624 - DNA, 1272 bp, Homo sapiens
ttttttttttttagggatgcattttgaatatttattgtccttgtttttaacataatttgcaaatttacataattataatggctgtgtttgacaactggcttgcaacaaaattcttgaaaattgaataattggcccacctgggctgggatgagccagctggatcacaccgttgccccctcagcctctaggaggcctcaggattatggcgtccatcttatgatattggccgaaaggagacagtcttggaggtgctgcttactgttgaacttccttttggaatgtatgggagaaggcagggaaaggaatctttaggcagactgccatccagggactgctattctgttcactgagattcagctgtgaacatctgttctttcttcctcttctgtctactgcatgcaggcccggaagctgagcgttagtcaaaggtacaggaagggaaaagagaagagggcaaggcccatcccccaagaaaggaagggctctgatgcagagggagcaggagctgaggtggagacggccactgcctctctcaccctctgttccatccctctgctcaagaaaaccaggcttagcagagtgggacagacgctttttattggtctggctggcgtgcctagtggaaagctcaggcagagcttcctatcttgccctggctcccatcttccctctcctgggagttcatcacacatcccgagagggaagagtgtcctgggcagaggtggcaggcaaagccgggtaaaaactccagggctgggaagcaaatggggctcagggtgatgcagaaaatgtgatgttgccaggccatccaaataaagcatccatcggggcagaggagaagctgtttccctgcagacactcctctgcccccaccaggaatgggaggggcaggaggaagagcttcccagagaggctccctactgggcccttcgtgccatcagcatctcccggatgttgtcctcagcttccttaacgcttcgctccaggtaggactttttctgttctagttctttaattttttcttctgctattttctgcttctctaacagctgactgtgaattgcttccttggactgaagaataaacattcttcctacaccttcatacatgttagtctcatctaccaaagtcatgatctctgtatctgtaagatgtgcatgctttttcgttctgtttagctgttcaatctgtatgtctgcgagcttcaccttctgttgagtgtcaataactttggcttgaagctctgtgaaggccttcttcagctctagatcc

SEQ ID NO: 63625 - DNA, 1492 bp, Homo sapiens
ttttttttttttatacccaacatccattgatctttatttgatttgacaaaatctgcatttttaaaagacaggtaacaaaatctgaggttatactgaatctgacaaattgagttctatagtatctagaatatcatataagaaatatcaactgagggaaaagagaagtaccacatgcagatgctcctggcaaggggggaactgtatctgcaggtgaggtccagagtgtgcagtgcataagaaaatcctacagaaaatgccgttaacttacttggatgaaatgtttttcctttgagggggaggaagaggtggtaaagaggggcaggaattcaaaggcatatgcagaatggcttctccatttcaaaatggtaataaaaatatttaaatcatggcactagggcacctttgaggaaaagaacatcttaaccagagtaggctcattgcataattctttagtaatatgtacaattttcaagtaattaagcagacttaaaggataattttgttttaacagcagctatctatttttcttctccccctctggggcttgatctgtttcagcatcacagggacacttttccacacattttctagggaaccaaccccttattcttgaaacaccttctataaaggaatcatcaagaattttgtctccatataaccagtatcgtaaacctcttgtggctaaaatgaattcccctttttgcagctgtattcgaggctcttcggtgcagggacttgtgaagaaggttttgattcctttattcagagggcagcaggcaccactataatcttctattactttatagcgaacacttctgactctcttatctgctttttgtttcaactgttctattgttaagctgtattggtgacagccttctcttactggccactcaagtccatctccttcagggacccctgaccacgtaaatacctgtttaaagttcctccatctacttcccatatcatatggaaaaacaaagacttcatctagttgataatactgaattcgatctttagccttctcttcaatccatgactcaatagaagttttgtttctgagaattattttcatctggataaaaaacaacatcccaacagctatggttgttcctaaagctaatcccaaggcaaacaaggtggtagcaaatgcagctaatccaaatggaacaattggaagaggatctctccgggctgcactcatgtcgatcttcactgtgttccacccaaaggagagccgatgataaagctgtgtgtacatagtcatcacaaaaatgaaagcagcatggatacaacccagtggtgctaaaaggagaaacagtgtgaacgaagcatgattttggtaaccacaacagttgttgatccaaggacagtgatggtccatcttcatcacacatctgttacactttctgcagtgatgtgaacgtggtgccttgtatgcttggcagactttacaatactggagatacatggtatcctgagaaattctcgg

SEQ ID NO: 63626 - DNA, 2119 bp, Homo sapiens
gattccggcagtgacagcagtgaggatgatgacgaaggcgacgaggagggagaggacggagcccttgatgacgagggccacagtgggattaaaaagaccactgaggagcaggtgcaggccagcactccttgcccgaggacagagatggcgagcgcccggattggggatgagtatgcggaggacagctctgatgaggaggacatccggaacacggtgggcaacgtgcccttggagtggtacgatgacttcccccacgtgggctacgacctggatggcaggcgcatctacaagcccctgcggacccgggatgagctggaccagttcctggacaagatggacgatcctgactactggcgcaccgtgcaggacccgatgacagggcgggacctgagactgacggatgagcaggtggccctggtgcggcggctgcagagtggccagtttggggatgtgggcttcaacccctatgagccggctgtcgacttcttcagcggggacgtcatgatccacccggtgaccaaccgcccggccgacaagcgcagcttcatcccctccctggtggagaaggagaaggtctctcgcatggtgcacgccatcaagatgggctggatccagcctcgccggccccgagaccccacccccagcttctatgacctgtgggcccaggaggaccccaacgccgtgctcgggcgccacaagatgcacgtacctgctcccaagctggccctgccaggccacgccgagtcgtacaacccaccccctgaatacctgctcagcgaggaggagcgcttggcgtgggaacagcaggagccaggcgagaggaagctgagctttttgccacgcaagttcccgagcctgcgggccgtgcctgcctacggacgcttcatccaggaacgcttcgagcgctgccttgacctgtacctgtgcccacggcagcgcaagatgagggtgaatgtagaccctgaggacctcatccccaagctgcctcggccgagggacctgcagcccttccccacgtgccaggccctggtctacaggggccacagtgaccttgtccggtgcctcagtgtctctcctgggggccagtggctggtttcaggctctgacgacggctccctgcggctctgggaggtggccactgcccgctgtgtgaggactgttcccgtggggggcgtggtgaagagtgtggcctggaaccccagccccgctgtctgcctggtggctgcagccgtggaggactcggtgctgctgctgaacccagctctgggggaccggctggtggcgggcagcacagatcagctgttgagcgccttcgtcccgcctgaggagccccccttgcagccggcccgctggctggaggcctcagaggaggagcgccaagtgggcctgcggctgcgcatctgccacgggaagccagtgacgcaggtgacctggcacgggcgtggggactacctggccgtggtgctggccacccaaggccacacccaggtgctgattcaccagctgagccgtcgccgcagccagagtccgttccgccgcagccacggacaggtgcagcgagtggccttccaccctgcccggcccttcctgttggtggcgtcccagcgcagcgtccgcctctaccacctgctgcgccaggagctcaccaagaagctgatgcccaactgcaagtgggtgtccagcctggcggtgcaccctgcaggtgacaacgtcatctgtgggagctacgatagcaagctggtgtggtttgacctggatctttccaccaagccatacaggatgctgagacaccacaagaaggctctgcgggctgtggccttccacccgcggtacccactctttgcgtcaggctcggacgacggcagtgtcatcgtctgccatggcatggtgtacaatgaccttctgcagaaccccttgctggtgcccgtcaaggtgctgaagggacacgtgctgacccgagatctgggagtgctggacgtcatcttccaccccacccagccgtgggtcttctcctcgggggcagacgggactgtccgcctcttcacctagctgttctgcctgcctggggctggggtggtcgtgctgaagtcaacagagcctttaccctgtaaaaaaaaaa

SEQ ID NO: 63627 - DNA, 317 bp, Homo sapiens
aactatgcaccggaagtgcaggacagagtcaccattacggcggaccgatccacgagaacggcctacatggagctgaggggcctaacatctgacgacacggccgtctattactgttctctactggatcggggaagtatgatcttctcagcaggattcagaaaacgttttctattttcataaaaaatgtgtggacattgctataaatacttttcctgagtggtaaacatgtgatactgtctgggaaagatattccaggtggtggttatttttgaacaagtaaatcttaaatgatcataagagaacaggctgtgttagct

SEQ ID NO: 63628 - DNA, 456 bp, Homo sapiens
ttttttttttggtgtttcaattgttttattacaatccaaaagttggggcgggggttcctgtgccaccacacaccatccaggatgagagggtcagaagtcaaaggtccaagctgcaggagggtcagcccctgcctggcatgttgatgtagactttgccatcttcttgggcggggctgcggcgtgggcgtgcgcacaggaacaccgcccccacgatgagcagcgatgccaccgcatcagcagccacgaggcctgccaggagcggcagagagagggacccacatccggaacaagagcctgaagtgccagggtaaaaggcagggagtgatgatctctctcctggagtcgtctgagctgcagccactgggagcaaaagcaggaagaggatgtgacccagatggatcatggtggactggggtctggcaggggtctggcagaggactgtggtccagagaagtc

SEQ ID NO: 63629 - DNA, 1075 bp, Homo sapiens
ttttttttttttaccacagacacatgtgtttcatttttagttttgttaaaaaaaaaattctgacaaatcagaaatgggggttcaggagtggtggtgatgcaaaagatggaagccatggggtgggggctgtcaggggtgggggcagtagtgtctccttcacccccaccctggtgtcctctcctgaaggacagacggtcacattccaaaatgggcgagtcttctaccgtgtctgttcaatgtaggaggagatgtctatctcatcaggcagctcactaatattgacctcaaagcgatcctgcacatcattgaggatcttggcatcattctcatcggacacaaatgtgatagccaagcccttggtgccaaaccggcctgctctggccacccgatgcaggtaggtgtcagaatcctcaggcatgtcataattaaaagcaatgttcacccgctcgatgtccatgcctcggccaaataggttggtagccacaagaattcgtcgttgaaaatctttaaactgctgataccgagaaagcctctcctcctggggcatcccacggtggatggcaatggctgggaagttctgctccactagtagctgggccaaggcaatgcaccgctgcacagacttcacaaagatcaccacctggttgaactcaaggacatccagaaggtcaaagagcttccggttcttctcgttgtccttcagtttcacgtagtactgctgcaacccatgcagcgtcaacttcgtctcatcatccacgaagatctccattggatcttgcatgaacttgcggcagactggacggatctctttgctcaaggtagcactgaacatcatgacctgcttctcgtggggggtcatgcgaaaaatttcctggacatcccgacgcatgtcgagctgttcaagcatcttatcacattcatccaaaataaagtgtttaatgtgtttgaggttgaggctcttatttcgagccagggctaggatacggcctggagtccccacgacgatatgcgggcagttcttcttcagcacctcttcatccttcttgatagacagaccaccaaaaaaaacagcaac

SEQ ID NO: 63630 - DNA, 401 bp, Homo sapiens
ggaaaccccagcgcagcttctcttcctcctgctactctggctcccagtctcagataccaccggagaaattgtgttgacgcagtctccagacaccctgtctttgtctccaggacaaagagccaccctctcctgcagggccagtctgagtcttagcaacgactttctagcctggtaccagcagaaacctggccaggctcccaggctcctcatttatggtgcatccaccagggccactggcatcccagacaggttcagtggcctcgggtctgggacagacttcactctcaccatccgcggtctggagcctgaagactctgcagtatattactggcagcaatatgacagtttttggacgttcggccaagggaccaaggtggaaatcaaaccaactgtggctgccc

SEQ ID NO: 63631 - DNA, 1104 bp, Homo sapiens
ggtctctgagcatttctcagggatgttcaaaaggaaagcttttgtgcactggtacaccagcgaagggatggacataaacgaatttggggaagctgaaaataacatccatgatttggtatccgagtaccaacaatttcaagatgccaaagcagttctagaggaagatgaagaggtcacggaggaggcagaaatggagccagaagataagggacattaactgtgagagaagctgtgccgcggagtcgcttacagaacagtttctcattagatgagtgtttctcctgcagcactccaaaacccactctgcactgcagcacagtgaatgatatgcactcaccattagcttcgacacagggactgagggagacaggtggggagcagctgacaggcattagggtctttgctgacatctactaaccttgaagagtttgatgttcagtgcatacttattaacttaaaaaaatagcaaatttattgtaaagtgctcccctttgtttccaaaagtgtttgccccggcatccagactacacgtgtggatttgcagggagccactggagttggtgttacatttttatactttagcagcactgataggcaccctggaatcctcacttggtatccgagggctactaagactctttccttaggttctttcctctgagcaaacactgactggcatcctgctttccagtgcctgccagcctccagaagagccaggtgcctgactagtacatggggagctacagagccaaggtcaatgtgagtcaacatccactagaaatatccatgttgtgtagacctgtgcatacaacatgctaactggaaaagaggaaaaaagaaaagccacagtcctctccacaaaaatacctgggtccaaacaagaaaaactatcagacaagcacaactaatgaactgctgtcttctgatcttcacttctgaactacacgcatatactcgacactgtcaatattatcatactacacacagtccgactatatccacacgtctatacatactcatataacaaattctatagactacgctaatctacatactctataataatatatcagtatcatatttatcacctatcacttcctactg

SEQ ID NO: 63632 - DNA, 386 bp, Homo sapiens
cactatcaaaaattatttcctaatctttggcaagaattttgtctttccacttgaagtggttctttcaaaccttgcaaattttcttctagtcccataccagggacataacccattttatgcattgtatgttgactttgagggctatataattgttctgaaattagaacttgtgctccccattgttgtaataaatctcttccccataaatatataggtacagaagttataattggttgaatagccccaggttgtccatcgggcccttcacaatgcaaaatataactactttgatatactacagggactttaccaagtccaactatgttaaattgagcggtttgaactgggcacgtggatggccagtgctgtatagaaatgattgaaat

SEQ ID NO: 63633 - DNA, 1559 bp, Homo sapiens
aaagatcgaaccccaattctattctattctgacataatgctcataatgctcctaaaggaaaaaagtaaaattgtttattttcctcccaagcaaaacaaaatgaacaagttcaatcaaaaacatcccaatggaaaaaaatcacactaagaataaaacacttacagaacggcaagaaaactgggttaacatataaatttgtgtctgttgaaaccagagtacatgctagaaaacattaacacagatacgacagagtgtggtttttttttagaaatgggtaatttctctctccagtatcctttcacttgtatgagatatttctcctctcctgttttcacaaaccaagaaatccccaggtaggccaatcccagaggtgccatttagcagtatgcagcagcccagtttcagcataacaaaacatgccttggtagtggctctctcatgcaaataaaagaaagcttaagaaattcttgttgtaggtggattaggcaaggctgccattcagctggtataagctaaaagtaaaaaatcaaaacgctcaagaaaacggacacaattttggaatgattaaagatgtctttataaagtttttttcaagacttcattctaaatacacagaataaaaaatggtgtcagctcacttgtaagacaccaaccagattttccttatactgtctcaaaatttaaagatcaatttccccagagggtgtgcaatgcatcataaaatggcccttttttgaggatgggagaggaagggttgggcaggatggaatattaaattgtaacatgataaacatgcaagactgttatccaatctagataatttatatacattttgatgacttaggaaaacaaagcaatcatttgtgacaagcctaaaaagcttgacatatttaacatacttaggaactttttttgtgcggtgggaattctctaattgtatcatgtgggccttttgaaagtaacaaacagaaggccagtctgttgcaagtttgctgctgaacatcacattccaccctaagaaaacacaaggtggattgcatcgagggtggataccttaccttagcacagaaggaaaaagtatgtcagtgcaaagtatggactaaactgctttcaggaaaaaagttgtaaaaattgatacaggttggaaaagggaattttccttcccggcttggagtcctcccaatttaaggcagaacccatccactccaatttctgcagtttaaaactttctctacttatttagttttctcctctgagttcaaccgctgctggattcgtttggcataactttgtgccatggagttaatgatagataggatgaagtaacacaccatgacaacgaccaacttttcaaacatccaggacaaccagttttctccctgtggtgtgcccatttcgcttttgtggtgaagcttctgccgttgagcctccaggtactcctgaaatggcttctgcagagatggacctatgccggggacagcaccaatgaaagccaccatttgctccactatgtgcttgctgaatgttattataacaaaaattttctggatactcgtgcc

SEQ ID NO: 63634 - DNA, 780 bp, Homo sapiens
ggaaaagcctttgggtccaaatccactcttgttcgacaccagagaactcacacaggagaaaagccatatgagtgtggtgaatgtgggaaattattcagacaaagcttcagccttgttgtacaccagagaattcacactacagcaaggccttatgagtgtggccagtgtgggaaatcatttagcctaaagtgtggcctcattcagcaccagttaattcacagtggagctaggccctttgagtgtgatgagtgcggaaaatcctttagccaaagaaccaccctcaataaacaccacaaagttcacactgcagaaaggccttatgtatgtggggaatgtgggaaagcttttatgttcaaatctaaacttgttaggcaccagagaactcacactggagaaaggccttttgagtgcagtgaatgtgggaaattttttagacaaagctataccctcgttgaacaccagaaaattcacactggattaaggccttacgactgtggacagtgcgggaaatcctttatccaaaagtctagcctcattcaacaccaagtggttcacacaggagaaaggccatatgagtgtggcaaatgtgggaagtcctttacacaacactctggcctcattctccaccgaaaatctcacactgtggagaggcctcgtgacagcagcaaatgtggaaaaccctacagcccaagatctaacattgtttaactcttgaaactccaaacctgagaaaagccttagacctgcagggaatgtgccatgtctttcttcagtgttatg

SEQ ID NO: 63635 - DNA, 1073 bp, Homo sapiens
ggaaacatcatctacatgtacatgcagccaggagccaggtcttcccaggaccagggcaagttcctcacgctcttctacaacattgtcacccccctcctcaatcctctcatctacaccctcagaaacagagaggtgaagggggcactgggaaggttgcttctggggaagagagagctaggaaaggagtaaaggcatctccacctgacttcacctccatccagggccactggcagcatctggaacggctgaattccagctgatattagcccacgactcccaacttgcctttttctggacttttgtgaggctgtttcagttctgacattatgtgtttttgttgttgctcttaaaattgagacggggtctcactctgtcacctagggtggagtgcagtggtgccaccatagctccttcgactattgggcttaagcgatcctcccccacctcagccttccaagtaactgggactacaggtgtgcatcactggcagtgggaattgtggcttttctgtcttctatggagacggggtcttgcctgtgttgccccaggctggtcccaaaccccctggcctcatgtgatcctcctgccatggcctcctaaagttctgggattacaagtgtgagtcactgtgactggccaacattatgtgatttatgtgtgaacctatataacacaaatcatcccccaaaaccccatcctggatctgtaaagcagctgccaaagaatgaagtgagagaaacagttgtaaagatgagtttcccaccctacttatacccagagtgcctaagaggaaatcaactcttcctcaatcagagctttgcctttgtttgttgttgtttgcctttaaagtctaacacacctgacatgtttcagtcagaatgaccccaaatgcatcactgttctccacgtggtcccaagtgcctctctgtttagggccatcaaatcatggaatgcagcacagtttgatattttctatattcccaattcctacccaaaccttttcatgaaatcgtagagtttgttttaccctttatctggtgtaagattctgcataaaccaagaagtgaacctgt

SEQ ID NO: 63636 - DNA, 2262 bp, Homo sapiens
cgcgtcgacgatttcgtagctctaacaccagctcgagcacccagcccagtgccggctccagccccggagccagagccagctccaacaccagctccaggttcagagctagaagtagctccagcaccagctccggagctccagcaggctccagagccagctgtgggactagaatcggctccagcgccagctctggaactagagccagctccagaacaggatccagctccctcacaaactctagagctggagccagctccagcaccagttccatcattacagccttcctggccttcacctgtggttgcagagaacgggctgagtgaggagaagcctcacctcttggtgttccctccagatctggtggcagagcagtttacactgatggatgcggaactgttcaagaaggtggtgccctaccactgcctgggctccatctggtcccagcgggacaagaagggcaaggagcacctggcgcccaccatccgcgccactgtcacccagttcaacagtgtggccaactgtgtcatcaccacctgcctcgggaaccgaagcacgaaagccccagacagggccagggtggtggagcactggatcgaggtggccagggagtgccggatcctcaagaacttctcgtcactgtatgccatcctctctgccctgcagagcaactccatccaccgtctgaagaagacgtgggaagacgtttccagggacagtttccggatctttcagaagctgtcagagatcttctcagatgagaacaactactcattgagccgggagctgctcatcaaggagggcacctccaagtttgccaccctggagatgaaccccaagagagcccagaaacggccgaaggagacgggcatcatccagggcaccgttccctacctgggcacgttcctcaccgacctggtgatgctggacactgccatgaaggactatctgtatggcagactcatcaactttgagaagaggaggaaggagttcgaggtgatcgcccagatcaagctgctgcagtcggcctgcaacaactacagcatcgcgccagatgagcaatttggggcctggttccgggccgtggagcggctcagcgagactgagagctacaacctgtcgtgcgagctggagcccccatccgagtcagccagcaacaccctcaggaccaagaagaacacagccattgtcaagcgctggagcgaccgccaggcccccagcactgagctcagtaccagtggcagctcccactccaagtcctgtgaccagctcaggtgtggcccctacctcagcagcggggacatcgctgacgcgctcagcgtgcactcggccggctcctctagctccgacgtggaggagatcaacatcagcttcgtcccggagtctcctgatggccaggaaaagaagttctgggaatcagcctcacagtcatccccggagacctccggcatcagctcagcctccagcagcacctcgtcctcctcagcctccaccacgcccgtggctgccacacgcacccacaagcgctctgtctcagggctctgcaactccagctccgcgctgccgctctacaaccagcaggtgggcgactgctgtatcatccgcgtcagcctggacgtggacaatggcaacatgtacaagagcatcctggtgaccagccaagataaggctccggctgtaatccgcaaggccatggacaaacacaacctggaggaggaggagccggaggactatgagctgctgcagattctctcagatgaccggaagctgaagatccctgaaaacgccaacgtcttctatgccatgaactctaccgccaactatgactttgtcctcaagaagcggaccttcaccaagggagtgaaggtcaagcacggagccagctccaccctccctcgcatgaagcagaaaggactcaagattgccaagggcatcttctgagggcatcctcccagggtctggctggctggtagccaagcacttatggaccagagtggcccaggccagctgggcgccttcctcccacctgccagcccagggtaccccagactccagtttcatcctgaacctctcccgctgcttgggatttgacgcctgccatttggtcaggctgaacttgggcctcccgtggaaccaactcgcttgccttaaggtggccttctggctctctggaaccagaggactagctgactttttggcaaaggaagcagtgccaacgggaatggcatgggtgccctgcctgcccccgggcgccaactctgtaca

SEQ ID NO: 63637 - DNA, 2439 bp, Homo sapiens
ggcacgaggtctattgaaataaaagcccgggttacctacatagactatgaaggacgctctgatggggattccattaaaaaaatcattaatcagatgaaaccacgacagttgatcatcgtccatggcccaccagaggccagtcaagatctggcagagtgctgtcgcgcctttggtgggaaagatattaaagtgtacatgccaaagctacatgaaacagttgatgccactagtgaaactcacatctaccaggtgaggttaaaagactcacttgtcagctctcttcagttttgtaaggcaaaagatgctgaattagcttggatagatggtgtcttagatatgagagtttccaaagtggacacaggggttattttagaagaaggagaactaaaggatgatggagaagactcagagatgcaagtggaagctccctcagattctagcgttatagcacaacaaaaggccatgaaaagtctgttcggagatgatgaaaaagaaacaggtgaagaaagtgagatcattcctactttggaacccttgccacctcatgaggttcctggacatcagtcagtttttatgaatgaaccaaggctgtcagacttcaagcaagttctcttacgggaggggattcaagctgaatttgtaggaggtgtacttgtttgcaacaatcaagtagcagtccgcagaacggaaactggacgcattggattagaaggctgcctttgtcaagatttttataggataagagaccttttatatgaacaatatgccattgtataaaggacatgatgtcaagaagtatctgcttgacctttctaagaaaaagggattcttatcttactctgagcttttgatgttttgttttgtaacatacaaaaagaatctgccagaaaaacttacatgtatcagatttttaaaaatataaatagagaacattttgcaaatgctcaaatgagcattctatcttttggctttcagagtgatagagctcctaacaggtgtacaggcccaagagttgaaggtgattggttttctttacagactccttgttctctagaagggctttttacttgaataaaacaatgcaacttagcaaaccaatttatggccttagagaaacatttttgcatgagttcttacaaactgtttgttatattttctggaatgataagtgagaattatttagaaaagacatgctccaaaaaaaaaacaaaactgataaaacagtttttcgaaacttacttttaaaagcatacgtgctatgactctctccagtttgaatatgcaattgttttcacaggcaggatgtctgttttctgcctgtatttcccagggatttactctagggtaaggtagtacacatttggttcagaaattaatttttatttctcctatatcttgttttatcaagattttgttgtggcatttcaatgtaaattataacaccatcatttgagtatacataattcaaaagaactacttgatgcagtatagtcttaagggttctgcatacattttagaaacatcttagccgtaagttaggtcctgtgttaaactgtttagtgctctgtttttaagaaaacaaatgttgaacctcacacttttatgtggtgacagtgtaatttaattaaaaggtgtaaatggtttcatctcttaggcttgctgtctcctaaggtcacccaagcagtggttggattttatacacattactactaaaataatactgaagttggataaggttatcctttctgtatttgcgtctttcttgtgactaaccaccctgatatagtattaaccactgtgttcaagagtaaaaacaatatatgcaattttcattgaacttaaagagtgaaaaccatgtaaactattgaaactattgtaatccattaatgcttttttagaatggcagaccttgatgtttatttctcaaatgggttaagccctcttctttactcttaatttttttttgagacagagtcacccaggctggagtgcagtggtgagattttggctcactataacctcttcctccagggttcaagtgattctcccacctcagcctcccaagtagctgggactacgggcacatgccactgcacctggctaatttttatatttttggtagagacagggtttcaccatgttggccaggctggtctcaaactcctgacctcaagcgatccacccacctaggcctcccaaagtgctgggattacaggcatgaatcaccacaactagcctacccttagatttttggaaggatcgatcttatttaactatgtgtggaacaacccagtaatatcagactcgaattactatttcattctatttcaaatgcttataaagctactattgtagattatagtgttaatgcaaagtttacagacttttgatatggaaaaccagataaacacaacaatgttacaaaaggcaaaaaaaaaa

SEQ ID NO: 63638 - DNA, 931 bp, Homo sapiens
ggcacgaggaagccagtttacaaacatccgctggtctttgttttgctggctgtacttgtgctttcagtaactacacagattaactatctcaacaaggcactggacacctttaatacctctcttgtgacacccatttattatgtattcttcacatccatggtagtgacttgctctgccatcttattccaagagtggtatggcatgacagctggagatatcattgggaccctgagtggattcttcactattatcattggcatcttccttctacatgcttttaaaaatactgacattacttggagtgagcttacatccactgctaagaaagaagccgtctctctgaatgtcaatgaaaacaattatgttttactagagaacttggagtgttcagccccaggatacaatgatgacgttaccttgtttagtagaactgatgactgaagtctctagaaacactgagttttaaccaatatgagacacacgaagaggaaaatgaatgcttgcttcttggaagaactgctaggaaagttagcatttttgcagttctaactaatttagatgtgaggccaagtaaaaatgccatttttttggccattgaatttgaaaatcaaattgattatcctccagaatctctacaaactttgaaatactctctaaggatcaaagaagtcaaagagctatgtgtgtctcagaataatctccttcttctggtcacagtatctttgtctctgccaggtggctcttcatttctttggtagctatttttagaccttacagtcattcaccaatatacagttagcagtgttctgatagacacagtatcagtcatattctccgttggagtcataatttcaaactcaacaagatttcagaaaggtataatcatggtaatttctcatattaaaactggagaagagaggccaggcatggt

SEQ ID NO: 63639 - DNA, 1159 bp, Homo sapiens
ggcacgaggagattcggacctcgccgcatccgggaagaatcagtgatgcttcggacagtcaatcctagcacgggggccctccccttccagtccctcatggttgcagacctaggcgatgtgaatgtcaatctttacaaccttcaggacagctgccggcaaattcaagaggcctatgagaaaattgtagcagctggctgtattcctctgaccttgggtggagatcacacaatcacatatcccatattgcaagcgatggcaaaaaagcatggcccagtggggctgctgcacgtggatgcgcacacggacacgactgacaaggccctaggagagaagctctaccacggggcgcccttccgccggtgtgtggatgagggtctcctggactgtaagcgtgtggtgcagattggcatccggggctcttccacgaccttggatccctacagatacaaccggagccagggcttccgggtagtcctggctgaagactgctggatgaagtcgctggttcctctgatgggggaagtcaggcagcagatgggaggcaaacccatttatatcagctttgatattgacgctctggatcctgcctatgcgccagggacagggacacctgaaattgctggtctcactcctagtcaggctctggagatcatcaggggttgtcaaggcctgaacgtgatgggctgtgatcttgtcgaagtttcaccaccgtatgatctttctgggaacacagccctgctggcggctaacctgctgtttgagatgctatgtgctctccccaaagtgacaaccgtctgagtcttgtgctcttcaagacaaaacagattgcgtcgctgacaagttctcaagaagaacttatgagtaagcagtctgagaactaaagagtttatgccaagaaaactttctgctgaaagtgtcattgctggctgtgaagtcgggataatcagtagaattctcacccaaacagcaacatttctaaggaacttggattaattgggggaaaaaaaaaggagtacttgtactgctttgatttttatttccctttggatgaaagatgggagggataaaggggaagtgaggagaatttctttcaagattatctaaacattagaaacatgacatttaaaaaaactatgaaataatactgtataagcattcc

SEQ ID NO: 63640 - DNA, 1858 bp, Homo sapiens
aagtctcatggtgattgatcttcgtctgcgtggggtgtatggttgttaatctttctctctggcagttagggcacacacgaattcctagcatccccactccagcgaaacacttgtgcacagattacaaacaccaatatgattttattcaaacacaggcaagaacaatgaccttcagagctgggtaaaaataataagttaaaagcatggttagaattttagacaatcagataaaaagtttgaaggaagtgatttccccttcctctcctaattgattaattcaacacagcataaaaataatttgtatctataaaatatccttgttcccacacaaatgaactggaggtggccctaggatttccttgactatggcacaatgcacacaatctacatgtccctcctccccaacttttaaggcaaaaatggtcctgcatcttcagggcagagggtgggctcatgccagcagtcagctgtgtcaaggacactggggggcgtttctccaccgaaagatgcctgcttgggtcccacttgggcgcggattccattttatttctagcctttgcctcaccacagaaaaaaggagctgaaattctggcaagtggacactggactggtttggggcactcctccagtctgggctgaccgggtctcttgaggcatccgtggcctaggcaagtggtggtttcaggactgtgacagccctgaaggagccagacctggtgcctcctgcaagctggacaaagctgacggagggtgggcaggtgtctccttccccccagcccctcaggctgcgtcagtctttctgggagtactgagaagaaaatatccgtgcaatcctgagagtttcttcctcaggcaggttgagggggagcgagttaggtctggggcgacaaggcctttgggagagagctcccctggtggcttcgctcttgtcctgatctgttgtggctgctggtggcaaagttgctgagagtgaaagcatccgcagggaagcctccaactgctggggaggcaaaaaaaagttgggcaccacaatgggccctgggagcaggaggctctgctttgtggacgtctctgatccagttgtcacctgcctctgcctgatgtcagaggagtcgatgggtggtcccttatggttttcccttctgctctgggaggctagatttagcggcaacttcttgaagctatcagcagagtcaccgagctcactggtggcagcttcattctcagctggggcctctgacttgggctccttgttctgatctgtctgtggtgagctccatccaacaaacgtgctgctctgttgagctcctgagagtgttgggcatgggatgggctgagggttggctgaggcagactcgccaccaaccctggccttagaggcctcacactcacaagcaacaagactttggctaggagaaccctgcctaggcaggtgggggttgacagccctttctgggctggagagaaagctacttttgaccataagctcctctctgcagaaaggccctggagaaggacaagaggggccttccctctgcacctcgtcaggctgagggctgatgacctcacttgtgtctgatatgacactagaccaagggctagttttgtctgtcaccgtggtgatctcatttaaggtcctgggctcaatgatgtcttcttcatagtcctcatcactgtaggctgggcctgcctcagtgtcttcactgctctgcatccttgtaatgggtactgcatgcctcagggactcatggagcattcttcctccatttgaagtctcttcgagaggagggggtgatggggaatctgtgcctttatctggagctcttaccaatggctcatctggcattgtgcatcgttc

SEQ ID NO: 63641 - DNA, 1510 bp, Homo sapiens
actgtaggaattttgaaagtgcaaaaggccaacccaaaattctaccaacaaaggtaacctactggcatttgggtatattttttctctgggccttgtcctccgcctttatctgatgctgcagatgtaattctgtgttccgcttgtttgcttcatgttgtgttatgaacatgtccccctcaaatctccctgggagccttccagcgatcagccccctttgactgtgtggctctggccttggggaagagctgagggtctcctgccctaacggatggtttcagggtgtgaaggtcaaaggcctcatcctcatcagcccccagaaccctctgggtgatgtatactcccctgaagagctacaggagtacctggtatttgccaagaggcacaggctgcatgtgattgtggatgaggtctacatgctgtccgtgtttgagaagtctgttgggtaccgcagtgtcctaagcctggaaaggctccctgacccccagaggacccatgtgatgtgggcaaccagcaaggacttcgggatgtctgggctccgctttggcacgctgtacacagaaaaccaggatgtggccactgccgtggcttccctctgccgctaccacggcctcagtggcttggtccagtaccagatggcacagctgctccgggaccgtgactggatcaaccaggtgtacctgccggaaaaccatgcccggctcaaggctgcccacacctatgtctcagaagagcttagggcattggggatccccttcttgagtcgtggggctggcttcttcatctgggttgacttgagaaagtacctgctcaagggcacctttgaggaggaaatgctgctctggcgccgctttttggacaacaaggtgctgctgtcctttggcaaggccttcgagtgtaaagagcctggttggtttcgctttgtcttctcagaccaggtccaccggctttgcctggggatgcagagggtccagcaggtgcttgcaggcaaatcccaagtggcagaagacccccgtccctctcagagccaggagccaagtgaccaacgcaggtgagctggtcattgtctcgtggccagagggcccagcagccactgtggacctggggcgttctggggctgcagaagactgactgtggatgtgccatttgccaggaaggtatctaacttggctttgtgcctgaagaactgtttcttgtctttcgctgtagcagtgggaaactccttaagctgtggttcagcctgggccctccctctctcctattaaacaaaactaggagagtccatatgtctccattgtgagttatttagaatggaggagtcgtgactgcttctaaccagagcctcagcccccctgaggatgtgaaaagaaaacaaacaacttgtaccttctttctgatatcaccgtcattcctctttctttgtcaccaaggaaacgagtcaaaggaacagcacatacaggagagtttgtagaaaaataaaaaaaagtgataacttccaaactcaaaaaaaaaa

SEQ ID NO: 63642 - DNA, 2247 bp, Homo sapiens
atctctcggctttcctggtcagcagcgacttgacctacgtctaccagtggccctggacgctcctgctcctggctgtcagcggcttctgtaactttgcccagaatgttatcgccttcagcatcctcaacctcgttagcccgctgagctactcggtcgccaatgccaccaaaagaatcatggtcatcacggtgtccctgatcatgctgcgcaacccagtcaccagcaccaacgtcctgggcatgatgaccgccatcctgggggtcttcctctataacaagaccaagtacgatgcaaaccagcaagccaggaagcacctcctccccgtcaccacagcagacctgagcagcaaggagcgtcaccggagcccactggagaagccccacaacggcctcctcttcccccagcacggggactatcagtacggccgcaacaacatcttaacagaccacttccaatacagccggcagagctacccaaactcgtacagtttgaaccgctatgatgtgtagagtccaaaggacaggaccagactgttggtgactccttccccggcccccacagcagtatcagaaacttctgacaatcagtgaatgtacaacccagccgaggggacggggcataactctccatcagaagccctggggttcctggccccccgtgagccgcaggaggatgcgttgcctgcagtgcagacggccgtgagctctgggcaaacctaaacagagaccagtgtctcatgctctttcttcctggagtctgtcatctgagggccgtgtccctgcggagatcttggccacgttgtacctttccatgtggaattattccccaagcagtgtagctcagagcacttgtgtctgcattccagataacattcaggacctgtgtgaaaagctggggtcactgtggctgtagaccatgaactggcagtgggggtgtccagggcggtgcttgagaacgtcagactggctagtttaattccctggcgcagatacgcataggaccaacagggtcaccaagcagacagggagcccgcgagaatcattcaaaacatccccagccacagagatggatccagtttcctggtcatccccttagcagttcacaagttcctggcaaatgttccaaagcaaaaagcgattgcaattagcatccagttcctgcagcctggtgctctgccctgcacgtcagggttggcatccacccagatccagatggaagggaaacttctctcttctcctttgcctcctcttccctcaccagagcagggcgcttctcttggggtggtgagaaggatcttcgagaaatcgtgttcagtatttcaagctctatttctgtggcacatgtcttttgagaggcatcttcacctcttctgtgatgacttggtatgttgtttggtagagagatcttgattttcggaggatcttgcatttttctagggaatattttgtagttgtgtgtgtgtgtttttgccttggtccccattatgggatgcattaggactggcctatgcatcgaaaatctttttgtttgtaaacgtttaaaaacaaagttccccggccaggcacagtggcccacacctgtaatcccaaagtgctaggatgacaggcatgagccaccgtgcccagcctgattgacaatggcctcttgaaggctgggttttcccagccggacagtgcccgccccacatgctccactcccacgctttcatctgcaggcctgccttcctctcagccacctcactgctgagctctgtggtagagaatttcctttacccatcagggtatggtctggctggtaatactgactccaacccagctccttcattttatagaaggaggcatttctgaatcatgtttgttcaccatggcgagactcactgcagaatttttaaccaccttattttaagtcattcattctaggaacagtcaagcccctaccacaaaggggccagatccgttcaagtgaggaagcacttgcagtttctgaattttgctgtatatttgtcctatgtcacccaacaggccctttgctatagctgggacattaccagaccccaataccttagggtctcacagcctgaaggacacagagcattgaattattaaaagacctgaaaatattataatgtttttcaattgtcacctgttttcaagacttaaatgctatagacttttctgcaggaatgacgtgtatattcctcactggcatttaccaaaaataaatgatggtttccagggaatcaaaaaa

SEQ ID NO: 63643 - DNA, 2012 bp, Homo sapiens
gagtctgcaaactccggtggtaggggagcgcgctgctgtttagagccacgagttaccggagcgcctgattcctgcgccgaagtcagtggtggccgaaagtccggagtcgctgtaaaacctgagattgtgagccatggtggggagatcccggcggcgcggagcagctaagtgggcagctgtgcgagccaaggcaggtcccacgctcaccgacgaaaatggagatgatttaggattgccaccctcaccaggggacaccagctactaccaagatcaggtagatgactttcatgaggcacgatcccgggccgccttagctaagggctggaatgaagtacagagtggagacgaggaggatggcgaggaggaggaggaggaggtgctagccctagatatggacgatgaggacgacgaagatggagggaatgcgggggaggaggaggaggaggagaatgccgatgatgatggtgggagctccgtgcaaagtgaagctgaggcctctgtggatcccagtttgtcgtggggtcagaggaaaaaactttactatgacacggactatggttccaagtcccgaggccggcagagtcaacaggaggcagaggaggaggaaagagaggaggaggaggaggcacagatcattcagcggcgcctagcccaagcgctgcaagaggatgattttggtgtcgcctgggttgaggcctttgcaaaaccagtgcctcaggtagatgaggctgagacacgggtcgtgaaggatttggctaaagtttcagtgaaagagaagctgaaaatgttgcgaaaggaatcaccagaactcttggagctgatagaagacctgaaagtcaagttgacagaggttaaggatgagctggagccattgttagagttggtggaacaagggatcattccacccggaaaaggaagccaatacttgaggaccaagtacaacctctacttgaattattgctcgaacatcagtttttatttgatcctgaaagctaggagagtcccagcacatggacatcctgtcatagaaaggcttgttacctaccgaaatttgatcaacaagctgtccgttgtggatcagaagctgtcctcagaaattcgtcatctgttgacacttaaggatgatgctgtaaagaaagaactgattccaaaagcaaaatccaccaagcccaaaccaaagtctgtttcaaagacttctgctgctgcctgtgctgttacagatctttctgatgattctgattttgatgaaaaagcaaaactgaagtactataaagaaatagaagacaggcaaaagctaaagagaaagaaagaagaaaatagcactgaagaacaggctcttgaagatcaaaatgcaaagagagctattacctatcaaattgctaaaaataggggacttactcctaggagaaagaagattgatcgcaatcccagagtgaaacacagagagaagttcagaagagccaaaattagaagaagaggccaggttcgtgaagttcgtaaagaagagcaacgttatagtggtgaattatctggcattcgtgcaggagttaaaaagagcattaagcttaaatgaagtttttgcttagcataaggtttttggcagttttggatcaataaatttttacttttaactaaagtcattgtattaatatataatactttaaattttaaaaattcttgtccacaaggaaatttgtctgggttattggacaatttataagaactatgggagcaatatgaaggtgcttgagaaaagagatgatgttgaagttttccaatattctgttgaagttttccaatattaagtattagcttagggaaatttcacagttcattgtggagtgttaaacttagaacatgtgtaacttttcacataaagagaatgcatctttgacagttatcttatttgtaaggcagcctataaaatagttctgaagtattttatttacctaactataattattgggccagatacttgttaataaatgggcttaatgttaacatggaaaaaa

SEQ ID NO: 63644 - DNA, 1828 bp, Homo sapiens
attcatacaggagagaacccctatgaatgccatgaatgtgggaaagccttcagtcggaaataccagcttatttcacaccagagaactcatgcaggagagaagccttatgaatgcaccgactgtggaaaggcttttggtttaaagtcacagcttattatacaccagagaactcatacaggggagaaaccatttgaatgtagtgagtgtcagaaagcctttaatacaaagtcaaacctgattgtacatcagagaactcatacaggagagaaaccctatagttgtaatgaatgtggaaaagcctttacgttcaaatcacagctcattgtacataaaggagtgcacactggagtaaaaccctatggatgcagtcaatgtgcaaaaacctttagtttgaagtcccagctcattgtacatcagagaagtcacacaggagtaaaaccatatggatgcagtgagtgtgggaaagccttcaggagcaagtcataccttattatacatatgagaactcatacaggagagaaaccacatgagtgcagggaatgcgggaaatcctttagtttcaattcacaactcattgtgcatcagagaattcacacaggagaaaatccctatgaatgcagtgaatgtgggaaagcctttaataggaaagaccagctcatttcacatcagcgaactcatgcaggggaaaagccttatgggtgcagtgaatgtgggaaagcttttagcagcaagtcatacctaattatacacatgagaactcattcaggtgaaaaaccatatgaatgtaatgaatgtgggaaagccttcatttggaaatcactactcattgtacatgagcgaactcatgcaggggtcaacccttataaatgcagtcaatgtgagaaatccttcagtgggaaattacgccttcttgtacaccagagaatgcacacaagagagaaaccatatgaatgcagtgagtgtggaaaagccttcattaggaattctcaactcattgtacatcaaagaactcattcaggagagaaaccctatgggtgcaatgaatgtgggaaaaccttctctcaaaaatcaattctcagtgcacatcagagaacacatacaggagagaagccttgtaagtgcactgaatgtgggaaagccttttgttggaagtcacagctcattatgcatcagagaactcatgtagatgacaaacattgataattttacgaaactctgaaaagtggattcacaagagatagaaacaatcatatataaagagaaactctgtaagtggaatcatcttgtcatcttccagaaaactcatactgaatagaaactttatgaatgcacagcatatggaaaggcatccacagaaagctgttctttacatgcaaaaagatagtagacaatacacaggaaaactgaatttagtaaccactctgaaaatttttagcagcaagtcatacctttttttaaaaaagttcatacaggtgaggaaccatgttaaacgttgtaaagtcattttactaacataagattcacaaagaggaaacttcatgaaccagatgaatatagaatagacttctttgaaattcatagtttacagaattttaatgagagaaattattgagctaatgaatggcagaattaacaaaattacaaacattttatgtatcggaagcatataccttggagggaccatgctatgagggaaagtgtaaatctagaaatgagaaacccctagggaaaaaatatatataggagtgaacatcttatgaatgtaccaaataaaccacagctggactgttaacctcaccttagaagcttcattctaaaaaaaaaaaaa

SEQ ID NO: 63645 - DNA, 4287 bp, Homo sapiens
agtctcattggcagaggcgggaccgacggtgtgtgcggaacatggcggagcgcggcaggaagcggccgtgcggcccgggtgaacacggccaaaggattgagtggcgaaaatggaagcaacagaagaaagaggagaaaaaaaaatggaaggatctcaagctgatgaaaaaactggagcggcagcgggcacaggaggaacaggcaaagcgcctggaagaggaggaggcagcggcagagaaggaggaccgcgggcggccctacacactgagcgtagccctgccgggctccatcctggacaatgctcagtcgccggagcttcgcacctacttggccggtcagattgccagagcctgtgccatcttctgtgtggatgagatcgtggtgtttgatgaggagggccaggatgccaagactgtggagggggaattcacaggagttgggaagaaggggcaggcgtgcgtacagctggcccggatcctgcagtacctggagtgtccacagtacctgaggaaggcgttcttccccaagcaccaggatctacagtttgcagggctcctgaaccccctggacagcccccaccacatgcgtcaggatgaggaatccgagttccgagagggcgtcgtggtggatcggcccacccggccaggccacggctcctttgtcaactgtggcatgaaaaaggaggtgaagattgacaagaacctggagcccgggcttcgggtgactgtgcgactgaaccagcagcagcacccagactgcaagacctaccatggcaaagtggtatcatcgcaggaccctcgcaccaaagctggtctctactggggctacaccgtccgactggcttcctgcctcagtgctgtgtttgctgaggcccccttccaagatgggtatgacctgaccatcgggacgtcagagcgcggctcagatgtggcttctgcccagcttcccaacttcaggcatgctcttgtggtgttcgggggcctccagggtctggaagctggagcggatgctgaccccaacctggaggtggctgaacccagtgtcctctttgacctgtacgtcaatacctgtcctggccagggtagccgtaccatccgcacggaggaagccatcctcatctccctggccgccctgcagcctggcctcatccaggcgggtgcccggcacacctgaaagttctaaggggccgaggacatcagtgaagcagcagtgaaaccaggggctctgcaggtcacttgggacggacgccaccagacttgtctccaaaaatcaccacctttaatactccccggcctgcacacacccacagtctcactgggctccaccctcacttactgcccgccgtgatggccttgaggctgcctgcccgcgccaggatgtttggcacaaagagcagccccgaagcccgctcaatgctctcgatgggcaccaggaagcgctccagtgggatggcctcatccacaggtgccgttgggcatcacgtaggtgcggagctcaatttgcccacctgctgcctccaggatcagcaccttgaagaagtgtgtgggcactgccacgtggttcttgccgatgacctggtactttacgtaggatttcccatcagcctctgtcctgtgggcagacccaggcacacgtgggcagggggcctggatgaacccaaagccacctcttccaggcagccttccctgatctgtcctctaacttctgtcaacctgcaggaccacgccctcactgtgagacttctgtagcctgcctggctcctccttgaggctggaactctctccagggtggttaactctttccctctgttttccttatgcccaacactgggtcaggcagagtgggcgacaataaacgctgctaggagaatcgagccttctgaatattcacattcgtctgaggggagacttaacgactgtccatctctccccacagaggtgagcaacaagtgggcaaggaccatgacaggtgacatcccagcaccagcacaggtgccaggacaccggacgggggctccccctcagcagagtctcctcccttccaccaggccctaggaggcacctgctaatgaaatttgatcagtgccccaaccaccgccttggccagcctatgccgagcccttaccatggaccaggccctggggaagcatgtgacatcaaccaagaggtcacaggttttgcagagggggacacaggtcatttgcccacagcaccaaggaactaggtgatgaggcctggactccatcccgagcctgtggattccagagtgagctgctcagcctggacctgttgcctctcagccccagccctctgcaggccagaaaaaccacggagcacacccagaggtgctcagttgcttccacctgagaggcagggctgcacaggagcaagagtggaggccctgggtcaggcagatctagattcaaactcccgagaagggtggagggaagtgctccaagcagagcagagactgaaggcgggagagcctggtgcaccgcggacctgcagggggaaggcgtgagagctcggtgcactggggacctgcatggggaaggcgggagagctcggtgcactggggacctgcatggggaaggcgtgagagctcggtgcactggggacctgcatggggaaggcgggagagctcggtgcacctcggacctgcagagggaaggtgggagagcttggtgcaccgcagacctgcagggggaaggcgggagagcttggtgcactgcagacctgcggggggaaggtgggagagcttggtgcactgcagacctgcggggggttccatattggcagaacaagattgggtgggcatgccaagaggtgacagcagggagaagcgggggcagattcagggcctgctgctgcccatgggcagaggagagatggtcaggggtacccgacaggtctttggctgtggaggtggaatgaggggactcgaggcagggaagctgacaggcttgccaagaaaccagatgagtagggaactggtattgacccagagcctggggcaagcctggccctgtgagtggcagtaggggcctcgggtgagtgggaggttctgccgcccccctggtttccaccttacctgggcaggaagagtggccctgtgcagacatagacgttttggtagctgcgggtcaagctgcggctatatttctccaggttgttccaggcattctggttgaggtggggcacctggtaggagagatagggcttagcaggactgtggctgggacccttcctcctctatcagagggccgccccaggtcctgaggggatggacaggctcagagatatccagtgagacaagcggggggaaactgaggctcaaggaatgaaagtcactccctgaaacccagggctgatagagtgctagccaccaccctctgtccctcccacagcccaggtgtcaaagtcttttctcagctcccaagagtcgaatgaaggaagagcctgtctccacctttcagagaggactgaggcctgtccccagccccacccagggtctcctgggaagaccagcccttccaactaccaacccgttccttttcccagtctgagccacaggaagagcctagcggggaatgccatgaatcgacctccatcctgagctctccaggcctgggacaatggaaagtggatagggggctgtcttcccagaaggaagctgggtcagaggttggtgccccatgggctccacccagagccccatggcagtctccatccattggtgccaggacctgctgggaacaggctgagagggtggttggcccagtgcacagtgcctggcactaacaacctgatcgtgggccaggtgtctgcctcgaaactgcctgaaggcaggcagggtaggacaatgtctggaggctcacggttttatagactaggggtccccaacccctgggctacagaccggtaccagaaccgggccacacagcaggaggtgagcagcaggcgagcaagggaagcttcatctgtatttacagccacccccccattgatcccacagcagcctgagctccgcctcctgtcagatcagtggcggctggagattgtcataggagctggaaccctatggtgaactgcgcatgtgaggaggttgcgcgctccttttgaaaacctaatgcctgatctgtcgttgttgcccatcacctccagataggactgtctagttgcaggaaaacaagctcagggctcccacgggatcctacattactgtgagttgtatatttcactatatgttacaatgtaataataatagaaataaaatgtacataaatgta

SEQ ID NO: 63646 - DNA, 987 bp, Homo sapiens
ttttactgaaaacatttattttttatttatttattattattattattttatgagccagagtctcgctctgtcaccccaggcttggagtgcagtggcggtgatctcgggctcactgcaaagctcatgccttccgggttcacgccattcttctgcatcagcctcccgagtagctcgggacttacaggcgcccgccaccacgcccggctaattttttgtatttttagtagagacaagggttcaccccgtgttggccagggaatggtctctatctcctgacctcgtgatccaacctgcctcggtctcccaaagtgctgggattacaggcgtgagccacagtgcccggcctgaaaacatttattacaacaaaacgtcagacctatgtgacagtaagttaccacaagctggtagggttgaaccggggcaggagtcgctggtacagggacctcactgcccaccccatgctcagctcctgcctggaggaacctctggctgacccagacacaggatggacagctgtcagaaaatctggacaacagctcggtagggcgattgggcagcctcctcctgtccatgcttctgcccaggctgagcctcggaggaggcctggttcctggtcatcttggggctgacgacaatgctgctgttggtgactcggggcccataccagcctgcccagtactgggtgtccctgcccccatgctggaagaggatgtagcggacaccccgggggtagtctgagaaggtgtaggagacctctgtccatgtggcattgttccactgttggatggtcacaggtgggggctcgaaggaggccaacacgaagtagtcagccgaggccagctgcactttgagttggtaggtgcagccacagtcggctctggcagcaaaccagtccttaaccacgatgtccggccggaatgtgtctagtagctcctcccagtagccctcggctacaaggtccgaattccaccgcactggactaatgat

SEQ ID NO: 63647 - DNA, 1846 bp, Homo sapiens
tgcgcgcgggtggcggcctggggcggaaaactgcgacgggggctcgctgtcagccgacaggctgtgcggagtcccggccccttggcagcggcagtggccggcgcggccctggcaggagcaggagcggcctggcaccacagccgcgtcagtgttgcggcgcgggatggcagttttacagtctccgcacagaaaaatgttgaacatggaataatatatattgggaaaccgtctcttcgtaagcagcgcttcatgcagttttcttcactcgaacatgaaggagaatattatatgacaccacgagacttcctcttctcagtgatgtttgagcaaatggaacgtaaaacttcagtcaagaagctgacaaaaaaggacatcgaggatacactgtcagggatccaaacagctggctgtggatcaacttttttcagagaccttggcgataaagggctaatttcatataccgagtatcttttcttgcttacaatcctcactaaaccccattctggatttcatgttgcttttaaaatgctggatacagatggtaatgagatgattgaaaaaagggaattttttaagctgcagaagatcataagtaaacaagatgacttgatgacagtgaaaactaatgaaactggatatcaggaagcaatagtgaaagaacctgaaattaacacaactcttcagatgcgtttctttggaaaaagaggacaaagaaaacttcattataaagaatttcgaagatttatggaaaatttacaaacagagattcaagaaatggaattccttcagttttctaaaggtttgagtttcatgagaaaagaagactttgcagagtggctactttttttcactaacactgaaaataaagatatttattggaaaaatgtgagagagaagttgtcagcaggagagagcattagtttggatgaattcaagtcattttgccattttacaacccacttggaagactttgctattgccatgcagatgttcagtttagctcatcgtcctgtcagactagcggagtttaagagagctgtgaaagtagcaacaggacaagaactctcaaacaatattttggacactgtctttaagatctttgatttggatggtgatgaatgtcttagtcatgaagagtttcttggggtgttaaaaaacagaatgcatcgaggtttatgggtaccacaacatcagagtatacaagaatactggaagtgtgtgaagaaagaaagcattaaaggagtaaaagaagtctggaaacaagctggaaaaggtcttttttaataaaagatataatagtatggcaattatattgttccaaatgtcaaaatttgtgattttttagaagtacttgctatttatcttcttaagtcttcattgatattctgtgtgaaataagcatgtcttgtacttgctttctgattcataattttatgaaagaacttagtagaaagaaaagtaagtataaaaatagatattggattctgtcagaaggcctagatttgaaataatgttttgtacttcggtaagatggaaaacttagtgattcactgatttcttagacactctaatatgatatgctttctggaaggataaaacgaatacatatgggaaaaagtacttgagaccaaggccagcatcaattccagacatcttcatgttcctaataggctaaatgaagttaaaaacttatttcagatttttctcatctgtaccttatatctcataaatttattgtatattttatgtcagtagcttagctgtttattgtctttaaaataacatgtaaacttcaatgttctatctggaagcagaataaaatatttacatagatacaaaaaaaaaa

SEQ ID NO: 63648 - DNA, 952 bp, Homo sapiens
gtttttaaattctccatgaagtgtactatgttccatcattccttcccaaagccaccggaagcattccttctaggaaaggtggagtcggtagtgagaagccggaggtgcccctacagacatacaaggagattgttcactgctgtgaggagcaggtcttaactctggccactgaacagacctatgctgtggagggtgagacacccatcaaccgcctgtccctgctgctctctggccgggttcgtgtgagccaggatgggcagtttctgcactacatctttccataccagttcatggactctcctgagtgggaatcactacagccttctgaggagggggtgttccaggtcactctgactgctgagacctcatgtagctacatttcctggccccggaaaagtctccatcttcttctgaccaaagagcgatacatctcctgcctcttctcggctctgctgggatatgacatctcggagaagctctacactctcaatgacaagctctttgctaagtttgggctgcgctttgacatccgccttcccagcctctaccatgtcctgggtcccactgctgcagatgctggaccagagtccgagaagggtgatgaggaagtctgtgagccagctgtgtcccctcctcaggccacacccacctctctccagcaaacacccccttgttctacccctccagctaccaccaactttcctgctctctggccgggttcgtgtgagccaggatgggcagtttctgcactacatctttccataccagttcatggactctcctgagtgggaatcactacagccttctgaggagggggtgttccaggtcactctgactgctgagacctcatgtagctacatttcctggccccggaaaagtctccatcttcttctgaccaaagagcgatacatctcctgcctcttctcggctctgctgggatatgacatctcga

SEQ ID NO: 63649 - DNA, 4614 bp, Homo sapiens
gcgagagaacggaggaggaacgaaaacgcagaattgagcaggatatgttagaaaagaggaaaatacagcgtgaattagcaaaaagggctgaacagattgaggacataaacaatacgggaactgaatcagcatcagaggaaggagatgattcactacttataactgtggtacctgtcaaatcatataaaacatctggaaaaatgaaaaagaattttgaggatctagaaaaagaacgtgaagagaaagaaaggatcaagtacgaggaagataaaagaataagatatgaagaacaacgaccatctctcaaggaagcaaagtgtctttcattagttatggatgatgaaatagaaagtgaagcaaaaaaagaatcactttctcccggaaaattgaaactaacttttgaagaactggagcgacaaagacaagaaaaccgaaagaagcaagctgaagaggaagcaagaaaacgtttagaagaagagaagcgtgcttttgaagaagcaaggcggcaaatggtaaatgaagatgaggaaaaccaagacacagcaaaaatttttaaagggtaccgccctggtaaactcaaactcagttttgaagaaatggaaaggcaaagaagagaagatgaaaaaaggaaagcagaagaagaagccagaaggagaatagaggaagaaaagaaggcgtttgctgaagcaaggagaaatatggtagtagatgatgactccccagagatgtataagacaatctctcaagaatttcttacaccgggaaaactggaaattaattttgaagaattattaaaacaaaaaatggaagaagaaaaacgacgaacagaggaggaacggaagcataagctagaaatggagaaacaagaatttgaacaactgagacaggaaatgggagaggaagaggaagaaaatgaaacctttggattgagcagagaatatgaagaactgatcaaattaaaaaggagtggctctattcaagctaaaaacctaaaaagcaagtttgaaaaaattggacagttgtctgaaaaagaaatacagaaaaaaatagaagaagagcgagcaagaaggagagcaattgaccttgaaattaaagagcgagaagctgaaaattttcatgaggaagatgatgttgatgttaggcctgcaagaaaaagcgaggctccatttactcacaaagtgaatatgaaagctagatttgaacaaatggctaaggcaagagaagaagaagaacaaagaagaattgaagaacaaaagttactacgcatgcagtttgaacaaagggaaattgatgcagcactacaaaagaaaagagaagaggaggaggaggaagaaggtagcatcatgaatggctccactgctgaagatgaagagcaaaccagatcaggagctccatggttcaagaagcctcttaaaaacacatcagttgtagacagtgagccagtcagatttacggttaaagtaacaggagaacccaaaccagaaattacatggtggtttgaaggagaaatactgcaggatggagaagactatcaatatattgaaaggggagaaacttactgcctttacttaccagaaactttcccagaagatggaggagagtatatgtgtaaagcagtcaacaataaaggatctgcagctagtacctgtattcttaccattgaaagtaagaattaatcactctttttatcttttattctattaatttttttttccttaaaatcacttttcttcttctcttttttagctgatgactactagctcccctcccctctccctggaactttctctttcactccaactttcttactacatccatcttttctgtggcggggccaaaaaaggaaaccaggagtgccactatgctgacttcttattccttttcataacagtcttcaaagcacagctcatctaaagaatgcctacttcttttccaaataagcatcagatttatcgcctattatgcagtaacagtcaataaaatgtacttatgggggggaattactcaattattctatcagaacctattataaagactgtatttcccatagacgtttacagcaactatgtttaaaaaacaaaaacaaaaaaaaaacacccaaacctaagtagaatacattattttgcatgaaggaatgtcatttctgagctttttacacctaaaattaggctgaaatagctgagataattaatttggaacctatcaatttgagtggactttttctttagtagtacaccattttggttgttgtagtttcaaagtctttcctgaagccagatatattggggattgggagcggggtggggaaaactgtcactccctttcagaggaaaaggggaggagcatggagaaaaacaaaaattaaaggacttaaagaatggctatacagtgttgagtgttgaggatattaaacatgttatttttcaaacgtatgtaatatatattaaatttataaagcaaatttatgttgtgatcttgcctgaacaaattatattttaatgaaaaaactttctattaatagttcacgcaagagaaaacactttcaacatagtcgaaggcttcaagatctaagtgtatcagacttagggaaaaagtggcacaaccttcgatttaaaattctagtctttaaaatgagtttgtaaataattagctattacgttctattaagttgttttatattttaattttctggaagacaattttattttacaacgtgaacccaaataaagtaacttctggatttaaaagtctttctgtattttaagacttgtgcaaccagatgttacccttttatcattaaaactttttaaaatcattttttctcacagtaaacataaaaaaaaacccagtcaagtagaaaattttaccatgtaatatatgtataaaaaacacaaagcactcctttttaaaagtcatcaatgtacatttattgaggaaaccataatgaatacaaaattacagcaatcatgtgaccttttacatacaatgtcattaaagcaaactctaaaccacagttgtaaagtattcaatttacctcaagtccaagctgcatctccctaagacactgttcccatcacagtagccattttaagccaatcttctttttacacacgggtagtttctgtagagaacatttttctcaggacgaaaatgcatcgagcatgcataagaaaatatatatatatatatgcgcaaatacatttaagagtttctataggggtatcactgaagaaaataaaaccctgggatttatttgcttattaaaagccccaatttaaaaaaatccctcaaaagcttatattgtggcaagaaaaatgaagtcactaactcaacaaaaaataaggtaactttcagagccaaaattatctttaattaggtattgttataatgcattttaaagtgaggcagagtttgcagaaaataaaaacaagacatcctcactgattagtaaactctacatcattattctacacaacagataactttctaagtacagctgattttactggcagagtattcaaacaaataaaatgctatcacttctgaatgactcccctttccctctgaaagtactctgctattcctacccaaacccacccttatgaattaactaccaagataatttgtttaaaagatatattttacaatgtttataaacaactagtatcaaattactagttttagtattaaaaccattttttatattaaaaaataaaactatacttctcatttctaaaagaaacatcaaaccatagaattctaagtatcaccacactaagctgtcttaaaaaaaactaaaaacattgtcaaatttttgtttaagtgctaaataagtcagttcagtttcaatctaaactatacattgtttctaacactaatatccaatgcattcaaatcaactggctcaccttttctgctttccatttatttcagacttaagatcagcgtcatttaaaataatgcttatagtatcagtgaaggcttatggtaatgaataaaagaattctcatgagacagaaacaatgccccaatatctattatcatcaatctatctgtatttttttttataaaaatgcaatctacaactaaccaaaactcaacaggctctcaagtttcaatgagcccctttatattatcaattgtacatacctatcattgactattaaaacataacatacacataaatgtggtgtagtaactatgtaacttaagaaatttaacagttcatggaacatttaagatcaagtgaatagcactttaaaatgaaaagtgatcaaaagcaggtacattacaccctataccatattatgtatgggaatacatttcatatttctcaattatgatttgccaattttaccttctacattgagcccttctatggtccatgctcatcggctcaccaatggcatacactcaaaggattcctctttatgggtaactatctcaggacctgattttatgagctatgatttggtgcttgcagcatcttcagcactgtgtgtgaaaatgaaggcagtatttttgaatatttttctttgttgcagagataagcaggagttttaaaaggatcagcacattttagaaatcgaataaacaaaactgataagatgcccc

SEQ ID NO: 63650 - DNA, 1941 bp, Homo sapiens
tcacaggagcaaggagaccagagcattctcaccacccaggccagttccccttcctcccccctggggggtgctgggtgccggacacccctccccaggggctatattagccgtgtgagtcatggtggaccggctgggaggcggcaggctggcaggcacagtgtagggttacagtccatttatgggcgcagccgaaggcagatatcagtgtcgatggcattcgctcccagctattcttaggagcctctcaagagctccacgcagcccggctgggcagcaagggacagaacaggcaaggctgggggtcaggggcaggggcagaggtgtggaccgggcaggcggagtgcctgagtgccctctcactcaaccctctctaccctttgtctgcagaggcggccgctgacagcaccagcatgtcttacagtgtgaccctgactgggcccgggccctggggcttccgtctgcaggggggcaaggacttcaacatgcccctcactatctcccggatcacaccaggcagcaaggcagcccagtcccagctcagccagggtgacctcgtggtggccattgacggcgtcaacacagacaccatgacccacctggaagcccagaacaagatcaagtctgccagctacaacttgagcctcaccctgcagaaatcaaagcgtcccattcccatctccacgacagcacctccagtccagacccctctgccggtgatccctcaccagaaggtggtagtcaactctccagccaacgccgactaccaggaacgcttcaaccccagtgccctgaaggactcggccctgtccacccacaagcccatcgaggtgaaggggctgggcggcaaggccaccatcatccatgcgcagtacaacacgcccatcagcatgtattcccaggatgccatcatggacgccatcgctgggcaggcccaagcccaaggcagtgacttcagtgggagcctccctattaaggaccttgccgtagacagcgcctctcccgtctaccaggctgtgattaagagccagaacaagccagaagatgaggctgacgagtgggcacgccgttcctccaacctgcagtctcgctccttccgcatcctggcccagatgacggggacagaattcatgcaagaccctgatgaagaagctctgcgaaggtcaagggaaaggtttgaaacggaacgtaacagcccacgttttgccaaattgcgcaactggcaccatggcctttcagcccaaatccttaatgttaaaagctaaaaggctgcctggaatccccccaccccaacaggctggactccctccatccttacccccacacagatctggcatgtgagccccacggtgatgcttgacaatgtataactctgctgggggcacctctgatggccaaccgcagcatttctgtcctctgcccaccccagagctgatgctggggcccagccccctgcagctctgtacccaccaaacctccccagggcaaccctcgccaccccccaaatagcccgtagcccaatcccctgccctctgcacagggccttagctgtagaccagagagggcaggaggggtttgctggcataacaccccagaaccaagggaaatggatgggccgctgctcagtttcccaccatcctcagctcctggcctcatcccctcctagaatgagtcacccgtagatcagggtctggggaagaggctgatccctggcgctgcccggctccctcgctgccctctggagctcagggcagcccggaatagggctctttgaagaggaagtagaagccccagggtaatgaggcagagacccctcctggcagtggtgaggtgggggcatgcaccctcctttctgtaccgtgtgtgctggctccatagttctctcttctgtacatataagcatgcttgttctgaaataaagaagatttgaagtgaaaaaaaaaa

SEQ ID NO: 63651 - DNA, 2674 bp, Homo sapiens
gcgcattgacccctagaacagcgctcgaattgccgcgtcgacccacgcgtgcgaacccacacaatggccagcgataccagcagcctggtgcagtcccatacttacaagaagcgagagccggccgacgtgccctatcagactgggcagctccaccccgccatccgggtggcagacctccttcagcacatcacacagatgaagtgtgcggagggctacggcttcaaggaggaatacgagagcttctttgaagggcagtctgcaccatgggactcggctaagaaagatgagaacagaatgaagaacagatacgggaatatcattgcatacgatcattcccgagtgaggctgcagacaatagaaggagacacaaactcagactatatcaatggcaattatatcgatggttatcatcgacccaatcattacattgctacccaagggccaatgcaggaaaccatctatgacttctggaggatggtgtggcacgaaaacactgcaagtatcatcatggtgaccaatcttgtggaagtgggaagggtcaaatgctgcaaatactggccagatgacacagagatatataaagacattaaagttaccctaatagaaacagaactactggcagaatatgtgataagaacatttgctgttgaaaagagaggtgtgcatgaaatccgagagatcagacagtttcacttcactggctggccggatcatggggtcccctaccatgccaccggcctgctgggattcgtgcggcaagtcaagtccaagagcccgcccagtgcaggcccactggtggtgcactgcagtgctggtgcagggaggactggctgtttcatcgtcattgatatcatgttggacatggccgaaagggaaggggtcgtagacatctacaactgcgtcagggagctgcggtcacggagggtgaacatggtgcaaacagaggagcagtatgtgtttatccacgatgcgatcctggaagcctgtctttgtggggacacctctgtgcctgcttcccaagttaggtctctgtattatgacatgaacaaactggatccacagacaaactcaagccagattaaagaggaattccggacgctaaacatggtgacaccaacgctgcgagtagaggactgcagcatcgcactgttgccccggaaccatgagaaaaaccggtgcatggacatcctgcccccagaccgctgcctgcccttcctcatcaccatcgatggggagagcagcaactacatcaatgctgccctcatggacagctataaacagccttcagcttttatagtcacccagcatcctttgccaaacacagtgaaagacttttggagactggtcctggattatcactgcacatccgtagttatgctaaatgatgtggatcctgcccagttgtgtccacagtactggccagaaaacggagtacacagacacggccccatccaggtggaatttgtctctgctgacctggaagaggacatcatcagcaggatattccgcatttacaatgccgccagaccccaagatggatatcggatggtgcagcaattccagttcctgggctggccgatgtacagggacacaccagtgtctaagcgctccttcttgaagctcattcgccaggtggacaagtggcaagaggaatacaatggcggggaaggccgcaccgttgtgcactgcttgaacgggggaggccgcagtgggacgttctgcgccatcagcatcgtatgtgagatgctccggcaccagagaaccgtggatgtctttcacgctgtgaagacactgaggaacaacaagcccaacatggtcgacctcctggatcagtacaagttctgctacgaggtggccctggaatacttgaattctggctgatggtgtaaacagctctgcaaacaatccctttcataccacaaagccaagacgttccatggtatttgtgcaaaagagatgaagacttctcaatatgcttattttgctttgcataattggctctttttaagagcccaagaaagtgtttctaaaattgcttgcactgcccaatcccagtaatgctgctgcctgacagaaacacacacacagccacagttgccaaatcccgtactccttgccaccggcttcctagagcagcgtagacagctggtaaactgaagagcacaactatattcttatgaaggaatttgtacctttggggtattattttgtggcccgtgaccctcgttattgttacagctgagtgtatgtttttgttctgtggagaatgctatctggcattatggtaatatattattttaggtaatatttgtactttaacatgttgcataatatatgcttatgtagctttccaggactaacagataaatgtgtaatgaacaaagatatgttgtatgagtcgtcgtttctgtcagatttgtattgtttccaagggaaaagcttgggggaggactcagttcacaaaatgcaaaactcaacgatcagattcacggacccagagcttttccatgtgtttatattgtaaatatttttgatttcatcgaaattatttattcattaaaagaaatttttgtgaagcacagtgagtgacaatcatttttcttaaggcctggaaacgattttctgtatgatgttactttatgtgaattctcatctcaataaatgatgacccgtg

SEQ ID NO: 63652 - DNA, 1247 bp, Homo sapiens
ttttttttttttcagtggccattggagatgtttattacactgcttcggctggacacgcaaccatgtgacactaatgtgtcatagaaggtctctgagcactttggctcattttgaatataatttttaaaaatatacacaaggctggctttccaatgtttaaaatcattgtagaaaccaacaggttgaacagaaatataaaagtacagaaaatggttttcctgctttggtgttggttgtggcggccgaggaacgtgactgctgctgtttacacaagtccagacgctgccagggcctgttgggatcagctcagtctgcgactaaaacagctggatcatcgactctcttgacttgccaacaccaacccatttgactgagagagcagaaaagactgttatgatacacactgcgactcccacgtgattctccacaaagcggatgtagttctgggcctgtgggggcaggtcctcccacctcctggcgcctgtggtgtctgctttccacccaggcagcgtttcatactcaacttcgaccttctgaagcatctcctggttagctgggaaatagggaatccttttcccgttcagcttgtatgagacaccgactttaacctcacccagtacgtccaggatgtccagcttcgtcagggccagcgcagtgaatccgttgaccatgtgagcatatcttagaatcatcaggtcgagccagccgcagcgcctcttcctgcctgtggtcactccccactcgtggccgcgggtctgcagcaggcctccaatctcgttgatctgctcggtggggaaggccccgatgcccacacgtgtggtataggctttcaccacgccatacacgtcacctatgttctgcggggggatgcccaggcccgtgcacacaccgcccacggtgcagttggatgaagtcacaaaggggtaggtcccgaagtcaatgtcgaggagggcggcgttggcaccctccaccaggatcttcttgggggggccgtggagtgcctcatacataaagtaaacaccatctcggaccatgggtctgatccgctcagcaaagcccttgagccttttgagttggccttcaatgtctatttccagggtggggaacatcgactggtgctggtgggccaggttcttgaatctggaggaaaactcatcaaaatctgacaggaggtcgcagatgcggaggcctgtccgggcagctttggaagagtaggttggtccgattcccttcttggtggtgcctat

SEQ ID NO: 63653 - DNA, 201 bp, Homo sapiens
aagaaatgggcaaaggtatagacagcctatttaatgaaataatagctgaaaacttcccaggtcttgctagagacatagacatttggaagctggaaactcaaggagtcccaaatagattcaatctaaagaggtcttcccagagacaaatgatagtcaaactgtcaaaagtcaaaaacagagaattctaaaaacagcaaaaga

SEQ ID NO: 63654 - DNA, 524 bp, Homo sapiens
gacggggtttgaggagctttgatacaaaaccccccggaggggaggggtcaaaaaaagaaaagtgggggaagagagaaaaagcaaagaaaagacacgatgcacggagaaaggagcagctgaaagtggcctggactccagccctggctgttgtctggtgggtgcgggatggtgagacagtgcttgcggcacatcgtgggggtcgtagcaggcctgtggctggggaaacaggctgaagaagaccactccagggtggacgggctggggacaggggctgcttgagatgacagcagagccgctctcagggccaggcagggggagtagtggctactgatactcaatagggtcatcacatgagaggacagcaggcacttgtttcatagaagtccatgccatactccttcgccagctgctgcccttgctctcttcccacctgccgtttctgctcctcatcagccttattcccaataaggatcttctggacgccttctggtgcgtactcatccacgtcactgacccacttcatg

SEQ ID NO: 63655 - DNA, 1216 bp, Homo sapiens
gcgcgcggccgggccccggtgtctgggaccccaactgtgacaggcgagaaccactgtctctgatcaacgtgcggaagaggaacgtggaatctggggaagaagagctggcgtccaagctggaccactacaaagccaaggccacgcggcacatcttcctcatcaggcattcccagtaccacgtggatggctccctggagaaggaccgcactctgaccccgctgggtcgggagcaggctgaactcactgggctccgcctggcaagcttggggttgaagtttaataaaatcgtccattcgtctatgacgcgcgccatagagaccaccgatatcatcagccggcacctgccaggcgtctgcaaagtcagcacagatctgctgcgggaaggtgcccccatcgagccagacccgcccgtgtctcattggaagccggaagctgtgtattacgaagacggagcccggatcgaggccgccttccggaactacatccaccgcgcagatgccaggcaggaggaggacagttacgagatcttcatctgtcacgccaacgtcatccgctacatcgtgtgcagagcactgcagtttcctcctgaaggctggctccggctctccctcaataatggcagcatcacccacctggtgatccgacccaacggccgagttgcgctcaggaccctcggggacacggggttcatgcctcccgacaagatcactcgatcctgagggctccggcctctccttccctctgtcctccctgcacaggccgcacacacttaacgttttgttcccaaggagaccggcggaaagtagaaacctgcaatgctgcatctgggaactgacttgtgaccaggctgagaaggggagagttgggatcagacagcctgacttctctgcagggttttatacctgaccatgaacccccaggatggcgtggggtttaaggtgaaagcgtctcacgcacaagtcaggcctgttgtggggacctgaaagaggcctgacccagcccaccatgttcgcacccacagctgacccgtgctgagggtccaggctccattggcaaagccggtcaggcacgagggcgactgaggcacgtggatgaggagggcacccaggttctgttcacaactcacttcacttcatacatccttttaatttcttaaaaccctcttgtcccttaaatatttgtcaattaaagattttctggctgggcaaaaaaaaaa

SEQ ID NO: 63656 - DNA, 1559 bp, Homo sapiens
agcggagaggcccgaaacagagcagcaggtagcttttctctgctggcaccctggagacagcctcggctgcggggcccctgccttctagtcctccccagctttcaggacaccttgacaacctggggtccctgcagaagtggcccggctgtcccccaagtctcctgaagctatctgggtagggtgggaggcagtgctgtgagccacaaatgcaaagcagaggggacagatgttgggactcaaagacatgaggtagagctggccccatgggtaggtgccaccaccagagcccatgaggcttcgtgttctagaaggtggtgggttagtgccgcactgagggcgtgtccgggagggagcatgtgtcaccagggctcaggaaacagcatgagtcatgacgcgggggtgtttaaggcattcgtgccacagcggggacctcggagctatgccttgataaggcaagtgaggttacatgtacgatgatgcggtttgtgctgcagactggaaaaaagcaggggctttgtcctctcctgaccccctcacactctgccttcacggtaggctcctgagaggggggtctccaaggagggtgtcagtactgcagcttcagctggcgtggatggggtgcttacaggagcagcagggctgagggagatgacagcagtacgaaccgtggctctcctgaggcctgggtttcctcatatgtaaaatgggggttgcattagaccatacccttggcctgtgtttaggcaaatagggatgaaagtggggccaagggctgaagagctgggtccgctgccgtcgttgcccttctttcttgccaggtgagtgacttgcgcaatcaggtctacctggaggatggactggaccccttcccaggcgagggccgtgtggtgggcaggcagcggatgcacaaggccttggacagggtggaggagcacccaggctccaggatgactgctgagaaatttctgaacaggctccccaagtttgtgatccggcaaggcgaggtgattgacatccggggccccatcagggacaccttgcagaactgctgcccattgcctgcccggatccaggagattgtggtggagacgcccaccttggccgctgagcgagagaggagccaggagtcacccaacacaccggcacccccgctctccatgctgcgcatcaagtctgagaatggggaacaggccttcctactgatgatgcagcctgacaacaccattggggacgtgcgagctctgctagcgcaggccagggtcatggatgcctctgcctttgagatcttcagcacattcccgcccaccctctaccaggacgatacactcacgctgcaggctgcaggccttgtgcccaaagcagcactgctgctgcgggcacgccgagccccgaagtccagcctgaaattcagtcctggtccctgtcccggtcccggccccagtccctgtcccggtcccggtcccggccccagtccctgtcccggacccagtcccagcccccaataaagcacccgccccctcaaaaaaaaaaaaaagggggggggctgttaagaagatccc

SEQ ID NO: 63657 - DNA, 2150 bp, Homo sapiens
cgggccgagcagtgggctgatgctgccgacgtctctgggcctgacgacgagccagccaagttatattctgtgcatggctacgcgtccgccatctccgccggcagtgctgcggaaggcagcatgggcgatctcagtgagatatcctctcattccagtggttctcaccattcaggaagcccttcagctcactgttcaaaaagtagtgggtctctggattcatccaaagtctacatcgtgtctcacagcagcggacaacaggttcccgggtccatgtccaagccctaccacagacaaggggcagtgaacaaatatgtcatcggctggaagaaatcggagggcagcccaccgcccgaggagcctgaagtgactgaatgtcccgggatgtatagtgagatggatgtcatgtccacagcaactcagcatcagacagtggtgggagatgctgttgcagagactcaacatgttctgtctaaagaagattttctgaaattgatgcttcctgacagccccttagtggaggaggggcgaagaaagttttcgttctatgggaacctgtctccaaggaggtcgctttaccgcacgctgtctgacgagagcatctgcagcaacaggagggggtcctcctttggcagttcccggagttccgtgcttgaccaggccctgcccaacgacattctgttcagcaccaccccaccctaccacagcacgctgcctccgcgggcccaccccgcacccagcatggggagcctgagaaatgagttctggttctccgatgggtccttatcagataagtccaagtgcgcagatcctggcctgatgcccctcccggacacagccacagggttagattggacccacctcgtggatgctgcacgggcatttgaagaccagagggtggcatccttctgcaccctgacagatatgcagcatgggcaggacctggaaggggcccaagagctgcccttatgtgtagatccaggcagtggcaaagagttcatggacacaactggggagcgttctccatcaccactgaccgggaaagtcaatcagctggaattaattcttcgacaactccagaccgaccttcggaaggaaaaacaagacaaggccgttctccaagcagaagtgcagcacctgagacaggacaacatgagactgcaggaggagtcccagaccgcgacagctcagctgcggaaattcacagaatggtttttcaccaccatcgacaaaaaatcttagccaatccgcacctcatcaagggaccactgggaaatgccccttgtccctttgaagtcacaaacatgtggtttttctgtgtgctttcaaccaatcgtagatgtttttgctgttccattctgtgtagcaccattcaccacagcaggatagggagcctcgactctttctcggtaaccacggcagagagcagcgccgatgtgaagatgaatgaatgtaactcctggtgtgaagatgaatgtaaaccctggcgacagttgagacctttttcttttagactctgctaaaacagtgctctggcttgggcttacctcaagagggaagatagttgagttttatttcctgtatatcaggtgacctggtagagatgtaaagcaatttaccatagtttgggctttagtattgtaaaataaacatgagaacaaataatcagacatatactttaatgttaaaggtgctctatttttttggatgtacagtagttttatttccacagccacattaccatagcaataagaaaggaggcatagtacatagttggaaaagctttgtggggggattaaaaaaaaaaaaaagcactgtggggtttaacactagttcagatgcagttaccttaaaaacttatttatttgcaggaacaaagggggcctgaatattaacagggttctgattaaaaaaaaaaaaaagatacatatgccttgaaaagggctcaccgaggggccagtagtcacttcaactcttagttcacttttgtatagctgctctgctggaaaaaaatgaaagggaatctgcttactccctaaaacttccctgggggctgggagccagcggaaccacttgtacaatgccagatttgtttatttttgtccaaaacctttgatgaagggccttgtatttaacccccttatttaagcttg

SEQ ID NO: 63658 - DNA, 601 bp, Homo sapiens
tttttttttttttcagcgggaaaaatgtggatttaatggaatgaaggatgaaagggcccgaagccagcaagtctcgccccacctaccagcccccacccagcttcccaagggtctcagagggacactcttggcactggcctttcacatctgttcaacaacccctgagctgaaaagttgcagtgggaggcctccagctcagcaggtggactccaaaatacccctcttgtcttatccactccaggtcgggggcagggaagcacatggggctgcttctgccacgttccctccacagccatccccaaggccaggcacacaggcaccatccaagggcctgccccctagcagtgagactctagctctgtgagtctgagcagtgaggtcctgggggtggcgggagccgagggtcctgctgggttccgctggggcaggtcctcggctgggcacatgagctgacggattctctctctgaaggggcccttgagggttccgagtctgtagaggctccaggcaggaatgcagaccatggaggacagagccaggagccagcccagggcatcgccccaccacgggtacgtgtacttcttgttgtaggtcagcggag

SEQ ID NO: 63659 - DNA, 2633 bp, Homo sapiens
caccacgcctggccaacttttgtgttttcagcagagacggtttcaccatgttggccaggctggtgttgaactcctgacctcaagtgatccacccacctcaatctcccaaagtgctgggatcacaggtgtgagccaccactcccggccaataatatctttaaaactaaaaaaaaaaacagaaaattgataagtaaaatgacttttactattgatatcagttttgtttaatctgaaactataaaatagagatatatctacctatttatggatggataataccatcatctcatatttgtggaatgctttatagtttttcaaagtacttttattcactttatcttccatatatgttatctcctctgattccagcaataacagcccggtgaggtagccagggcaagtatgtttttttacacattagcaggaagggaggctaagcgaggtttatgtaacttactcaggctgaaacactgaagaaaaatttgtgactctcatttcagtgatgttttctgcattattaaaaaatattatgctactcctcactatattatgttgatggttgaaatgtcattataaagcttaatttatatgattctcttgatgaggatgatgaagcaaatgctccatcaactcactagtttacaggggcaagcattttcctacatttcacacataatttgattacctctgtcctaagtgaataatctactatctgggtatgagaaacatgatttgaaaacactaaaccactatattatttcaacaaagaaccatctttcacacctaagtaaaaaggaacttcaaaaaaagtcctaaccaaaaaaaatccaaatgatgcatgaaatcaaagtcaaaaattggggtatcttttaatctgtttcttcgttgtggtgaagaatgttgcctggattccttccatctaaagacttgattgttagacctgtggcagaactctagatctgactttagccttggggaagcaaagaggacaaaacctaaaagctcaactttctgcatggtatgcatgattcaatgagctctttctgctttggagtctgttggcttggagactcggatatgatagggcttcagttcctcaggagggacagaatctggggtattgctcatgaggtcatgtccccggaaggactttgggaaggctatgacatctctgatgcttggagatccagtgacaaggcatatcagtctgtctaaccctaaggcaattcctccatgagggggtgccccataatctaaagcctggagcagatgggagagcattttcacatcctcctttagtaaggttgccaggatataacgctgcagctctgcattgtgaattcgaattgaaccacctcctatttcattgccatttaaaaccaagtcatagtgttggctacgggcctttttgggctcagtgtacaggagatgtatgtcactggggtggggagcagtaaatgggtggtgggccgattccagctctctgggattttcctccttgggcaggaagagtgggaaatctaccacccaaaggaaagagaacagagtggggtcacggagcaccactcctcttgtttctagaaggtcagcacattccagtcgtaattttcctaacaaagagcatgctttattgtgctctccagcagttagtaggaccacatcttcctcttgggtctccattagtctgattaattccagtctttgtgactccattatgaaattagcaactggagaattccagtttctattggcgttaaggaatacaggtaagatttcctgattaaaatggtcagctgcaaagtttctaatggattcaatgtctttcctttttaagtattttgctccttcagggatacatatggctttcacagttccatggggcttactaagtgcatcttgaagaaatccaatctctgtgtttctaaacacatcactgatatctataatcttcattccaaagcgagtgtcaggtttatcagttccataggtggccagcacctcagcaaaagtcatagtaggaaaaggaacaaccacaggatctttgtcattgggccaggaatactggagcaaaccctcaattaaactctggatcccagtctggtctacaaatgacatctctatgtcaatctgagtaaactcaggctgtctgtctggtcttgaaccttcatctcgataacatcgggcaacctgaaaatatctgtctaaaccgccaaccatcagaagttgcttaaactgttgaggactctgagggagagaataaaactttccaggttccctggatggtactaaaaactctttggcaccccctggggtcctcttaaacaatgtgggggtttctatatccacaaacccatgcagattacagagatattcccgcattttcatgaccatctgggacctcagtcgcaggttatactgcatttggaaactacgcaagtctaagtagcgatactgcaaccgaagagcctctgttttcttcacgaagttcttaatttcaaagggcagcttcttgcaggcattcagaagctcagctgttttaactttgatttcaatctcacctgttggcatttttggattctcttgtcctgcaggacgggaaatgactgtaccagacacttgcaccacagattcca

SEQ ID NO: 63660 - DNA, 2644 bp, Homo sapiens
ttttttttttttagacagggttttgctttgttgccccgggtgaattagactttgggtttcaaaaaaaaaaagggtcaggggaggaagagctgtcacttcagtgttaggacctgagctccttgctctgcacaacagccccagtgtttcaggccccctcccagggagggcatcagggagggtgggaaagggggctgggttatgggaagttcattcttctgccagatagtctttcggctgctcctttttatcttctgggtcttggcttgaaggtcacctgcccagagaggccctccctgaccccgtagggtaggtcctcagctgtctatctatctcctttgtagcatttcctatgacctgcagtcacttcacttacttgtcagtttcccttaccatcgctttctcccctcttgaccccttgactgcagggcttatgactgtctcactctcagcggtgtccctggcctctagcccagtgtctggtccgttgcaggcactcaccaagcatctgctgaatgatggaacagacggacactcaactggggtggccaggagacggcaggggcgagactctcctttgccttttttgggctgtgtgacctcaggcaagttgctgctcctccctgggcctcttcccaatctaaacctgagtataaataaacaactgcatctgaagggctggcctcatgcttctcgaatatatcaggaccgatttcaggggaggtaatagaagttggaatcgtttactaaattataccttaaatcaactgctggctgattattatttctgatggtaacattgcaatggtttttctaggagtcactgatgtgcaatgagcccaatcatatttcttattcaataaactcttttattctagtccacagatttttccattacaataataatgaaaatagcactagtaatttgtaacactgaggcccaaagggaaacccctcctcaaattataaggtaaatgacacaaagttgaacatagggtcagtgttgggcaaaaagcatttaaaatatagataacggggtcaagattttgtgtgtgtgcaaacactgggttttgtttttcaggatgacaccattttagaaagtgcatgattttgaaaactatatgtgtaattgtgacaaaactaaactgtagagaaaagacaaaatcaagcaaaaacaaaaaccaagaaaccaaaaggaagcaaatcaaatacaaggggcggatatgcaaacctccggtcctttggccctggaatggcaagtgagtgggcttcatagaaattctctgtagaaaggaatgtgtgggccagtgtggccatggccctggcctgacatcgctgagtctccaagtcttgtctcctcacagaggaaaagaagttgcttgtccgacacatctgctgggggtctgcccgagatggggccttcgttcccaatccctttgagaacagtctcaaatcctgaaaaggcaaggcatccctgcggcggccccagggcggcggcaggagatggggtcagtgtctgccccaggctctgccggagctgtctgagtggttcaccgggagtgggtgggcctcggtgttgaacacccagtcttccagggagagcaagtcatcttcagagaacagaagatagagatactttagtgtctccgctagaaagaagctctgctgcttgttgtcgtggttgggggtgctactgtacacgtcttggatcccagagaaaccggcttctgtccgacagtatttctccaaggccagcaccacctcccagccccactccctgtagatggggttgtgggtctgtcgccacaggtacatgtagctctccaccacctctggccggaggatgtagtagctctcgctcagctgggtggccacggcctctctgccggagttaaaccagaaggcctcaggcccaagtttggtgtctgagcgggcgtatgactcgtgacacgtcttggtgatctgggctgcgagctctcggtagtgggccctcttttcttccttggcatcctcggcgccaagggcgatcatgcccccggagaaacaggccaggtgccccatcttgtggtccagaatcccccctcgccactcggcaatgtaggtcagccccccgggagagacattcagcaagtaggtctctatcgcctccaaggcttcgtagtacatatttttagcctccatatctgtcttgcccgacatcaaccaggatttgatcaaatattcataaaaactgtccccgagtcctccaactgagacatggtgttgcacccagttcccactcactgggctgaggaagttggggtagaggccaaagggcttttcgatcttcctgaggaccttgcggatgttcctgaccttttcagcgaagacctggttgccagagagttcagtgaggtgtaagaattccaagtgcagggatccaaactccgccaagatgctgctgctgccggctgtggcccagccccagttcccacttttgaagctcaccacgccctttgggattcccgtgggggtgttgaacgccggcaggagcttctctcccagcctgatggcctttattcggaacacctcttctcctgtcaggtagaaggctgagaggagtcccccgatgtagcggatgttcacctcaaacaaggatgcttctccg

SEQ ID NO: 63661 - DNA, 1542 bp, Homo sapiens
ttttttttttttcaaatgcgatttattgtacataaaataaattaattacagtttaagccaaagcatgagtggctttttaaagtgcatctgtggaggggatgtggcaggtagcccctgttcacttgctgtaagataagtgttttagtatttcagccacccttaggcacaactcagccaggcctaggaagcaacccaacgtcattgccatgaaccatttacacaagtcacaccaaaatcaactgacacatttttttcctgatggaacagttaaaaaaacaaaaaactatacagtcaaagtctggggttgaagagcgtgaagttcacagctcctccacacacgcccaactgagcatgctcatcctgtgagggggaaccagagccttcctgtaaaccatgagagcttaccaatgtctggtatacaaaatattctggcccataaactcaacctgtttttgaggggtaggggattttccatcttgtacataaagaaagaaatctgggtatccttcaggttagaaaggcattctgtaagaatagtgttccagagttacaaatcatactggtaagagaaaagcaattcttcctcttggggaaaaagaggaaaagaaagaagaaaagagaaaaaagaaaaaagggggaaaaaagaaagcctatcaatgcttaatctgttctttcattcccactgtaaatcacatccaatacatttggtgaaacttgcaacgggaccaccatttacaaggtagttgaatgcagaaaccgaaacggattatgccccctccccactctaaaggaaaagacacagagtacatttcacatattcagagagtggctcagtgggctctttcaagcctcatcaatcctgtccccctgctcagaacaacacttccttttctgtagcagttccacaggccctcttggcccttctgctccagccctttctggaaccaggaatcattgccaatattcaacgttcctgcactaggagaacctcaggccctcttcctgggaagaccaaacccccttgagtgctcctcctgcttcagacggaggtgacagtcctcactttggcagagagggcttgcttaaacctcctcttcaggtcctgcatgttgggtgacttgggcctgggaatgagggaggttcttcgcttctcgggtgtactgctaggctgctgtttgtgactgacctctttacagaggacgtggaaggcgctgtagacatcattataattttcactgacagacacttcatagaatgagcagcctagcatgctggctagctgcagtccaagctgagggtcaacctgtttgatgtgcaacaggtcagctttgttggcctcgaccaccacaggcagccgggtgcccaggtgtagcttctgcacgtgctggtggagctggctgatgagttcatagctcttgtagtcagtgatggagtaccccatccccccagcatgtgcacagccaatgcactatattaagctgttcactgcagctcagcctgttctcatggtcctgaatacgtggagtgtgttgaagctgtcag

SEQ ID NO: 63662 - DNA, 1321 bp, Homo sapiens
ctcagccgctcagctctccctgtgcagccgcctgcagctgaccctgtaccagtacacgacgtgtcccttctgcagcggggtccgagccttcctcgacttccatgccctgccctaccaggtggtggaggtgaaccctgagcgcagggctgagatcaagttctcctcctacagaaaggtgcccatcctggtggcccaggaaggagaaagctcgcaacaactaaatgactcctctgtcatcatcagcgccctcaagacctacctggtgtcggggcagcccctggaagagatcatcacctactacccagccatgaaggctgtgaacgagcagggcaaggaggtgaccgagttcggcaataagtactggctcatgctcaacgagaaggaggcccagcaagtgtatggtgggaaggaggccaggacggaggagatgaagtggcggcagtgggcggacgactggctggtgcacctgatctcccccaatgtgtaccgcacgcccaccgaggctctggcgtcctttgactacattgtccgcgagggcaagttcggagccgtggagggtgccgtggccaagtacatgggtgcagcggccatgtacctcatcagcaagcgactcaagagcaggcaccgcctccaggacaacgtgcgcgaggacctctatgaggctgctgacaagtgggtggctgctgtgggcaaggaccggcccttcatggggggccagaagccgaatctcgctgatttggcggtgtatggcgtgctgcgtgtgatggaggggctggatgcattcgatgacctgatgcagcacacgcacatccagccctggtacctgcgggtggagagggccatcaccgaggcctccccagcgcactgaatgtccccgcgcagagcagagggaaggcagcggaagacgccagctgccagggcctggggccactgggccagcgcctggcgatactggttgggggcaggatcattctgccccttgtccacgcacccccaccagccctctcgcttctaacacagggcacctgctggggctcagggatgttagggacgagttccagccctgccactgccctggggcgacccctccctgtccctgcctccctgctctgccgcccctcttcctggaccctcagtggctgtcccatggctacatcctgtgggtgggggccctcgacaggacagcaggacggtttgttttcagtggaatcccatccctgggttcccctggttcccactcttcccaagcctcccgggactgggacatgttttgcaattaaaggaaaggtttgtggcgcctgtcatggcaggcatctcatgg

SEQ ID NO: 63663 - DNA, 1966 bp, Homo sapiens
gcagatttaccattttccagtgagtttttcactctatggtataactggcttccttccaagcaaatgccttgcaaaaagaatgaagaaaatgaggactctgtatttcaaccaaaccagccgttagtagattctatagacttggatgcagtgtcagccttacttgcaagaacatcagctgagttgttagctgtggaacaagaattagcacaagaagaagaagaagaatcaggacaagaagagccaaggggcccagatggagactggctaacaatgctaagagaggcctctgatgaaattgtggctgaaaaagaggctgaagttaaattgccagaggacagtagctgtacagaagatttaagttcatgcactagtgtgcctgagatgaatgaagacgggaacaggaaagaaagcaactgtgccaaagacctcagaagtcagccacctactagaataccaacactggttgacaaagagacaaacactgatgaagccgctaatgacaatatggcagttcgccccaaagagcgcagcagcctgagctctagacagcatccgtttgtgaggagcagtgtgatagtgcgctcacagaccttttctccaggagagcggaaccagtacatctgcaggttaaatcggagtgacagtgacagttcaaccctggctaaaaaatcactgtttgtgagaaactccaccgaacgccgcagtttgagggtcaaaaggacggtttgccagtcagtccttagaagaacaacacaggaatgcccagtgcggacatctctagacttagaactggaccttcaggcatctctgacccggcagagccgcctcaatgatgagctgcaggcgctgagggacttgcggcagaagctggaggaactgaaagctcagggagagactgaccttccaccaggcgtgctggaggatgagaggttccagaggcttctgaagcaagctgagaagcaggctgaacagtccaaagaagagcagaagcaaggtctgaatgcagagaagttgatgaggcaagtctccaaggacgtgtgtcggctccgggagcagagccagaaggtgcctcggcaggtgcagtccttcagggagaagattgcctacttcaccagagcaaagataagcatcccatccctgccagctgatgatgtgtgattacatgacttaagaaattattttttcatctgttcactttcttagggagggtaaaagactgaagatttgtgtttttgttttggggtttggttttttttggtaacgtaactgtcaactcttgaagaacttttatttcacatcagattttcaacacattaatttgtaaagtaccttgagtgtaatttttatatgcttaaaaaagaaaaaatcatataagaaagatgggataacctggtacacaaatgttgcccagtatgtgcgcattgccagtggacttcattttgtaaaaatggaatagaggcagtaccccacttgtgtactgttgagccggctgttgagaaacaacttggttcagccggtggttttgcttctcctttgtgttcctgtgagtaggctgtgccgatggcagcagcgccacgtggtatctgtgcgctggcgaggagaggagcgctttccatttggaggcagtgtgagcacacgctggagtgcagcgttccaaagtccgcccgaaatggatgctgcgtccacggccatcacctgtgcgggaacacctggtttccttaagacaatttcctttttgtccttttatatttttctaaagaaaactaagatataaactaccaagtgctcttaagaataaaaataagaataagaatacaaaggagcactactcttggctacacgaaagatcttgggattcatgacactgagggcagggagaagaaagaacaccagccacgcagagatacaaataagctcatcaaatgagcagctggtttgtctcactcagcctgaatttgcattaagt

SEQ ID NO: 63664 - DNA, 1946 bp, Homo sapiens
ggcacgagcacaatgtttgatgctggtgcacatatacaatacacacatgcacaacactgtgtctgcaatgatataatagggctaccaagaccaagagagtaaatatcaacttaagaacacttctaactttagaatttcattttattaaacatacttttaaaacaagcacctcttggcaataaaagcaaaaacaaaaaacaaacaaacaaaaacccaaccaaacaatagtactccttccactctatgctaacggaagacttctcacaccagccagttaaacaatgaaattcttaaacacgcagcctgctggggctgcatgcagagctaaaatgcaggtgtgctgacttcttggagctggagcagaggaaaacatcaaaaagcatatctggaatctatcacagctttctttcttaagcaaataaaaatgcaaattagtttcataaccacaattcaatttatcaaactttttctgaagaattttcatttaattatgtatacataacaggaaataaaactttttcacaaacactctcaaggcttacgattatcaagaaaatgacaaaagtaaaagcaggaggaatattaaacacatggcggggaggtcaatttccgtttctgctcttaaaaagtaaaaaaatcaccatataattaagtacaaaaacctgcattgaatgacaactgctggtgtatttacttgatcagaaatgaagaccaagaatataataaagccctatgataatattcaccgggagcactcccctcagtgtgtgtacactaacaggttggcaaagtttctggagcattagcttatagaaacacaggagtccttggttagctgcattatatggaacgttctcttctgaaatgcacccacgattcagtttcacttacaaattgcaaactaaagttatctcttcagaaaaatatctgtttggcatctcctggactttgttccattggacagtagggacattttaatttgctaccattaaacattttattcagggcatctcttgatataatatgaccacagaccaatttcatgggtggattgttatctgttgtttgctgacgaagaatggggcaggcaaatatagagtgataccagcactttttaccaaggtccacttcaataggtaattcatctttctggttccaaactccagtacactgcctctgttcaatcacggctttgatgttaattaaagctggcagcgccacacaacctgctgagaaactgacactgagaggggactccacggagagccccaggagggcacaagcatcccgtgtaaagatgtcacagatatcagcccactggtttgcatcaagtaggtgaacatatggtgagttctcaatcccttgtctcaggtacacaaggcttcccatcaaaacctgaatgtctttttgatgatttagggcaaatggctgaaaatttttagcatattgtaatgcctctcgctgatttgtggttccacccattaacaagctaataaaatacagtctgtgtagcttaaattccaaggagctgttttgagctataagcatttcccggtttgacactgcccactccagagcaggtctcagaactctgacctttaatgcctctaatattctatttaactccacaaatggttccttctgacttgggtctacagaaagaccagattcctgacagagctcctcagccacatccagcattccttgtcgaaagaagtgctccaccatcacctcattgagaagcctttggctgtctgcctgccagcagccatctattcccacactgctaatgtcagaatcaaaattcttatcaatggcttttccaacccgagaaacactgctgtggatgtctttgtggtcggaggccaatttttgaacagtatcctttattcttttacagcactgtgtcaaaacaagtgaaagtgtccctgataattcagcatctt

SEQ ID NO: 63665 - DNA, 1553 bp, Homo sapiens
ttaactttcaaaacagtaaacaattttatttatatttattgtatacatacacaagaaaaatacttatatttatttttatatcatcattttaaaattgaaattaatttgtagatatacctaatcaacatctgtaagaatttcaaaattttcaaaaagccagataagccaatttatttatttaaaactattaataggcatatcactaagattatatgacagtaaaaaaatgagaagattaacatatttgcttattagtgtaaacattattacactatatttagctttgtgtagagctttacatatcaaaatatttaatatataatactatttgttatgcaggttttctaataccttaaatttttactatgtaagcaattatttgatgaatttaccattctcaaagattgagactgaaaagcagttcactgatcttacttttcgaaccagcatctctttatttttctacagtaaattatacttttgattatagagataagaattatgagtattcatcatttttaaagaataaacatataaatcttctttaagtgtactatcaaataaattttataaactcagtaattatcaccacatatttcaaatagttactaatcccaaaaatatctgttcaccttgaatatcttactgacatgttctctatgtgagaaaaaaaatagtttcttttgttatttgatggcaatcatgagaaaggtctttttatcatcaagaaaacagaaaaaagtattggttgagtgatggcagaaatgtaggccatgacatctagatgaggtctatggaaatacagcaaacttttctaagcataatgccatgtcatcattattagcaatttattttctgagatcactgatgctggctatgtagaaaggcttatttaaattgaaaaagaaacatcattatgtttctcatagccagctaatctcatagaacacttacctgatttgtgtggtttactgaattttgtgaattttaagttttttacctctttatatccatgtgtttgggcgcacaccaggaataatcatattgcatgtcaccctatcacttaaggttatagaagtaatgacatcatcaaaacagtcatatcagaaataggaaaatttagatgtattcatgtccttgtgtcacaaagtgagagaagagagtaaagacacctaggaaaatacaacgaaagaatgagatatactcacaacctcatgatcatggaattctaggctatatagctaagataaaataacagaatagataatatgaaaatagcaaggttttcaccaaattctatgtggctggaattaacaggattaccccatcaggtctttcttgaatttggaaagatctattccctcttttctatctttctagttttattaaatttttgacaggaaaataaaaaacattttgtgaacaagaatatagcagttgccacacaggtcagcaggaacccaatcacatctatagagtagtgctggaaccaggtgaggtcatgggcagctgatcgcaggtgcttggctcctttgtggcgcatgacaaactcg

SEQ ID NO: 63666 - DNA, 2127 bp, Homo sapiens
  misc_feature (1)...(2127): n = a,t,c or g
cccacgcgtccgcccacgcgtccggagctgttcagttgtgtactccactactgcttccccgaaacagacaaatatatgagcacaacgaagctgccctattcatggaccacagcgggatgctggtgatgcttccttttgacctgcggatcccttttgcaagatatgtggcaagaaataatatattgaatttaaaacgatactgcatagaacgtgtgttcaggccgcgcaagttagatcgatttcatcccaaagaacttctggagtgtgcatttgatattgtcacttctaccaccaacagctttctgcccactgctgaaattatctacactatctatgaaatcatccaagagtttccagcacttcaggaaagaaattacagtatttatttgaaccataccatgttattgaaagcaatactcttacactgtgggatcccagaagataaactcagtcaagtctacattattctgtatgatgctgtgacagagaagctgacgaggagagaagtggaagctaaattttgtaatctgtctttgtcttctaatagtctgtgtcgactctacaagtttattgaacagaagggagatttgcaagatcttatgccaacaataaattcattaataaaacagaaaacaggtattgcacagttggtgaagtatggcttaaaagacctagaggaggttgttggactgttgaagaaactcggcatcaagttacaggtcttgatcaatttgggcttggtttacaaggtgcagcagcacaatggaatcatcttccagtttgtggctttcatcaaacgaaggcaaagggctgtacctgaaatcctcgcagctggaggcagatatgacctgctgattccccagtttagagggccacaagctctggggccagttcccactgccattggggtcagcatagctatagacaagatatctgctgctgtcctcaacatggaggaatctgttacaataagctcttgtgacctcctggttgtaagtgttggtcagatgtctatgtccagggccatcaacctaacccagaaactctggacagcaggcatcacagcagaaatcatgtacgactggtcacagtcccaagaggaattacaagagtactgcagacatcatgaaatcacctatgtggcccttgtctcggataaagaaggaagccatgtcaaggttaagtctttcgagaaggaaaggcagacagagaagcgtgtgctggagactgaacttgtggaccatgtactgcagaaactgaggactaaagtcactgatgaaaggaatggcagagaagcttccgataatcttgcagtgcaaaatctgaaggggtcattttctaatgcttcaggtttgtttgaaatccatggagcaacagtggttcccattgtgagtgtgctagccccggagaagctgtcagccagcactaggaggcgctatgaaactcaggtacaaactcgacttcagacctcccttgccaacttacatcagaaaagcagtgaaattgaaattctggctgtggatctacccaaagaaacaatattacagtttttatcattagagtgggatgctgatgaacaggcatttaacacaactgtgaagcagctgctgtcacgcctgccaaagcaaagatacctcaaattagtctgtgatgaaatttataacatcaaagtagaaaaaaaggtgtctgtgctatttctgtacagctatagagatgactactacagaatcttattttaaccctaaagaactgtcgttaacctcattcaaacagacagaggcttatactggaataatggaatgttgtacattcatcataatttaaaattaaattctaagaagaggctgggtgcagtggctcacacctttaatcccagcactttggggangccaaggcaggaagactgcttgaaaccagggagtttgagaccagcctgagccaacaaagcaagacccccatctctataaaaactaaaaaaattagttgggcatggtggcacatgcctgtagtcccagctactccagaggctgagatggatcatctgagcctcaggaggttgaggctgcagtgagctgtgactgcgccactgcactccagtctgggacaacagagcaagaccctgtctta

SEQ ID NO: 63667 - DNA, 856 bp, Homo sapiens
cccacgcgtccgactttttacagtaatcacttatttttttgtggtaattggcattgccccaatttttatcctttatgaattggattcaccactctgctggaatgaagtttttataggttatggatcagctttgggtagtgcctcttttttgactagtttcctaggaatatggcttttttcttattgtatggaagatattcatatggccttcattgggatttttaccacgatgacaggaatggctatgaccgcgtttgccagtacaacactgatgatgtttttagccagggtgccgttccttttcactattgtgccattctctgttctacggtccatgttgtcaaaagtggttcgttcgactgaacaaggtaccctgtttgcttgtattgctttcttagaaacacttggaggagtcactgcagtttctacttttaatggaatttactcagccactgttgcttggtaccctggcttcactttcctgctgtctgctggtctgttactacttccagccatcagtctatgtgttgtcaagtgtaccagctggaatgagggaagctatgaacttcttatacaagaagaatccagtgaagatgcttcagacagagcctgttaagctgctattgatagtcggagcttatatactgtgacttctgaagactatacatgaattccccaatcagtgctttgttgatacaaaatccttaaaagggaggcactttaaagaatatgtatttttcacttttcttaatatgtttcatcggtgacaggcatgataatatttctatatgtaatgggtaattgggaaaaaatagatgataaataaaattgctctaaagaagttaaaaaaaaaaaa

SEQ ID NO: 63668 - DNA, 1371 bp, Homo sapiens
tttttttttaagaagacagggatctcacactatgctgcccaggctggactcgaactactaggcccaaagccatcctcctgtgtaaaccacccgagtagctgggagtacaggtgtgcaccaccatgcctgggctttgtagcatgtttaaaggaacctaggtgatttagtcaaaagagaacactgcatgaaccaaggcctcaggtgcttcttgctgccttcatttccacagaggagaacacagggatttagaggagatggaaacattttctaggcagttattgaataacggatctttggaggagttcgtggagtagtgtaaccagaaagtctttaaaattaaacccatcttaatcgtttgtaagtgtagatggggggacttgggaaatctccggggcctaatcatggctcgcaaaaggagtgacattaatagctttggagatggtgtcttcctctcctttcccaggttaagttcaagcagtaacagcagaggttctacctccttccatcgagtctttaagctggacccgggggaaaataactgttagggaaaagaggcaagcatccaacccactcgagctgtgggctgacagtcccactgggatcgtcccatggagacaattgcaagtcttttgcatgagctaaaccccgctccacatggaaccgaaggtgctcattgtcagctaccacgcaatgccattatcacctttcagcccaagtgccacagaccaacactggctatactccaatgaggtgtggcattcgggttcttctgccttcaggtcacaacctttctgactcagctgggctacattaaacctgaagctctgtacaatgtggagagcggtgttgccttcattacaagtggtgcagcattggattttcaagtaagtctaagtgtttctattgtccttaaaatgacatatgtccagttatttaaaaaaattacaaaatacaaatgcccgtgttaatttagctagtctcagacattacattcgacaacatagaaaagccaaaagatctccagttataagcacaaaactaaggaaagttatggatcagtgacttttgtcactaatccattttcttttttaagtcacctccctttatggccttgcttggctggtttttacattgtgcatgacttgtctgttggaccctggggaggtggggcaggtcctatggtaggatttgtttttggaagaacagcaggttttggcctaagggctggaggcttcagctgcacgcccattctgggtgccaccataggcttgaaagtactcattgtgtcactggaggagctcgtgctacgtcgaatctgaggctcggagctcctgagggcaacgttgtgcaaagggctgagagattccggtc

SEQ ID NO: 63669 - DNA, 2141 bp, Homo sapiens
ttttttttttttattacaaacgccagttggttccttttttaattacatttaaaaaagacaaaggcatggagctgtatggatgacacaccttgaccactgacgaggaagatttcactcagccacgtctcagtggagtctcagaggggagggtttccacacagcacggtgccaagggccagtcttgacgctgtcatagacaatgacatgcaagccccagccctggctcgtggttcaggtggccctccaacactgagctgtcccgggacgcctgccgggctcgctgagggcagggccgggacttgctcaggttgctgggtgttcatgaaggaggatcgggtctgccagatcaaactccaccctgcagcaattagcaaggaccaggccctggtctgctgaggctccactgctggccctgggttctcggcttttcgttgtcgatgactcctacgctggcctctgaaatactccctgtgtcttagttcaggggtgaagacacggaatatctttattgtcgagaaaaaattaactttgcacaaaaggaggtgctcatcagagagcttttcaatgagacccccatgtgttccactagaggccctgctcagcccagcccgtgtcctcccagcgtggggcccaccctgctcattacgtacattgaccaagacccttcaacctcgtcccgaccccagcacgggtgttctttgccacactcttgttctagtgttttcggatcaagatgtcccagctgtctttccagcgaagggccttgagttcatgtggcgagagtgacttgtccccgtaggtgagtgggcgcagcgtgttggacacgtggcacgcggaggagtaccaggccaccaccagggcgctgaagatgctcctctggagctgggacctgcacaggtggtcgctgatgtgctgcaggaccacagggagcagaaggatttggaaggtgagtgcgggcaggtagtggtagaggaagagtgtcttctccatcaggaagaacgggaggtagttcactgcccagccaccggcacacagcgccccagccagcacccagcgcagccaggcatcctgagggaggtcatggacatttcttcgccgtcggagcaggtaccacaaggacagcagggcgtagatggccagagcgaggctgcccgaaacccagatcactatgtttccaagtaggtggatctgagcgctggtcctggggtgcagccagtaggcaatattggtgtccagggtgacccactccagtgggctggagctgtacttgtgttccgagtcatcacttctcagcgccagcatcctccactgcagctccgagaatctcgccatgaagctgaggttcctgctgacgtccacctgcgcaggtgagtgcagctcccgttcccgctccctctgctcctggctcgcgccgtatcggtgctcctccacgttccacaccgtgctcccgtggtagccccgggacagcttctccccgacgatctccagttgccgatacccccagtcagggaggtgagccccgctcagctttaagacagcggaagtgttcacgtgcacaaagcggacctctgagaggatggtcttccagacgtctgtgtcagatcctctgttcacaatttccagtctccagaggttctgggcgggcatggagatgttatagtcaatgtagcaggagacctcctgtgaatgggggctcaggggggctgcaacatcatgcgtgttcagggagcgggtggtcatgccgtggaccagctgcaccatgtccccgtgcctcacaggtctcggagggctgctcaccaccagctggtgcctcctgggatcctttacaatccaccagttattgacgtctttgaaggggtaacaggtcacctgttgctggtgggagctgcctcggccgttctcatatctgtgtgaagtcaacaaagagatgtatctgggccaggcgcggtggctcaggcctgtaatcagagcactttgggaggctgaggtaggataactgcttgagcccaggagtttgacaccagcctgggcaacatagtgagaccctgtgtctatttatgagaaaaagaaaagaaaggaaaagaaacgtatctggaagtgggtaatcgatcgggcccacacgcctttctcctaaaacgaaa

SEQ ID NO: 63670 - DNA, 1456 bp, Homo sapiens
cgacgcagtgtcgtggaattccccactgggccagtataagctgacctttgacaaagccagagaggcctgtgccaacgaagctgcgaccatggcaacctacaaccagctctcctatgcccagaaggccaagtaccacctgtgctcagcaggctggctggagaccgggcgggttgcctaccccacagccttcgcctcccagaactgtggctctggtgtggttgggatagtggactatggacctagacccaacaagagtgaaatgtgggatgtcttctgctatcggatgaaagatgtgaactgcacctgcaaggtgggctatgtgggagatggcttctcatgcagtgggaacctgctgcaggtcctgatgtccttcccctcactcacaaacttcctgacggaagtgctggcctattccaacagctcagctcgaggccgtgcatttctagaacacctgactgacctgtccatccgcggcaccctctttgtgccacagaacagtgggctgggggagaatgagaccttgtctgggcgggacatcgagcaccacctcgccaatgtcagcatgtttttctacaatgaccttgtcaatggcaccaccctgcaaacgaggctgggaagcaagctgctcatcactgccagccaggacccactccaaccgacggagaccaggtttgttgatggaagagccattctgcagtgggacatctttgcctccaatgggatcattcatgtcatttccaggcctttaaaagcaccccctgcccccgtgaccttgacccacactggcttgggagcagggatcttctttgccatcatcctggtgactggggctgttgccttggctgcttactcctactttcggataaaccggagaacaatcggcttccagcattttgagtcggaagaggacattaatgttgcagctcttggcaagcagcagcctgagaatatctcgaaccccttgtatgagagcacaacctcagctcccccagaaccttcctacgaccccttcacggactctgaagaacggcagcttgagggcaatgaccccttgaggacactgtgagggcctggacgggagatgccagccatcactcactgccacctgggccatcaactgtgaattctcagcaccagttgccttttaggaacgtaaagtcctttaagcactcagaagccatacctcatctctctggctgatctgggggttgtttctgtgggtgagagatgtgttgctgtgcccacccagtacagcttcctcctctgaccctttggctcttcttcctttgtactcttcagctggcacctgctccattctgccctacatgatgggtaactgtgatctttcttccctgttagattgtaagcctccgtctttgtatcccagcccctagcccagtgcctgacacaggaactgtgcacaataaaggtttatggaacagaaacaaaaaaaaaa

SEQ ID NO: 63671 - DNA, 1600 bp, Homo sapiens
ggcacgaggtttgaaccatgagtggacatttgaaaaactcaggcagcacatttcacgcaacgcccaggacaagcaggagttgcatctgttcatgctgtcgggggtgcccgatgctgtctttgacctcacagacctggatgtgctaaagcttgaactaattccagaagctaaaattcctgctaagatttctcaaatgactaacctccaagagctccacctctgccactgccctgcaaaagttgaacagactgcttttagctttcttcgcgatcacttgagatgccttcacgtgaagttcactgatgtggctgaaattcctgcctgggtgtatttgctcaaaaaccttcgagagttgtacttaataggcaatttgaactctgaaaacaataagatgataggacttgaatctctccgagagttgcggcaccttaagattctccacgtgaagagcaatttgaccaaagttccctccaacattacagatgtggctccacatcttacaaagttagtcattcataatgacggcactaaactcttggtactgaacagccttaagaaaatgatgaatgtcgctgagctggaactccagaactgtgagctagagagaatcccacatgctattttcagcctctctaatttacaggaactggatttaaagtccaataacattcgcacaattgaggaaatcatcagtttccagcatttaaaacgactgacttgtttaaaattatggcataacaaaattgttactattcctccctctattacccatgtcaaaaacttggagtcactttatttctctaacaacaagctcgaatccttaccagtggcagtatttagtttacagaaactcagatgcttagatgtgagctacaacaacatttcaatgattccaatagaaataggattgcttcagaacctgcagcatttgcatatcactgggaacaaagtggacattctgccaaaacaattgtttaaatgcataaagttgaggactttgaatctgggacagaactgcatcacctcactcccagagaaagttggtcagctctcccagctcactcagctggagctgaaggggaactgcttggaccgcctgccagcccagctgggccagtgtcggatgctcaagaaaagcgggcttgttgtggaagatcacctttttgataccctgccactcgaagtcaaagaggcattgaatcaagacataaatattccctttgcaaatgggatttaaactaagataatatatgcacagtgatgtgcaggaacaacttcctagattgcaagtgctcacgtacaagttattacaagataatgcattttaggagtagatacatcttttaaaataaaacagagaggatgcatagaaggctgatagaagacataactgaatgttcaatgtttgtagggttttaagtcattcatttccaaatcatttttttttttcttttggggaaagggaaggaaaaattataatcactaatcttggttctttttaaattgtttgtaacttggatgctgccgctactgaatgttaacaaattgcttgcctgctaaagtaaatgattaaattgacattttattactaaaaaaaaaa

SEQ ID NO: 63672 - DNA, 1351 bp, Homo sapiens
  misc_feature (1)...(1351): n = a,t,c or g
agagttaattatgtctttgataaaagactcaaatccagaactggggttgagaaaaaaaaatcaagactgtttcatagggtataaaaagacagatgcaaccatacatttaatttttaaaaatggaatgtatcttacataaggattttgtgaaaaatcttatacctatctgagtattacagaagatgcatataccttccagagctcatggaggaaagagtgtataaacaattttgataaggagttgaaaaacaatttgaaaatagtttacaaagagagaatcaggaggcagaaaaagcttcaagaggcatggtcttcagaaattgttctggaatgctgtttcacttgtatcgatgtcatgttcctggttcaatttcttgaactccaccacttggaagaagacgtgctcaaggatatgtttggcatcctgttggtcctttggtagtttactggttactccaagaatatcaccacacttcctgacataaaattccaggtcttcttcagtacacttattggtaatctgagccagccgtgccttctcagaggagaacgtttcatctaaatcaaatagctccagaggaggaggtggtaactcccggaaactgggaggaaaaaccgcaggctgaagggttggcagcggcgtctcaaactgaggctggatgagctggagtggttcatgtttcacatttagctgctcgtgagcctcgatgacgctgtggaaggaggtggtatccagctggaagatggacaggtcgaagagggtggtaaagtcccttgggatctcatcactctcctggagacactctcgattccgctttgatagggtggctgtgtagggcagcatcatgtagtcagaaatctctgggtcctcagcatcaatctggtttaggtggatgtctcctgtcgtgagccactggaaaacaacatccatgattttgctgttttcttctttgtccaaatattgatcactgaacatgtgacatgaaccaagcactgccagcttcccaccttggttctttgagtgatagaaagccaaaatgggtctgttaagtgggaagcagacagaacctgtagacagaaccgccactgctggtttcatgacactcaatgtggcaccaaaaggatacacaaaggtgagagcctgggcattgtttccactgctttcctcatcaatgatcccaggcacagcctttcctgcagctcggctaatttccctgttcaagactccactggaaactagagcttctttaggatggaaatatttgtgatatacatttctaaccacagcatcattattaaccatgattcccctcgtgccaagcttggcgtangcaggtccatcaagtttcat

SEQ ID NO: 63673 - DNA, 1244 bp, Homo sapiens
ggcacgagtgcatctttatcatgagtaaagcttagaaataatcaggtactttaacttgtactggttctttcatggaaaaggaccaaactcttacccaggatctactggagcagctgttggagcccatgacgcctgtcgggatgcaaaagagaagcgctctaaaagccaagatgcagattcacctggaagttctggggcccctgaaaacttgacattcaaggaacgccagcgtcttttttcacaaggtcaagatgtatccaataaagtgaaagcttctcgtaaattaacagaactggagaatgaactgaacacaaagtgaaagaaaatgaggagaacactttgtatttaccccaaaatcttttcagttgtgggtttgtaggtgcgagtttgaagaggaaaagaggaagggggttatatttctaagtgatttacaatttctgtttctaaaattgttgggatttagaaatgtttcaattccaagaaattttattttactttaccatgagattgccatttatgtaatttaaacactgtctagtttcttaattatctaactcacacgagggtaagttttttgttggtttcttttttggagtcctgagttcaaaggggacagaactaagggcaggagaagagaatggatgtgtcttctctcccatcttcccctcatcatcgaccgaggagcacaaagaagttctgtttctgtttttttcagaaactttattttagctgtcaagcagagaatagcttgaactattcagactattgttggcactgtttagtagtgaccacacgctcttctacccgggaaggaacatatgacgacatgctcctcccatgtcccctgatggtgtctgttcccacaatatccttctagtctgcatcgtgaagtggcttaggccaaagcttcctgtgtgatgacgcacgtccgagactgttccatctcattcctcgcaaatttgagctcttctgatcaattctaaatatttgattaattttaattctgaaagaaaattttgaggatttaagcttaggggattttatttttataaataccagattattgttagacttaataaatcactgttaaatttaaagatgacagttaccttggaaagttcactaatacttcggctccagggcgtctgttaaaggaggatatctttattgggagccaatgtttcatgtggactggggaattgaccagaagaatgggagatgagtagggacccctgttaccattc

SEQ ID NO: 63674 - DNA, 2448 bp, Homo sapiens
gagactgacaatgatttgacaaaggaaatgtatgaaggaaaagagaatgtatcatttgaacttcaaagagacttttcccaggaaacagacttttcagaagcctctcttctagagaaacaacaggaagtccactcagcaggaaatataaagaaggagaagagcaacaccattgatggaacagtgaaagatgagacaagccccgtggaggagtgtttttttagtcaaagttcaaactcatatcagtgtcataccatcactggagagcagccctctgggtgtacaggattggggaaatccatcagctttgatacaaaactcgtgaagcatgaaataattaattctgaggaaagacctttcaaatgtgaagaattagtagagccctttaggtgtgactctcaacttattcaacatcaagagaacaacactgaggaaaagccttatcagtgttcggagtgtggcaaagctttcagcattaatgagaaattaatttggcatcagagacttcacagtggggagaaacccttcaaatgtgtggagtgtgggaaaagcttcagctacagttcccattatatcacacatcagacaatccacagtggggagaagccctatcagtgtaagatgtgtgggaaggccttcagtgttaatggaagcctaagtaggcatcagagaatccatacgggagagaagccctatcagtgcaaggaatgtggaaatggcttcagctgtagttctgcatatattacacatcagagagtccacactggagagaaaccttacgagtgtaatgactgtgggaaagcgttcaatgttaatgcaaaattaattcaacatcagagaatccatactggagagaaaccttatgaatgtaatgaatgtggaaaaggcttcaggtgcagctcccagcttaggcagcatcagagcatccacacaggagaaaagccctatcagtgtaaagagtgtggaaaaggcttcaataataatacaaaactcattcagcatcagagaatccacacaggtgagaaaccctatgaatgcactgaatgtggaaaagccttcagtgtcaaagggaagttaatccaacaccagagaattcacacaggcgagaaaccctatgagtgtaatgaatgcgggaaagccttcagatgtaactcccaatttcggcagcatctgagaattcacactggggagaagccctatgagtgtaatgagtgtggaaaggccttcagcgttaatgggaaactaatgcggcatcagagaattcacactggggagaaaccttttgaatgtaatgagtgtgggagatgctttacttctaaaagaaacctacttgatcatcaccgaatccatactggagaaaagccctatcaatgtaaggaatgtgggaaagccttcagtatcaatgccaaactaactaggcatcagaggatacatactggggagaaacctttcaaatgtatggaatgtgagaaagcattcagctgtagttctaactatattgtgcaccagagaatccatacaggagagaaaccctttcagtgtaaggagtgtggaaaagccttccatgttaatgcccatttaattcggcatcagagaagccacactggggagaaacccttcagatgtgtggaatgtggcaaaggcttcagctttagttctgactacattatacatcagacagtccacacttggaagaaaccctatatgtgtagtgtgtgtgggaaagcattcaggtttagcttccagctcagtcagcatcagagtgtccatagtgaaggaaaatcctaataatgagaaagatatagaaaactcttaaggttaatgccaaaatggatcaagtatcatcagattcatccattgaaaaacctccaagagggcatgaatatggcagagtcttcatatggaaacagtttttattctattcagtttaaatcaggaaaggatgaccagttaaagagaaacatccaaaaatagctttgttttgtaccaacaggaattagaaaatataatgaaaagatttcgttcccagcagcatcaagaaaagtagattttctagaaataaacagttatggaggacttgtatggagaaatttaagtcttcactgagggccactttacaaaggaaatttgaataaatggagagagagagaagccttgttgttggataggaaaacccgtactaaagatactctacctacattaatttatttgtttaatttttgacaacaagcatgtattacttttgaaaagatgaaaaataaagttttatttaaaaaaggaaaaaggtatgagtacatttttaattttcatgtaattgagaaaacctttctaagtattagatgaaagctagaaactatccacagggtatgtactgataaattgactactcaaaaactaaatattcctgtatgtttttgttttaaagtttaaaagataaagcgcaaaatgggg

SEQ ID NO: 63675 - DNA, 1822 bp, Homo sapiens
ctgggcccctggtgctggtgctgatcctgggagtgctgggcgtgctggcatacggcatctactactgctgggaggagtaccgagtgctgcgggacaagggcgcctccatctcccagctgggtttcaccaccaacctcagtgcctaccagagcgtgcaggagacctggctggccgccctgatcgtgttggcggtgcttgaagccatcctgctgctgatgctcatcttcctgcggcagcggattcgtattgccatcgccctcctgaaggaggccagcaaggctgtgggacagatgatgtctaccatgttctacccactggtcacctttgtcctcctcctcatctgcattgcctactgggccatgactgctctgtacctggctacatcggggcaaccccagtatgtgctctgggcatccaacatcagctcccccggctgtgagaaagtgccaataaatacatcatgcaaccccacggcccaccttgtgaactcctcgtgcccagggctgatgtgcgtcttccagggctactcatccaaaggcctaatccaacgttctgtcttcaatctgcaaatctatggggtcctggggctcttctggacccttaactgggtactggccctgggccaatgcgtcctcgctggagcctttgcctccttctactgggccttccacaagccccaggacatccctaccttccccttaatctctgccttcatccgcacactccgttaccacactgggtcattggcatttggagccctcatcctgacccttgtgcagatagcccgggtcatcttggagtatattgaccacaagctcagaggagtgcagaaccctgtagcccgctgcatcatgtgctgtttcaagtgctgcctctggtgtctggaaaaatttatcaagttcctaaaccgcaatgcatacatcatgatcgccatctacgggaagaatttctgtgtctcagccaaaaatgcgttcatgctactcatgcgaaacattgtcagggtggtcgtcctggacaaagtcacagacctgctgctgttctttgggaagctgctggtggtcggaggcgtgggggtcctgtccttcttttttttctccggtcgcatcccggggctgggtaaagactttaagagcccccacctcaactattactggctgcccatcatgacctccatcctgggggcctatgtcatcgccagcggcttcttcagcgttttcggcatgtgtgtggacacgctcttcctctgcttcctggaagacctggagcggaacaacggctccctggaccggccctactacatgtccaagagccttctaaagattctgggcaagaagaacgaggcgcccccggacaacaagaagaggaagaagtgacagctccggccctgatccaggactgcaccccacccccaccgtccagccatccaacctcacttcgccttacaggtctccattttgtggtaaaaaaaggttttaggccaggcgccgtggctcacgcctgtaatccaacactttgagaggctgaggcgggcggatcacctgagtcaggagttcgagaccagcctggccaacatggtgaaacctccgtctctattaaaaatacaaaaattagccgagagtggtggcatggcacctgtcatcccagctactcgggaggctgaggcaggagaatcgcttgaacccgggaggcagaggttgcagtgagccgagatcgcgccactgcactccaacctgggtgacagactcttgtctccaaaacaaaacaaacaaacaaaaagattttattaaagatattttgttaactcaggtaaacaaaaaaaaac

SEQ ID NO: 63676 - DNA, 1883 bp, Homo sapiens
ttttttttttttgccaatcaaagcacacaactttattgatgatacacacagatgcggacttgggtggaagaggttaagtcggtacaatagaccagaagagcagtgcactttttttgatgaataggttcactatccatcaggcgcgtgtagaagaaagagcaaacggaaaaataattcaacctaaggctgcaacaaatgcattttcaggctcaagcccgcgatattgcctctgggtctctggcaaagcgggtcccgctttgggacaggggagaccacccaccaggccaaccaataggcactcgtggatgctggtaatttgatgttctcccgtccacaggcagggcagctggaagttgatcccctccaccacatggaaggaggctggcaaggggaggaattttacaatggccaacatttgccttgcaagacttgcacaacccaagaagtttactcaaaagctctgttggggagcccctggcctgggccaataaggagtgtggtccctggattgaacccctggaactttccaccccaatgaaggtggtgaattggcctaaggctggatcttcagtagcaccctctgcagattctttgacatctgcaaaccaagcgcgttgtgggtggattccgtcccattgtgttcgagagggccgtttatggggcaggggtttccaggagaatctctctgtttccatttctgataaagagggacatgaatgagaagagcatctgggcaccgactaactcccccgccaagactggcttttcagacaaacccatcagcggtttcaaaacctgaaccttagcacatccacttccctctgatatcaaaggaaacttcaagtctgaagcggacttggcaagcatgttattaataactgtcatgcttattaacaaatttaatccggcctgctgcagaaatgagttgcagcaacgtgacacagtctcccgacacacttcattgatgtacatcttaatctggccctgactttcaatactcgcatttaagttatccggggcacacaaagcctctctaacagtggggtctggagtggggctcgtgtttctagccattgagaggctggccaaatggctattgatatcctggctaaatggaaagcccgcatccttgggctcggcaaacaacagttttccctgaatgaaaagacacttggagaggtccagaacacaactgccatttttacaattttgagcactccaagtatttttatgttcataggggaatggccgctgttttattgggtgtgctcggttggccttgcctccccctgagggcctgtcctcagtgccacctggggccccaggttcagtccaatccccatcctcagtccagggccgagccatagtttcaaaatcaaaccaaatatcaggctcctcctcatccagctcctggtcatcgtcccactcctcttccccctcctcctccagcttctcactgtcatctcttcctatggtcagtttgtaaacgcagtagcaggcaccagccccaatcatcagtcctgccgccatccaacccacttcccgagcccggcccatgctcaagtctgtgccagccttggggcaggacaggagagggccttgctccacctgattgaagaggtctctcaggtccagggtgagtaaggatggagggtagcagtcttcagcttcttccaggctcttgtagctctcttgtgatgaatctgcaaggttccaaccaaggcagttttctccttctctcgctgaaacttgtgccgaaacctacaggccaacagacctacaaacctgcacggtccgagctagtttccttctttcttcacacgcctgcagagtaatagggggctggtacccagacggaggcgactagcaggacttgtgcttta

SEQ ID NO: 63677 - DNA, 1901 bp, Homo sapiens
tttttttttttttaagactctgttatgattttatttcttcaattgttccaatcacagtttctaatacagaaataaaactattcagcgtctccgttcttgcttcattttgtttcacagagatctgcatttctgagtttccaggctccaatagcagttctgttaagaacagacagccagtatcatcctgagcactgaggtatgctttccatggccgagacccagccctactcattgcgatggtctggatgttcactacttgaagagccatctggagggtgtcaggatggaattctccccgccaaggcaacacttgctgatgagcaactttaaggctaagccaagttttctcaaaataatcagcagtaagctggcgattggggactagcatgagggctccagaatcagggagttcttgtaccctctccttgttctcttcaggaatcaagggtcctgatgcggcaaaggatgaagttttaggaagctctgggtcacaacgctctgccccctggcatttagagatagttgcccagtgggctttgccatacactggcaccagtgtgttgaagtctgaggcccagctattcacaggtctttctgccggatcctccaaaagtccaagagtagggtcagatttagggctacacagaatccgcttaacttcatcaatgccaactaagaggaggcgataatagaagagacctcggtcccgtacagccatatctttttcttcctctatgcagtaatacaacaaacgtcctagcatgtcctggcactcagcaggtcgggagaggaaaaggcgcagcaaagcagtgagcagctccatcttaacagctggaaatgtttccgacttcacattctcaacaaagtcctctaacacataaggagcattaggaattctttccccatggacaccaagtagccaaataagtgcttgcttcccctcactatcttgaatgttctcttcacagccgggcagggcctgacatacagcttcagtacactgaggacacaaccaaaccaggtctcggaaagtctgcaccaccactgtggtaatgtgctcttgtcgaagacccagcaactctgttaaaatctgaacacattgatctgtgtaagtcctggcaatgccacctatggcaaagatggcagcctgtgcaaagtccgcagacacatccgtgcagtaccctcgaagctcctctagcacctgctgcacattctcatcgttcaccagttcacacagcacctccactttctgtagtttgatgtagtggggctccgagtaggagcaaaaaaactttttgtagtggctgctaaagtgacctggtaaactatgcaagatctggcgtacatgacaaagagcaacaaaacagagctcacggctctctgaagaacaggcagctagcaaaggtcccttgacccgcacaaggacatcagtttgtacgtggggaaacatttttgccaagatcagaaaaagtttggtagctcccatcaccacacctgggctactgctcttgaggaaactatccaacagattgagaatgtcaaatagttcttcctcactgcggggttggtagcgtagcagaaagttcaatacttcagcctggccccattggtccagttttgacattctatccaaaaaagaaaacaaaagagctattttagcaacaaaattaggaccatttccatgccactgccatatgaccaggtggttgttcatcatagcaaagggagaattcttaaaaataggctgtgccataattaagtcacttttcatgtactatttaaagtttacacaaaaaaggcttaaaattccaagatgagttgttaatacaaatgcacactcctctaagaccaaagacatgatcagcatacactgggtccaggttccttacattttaagacac

SEQ ID NO: 63678 - DNA, 2458 bp, Homo sapiens
tttcgtggcctgaccacgcagttcttgggtctgtgctgctggcctggggttgtggttgaggccgggtctccgctcctgtgcccgggaagatggtgctaggtggttgcccggttagttacttacttctgtgcggccaggcggctttgctgctggggaatttacttctgctgcattgtgtgtctcggagccactcgcaaaatgcgaccgctgagcctgagctcacatccgctggcgccgcccagccggagggccccgggggtgctgcgagctgggaatatggcgacccccactctccggtcatcctctgctcttacctacctgatgaatttatagaatgtgaagacccagtggatcatgttggaaatgcaactgcatcccaggaacttggttatggttgtctcaagttcggcggtcaggcctacagcgacgtggaacacacttcagtccagtgccatgccttagatggaattgagtgtgccagtcctaggacctttctacgagaaaataaaccttgtataaagtataccggacactacttcataaccactttactctactccttcttcctgggatgttttggtgtggatcgattctgtttgggacacactggcactgcagtagggaagctgttgacgcttggaggacttgggatttggtggtttgttgaccttattttgctaattactggagggctgatgccaagtgatggcagcaactggtgcactgtttactaaaaagagctgccatcatggcccagggaggcgggtgaaagctccgtcttctgaattcatctctacaggctcaaaactcctctttgatatcagacctgatgttattttccttcttttggagggcatttgtttggttaagaaggcttctttggactttggaatttcaacccagattttaccttgcagacggaatgacaagcaaaaagtgttgtggggaatcaaatttgttcctttcctcatgcacaaaacataaaggatagtggcgagtttacaagctgtggatgggtttccatagtcttcctttctgtacattgctatatcttcagtcctttggagcaagtggacctaacaagttgagcaaaatgaatatttggatccatgttcctcttgtgaccctgagtcttcatgcaaggagatctgaagctgaacaatgaaaatcttcagcagaaatagaaatggccgtggattgtaatacacactgaaattctgactttctgaatttaaatgtagaataaattttaccaacttggagtactgtatgagtattttcagtagggggaataaactcaaaattatatttgttttgcagaaacctagtcatttgaaatgagccatcctattaagccctcttttgtctccattatgttccagaggcagtatatgcagtgcaataattttttcattccacttatgttttgaaagccagcggcatcagatgtgtgagttgagctattcctcctggcagaattgtccaatctaaaaatcagcgtttaccagcccatgctaataaaattaagatttcatacaagtttctgtaaaactattcttcatgattagctctccctgtgggctgcagcagtcagaaagagataacagccacacctctgcattccccggtcaccaggaataaaaggaaatgttccagattgtaagtggttttaaaaactcagttctcatcgtttgcaatctaagttgaaagaactattatatataaaatcaaaggtgggcaatgtggccaagtcaatggaagaggctttactcagaataacttacaaattctagaaacaaggtagaactcactcagtttacctaataataattgaatttaagaccaaatatcacagttgaaataacttccctggatacattctatcattttgtagctttcctaagaatttcttgctttatcattcctgattaatcactgtttttacattattaaaggtggcaattttctgtaaaaaatttaaaacagatgatcctattctgtcttgaaagttctgtaccacactgaccttaaccttgcttataacataacaattggtaaacttttaattcataatctttataccctaagatagtatttattaaatttttatgggtcatgaagaaactagaccctctccccagaaaaatctacatacacagaatttacatagaacttgggttcatctacacaatttatgcatgaaataaaattgtactggtaccctataaatttatacaaataaaagagtttaagggagttcaaggatgccatatgtatattttaaaaaaatttctaagggaagtctaaaaaacataaattataatattacccaaaataagatgctacttttcacctaaccaagtcctgcctcatttcacactttaacctcctaagtatattcataatcctaccaaaagttgttttctttaaaaagtaagaaactttagggccagcgcag

SEQ ID NO: 63679 - DNA, 3555 bp, Homo sapiens
atggctgaggactggctggactgcccggccctgggccctggctggaagcgccgcgaagtctttcgcaagtcaggggccacctgtggacgctcagacacctattaccagagccccacaggagacaggatccgaagcaaagttgagctgactcgatacctgggccctgcgtgtgatctcaccctcttcgacttcaaacaaggcatcttgtgctatccagcccccaaggcccatcccgtggcggttgccagcaagaagcgaaagaagccttcaaggccagccaagactcggaaacgtcaggttggaccccagagtggtgaggtcaggaaggaggccccgagggatgagaccaaggctgacactgacacagccccagcttcattccctgctcctgggtgctgtgagaactgtggaatcagcttctcaggggatggcacccaaaggcagcggctcaaaacgttgtgcaaagactgtcgagcacagagaattgccttcaaccgggaacagagaatgtttaagcgtgtgggctgtggggagtgtgcagcctgccaggtaacagaagactgtggggcctgctccacctgcctcctgcagctgccccatgatgtggcatcggggctgttctgcaagtgtgaacggagacgctgcctccggattgtggaaaggagccgagggtgtggagtatgccggggctgtcagacccaagaggattgtggccattgccccatctgccttcgccctccccgccctggtctcaggcgccagtggaaatgtgtccagcgacgttgcctacggggtaaacatgcccgccgcaagggaggctgtgactccaagatggctgccaggcggcgccccggagcccagccactgcctccaccacccccatcacagtccccagagcccacagagccgcaccccagagccctggccccctcgccacctgccgagttcatctattactgtgtagacgaggacgagctacagcggctgctgcccagtgtctggtcagagtctgaggatggggcaggatcgcccccaccttaccgtcgtcgaaagaggcccagctctgcccgacggcaccatcttggccctaccttgaagcccaccttggctacacgcacagcccaaccagaccatacccaggctccaacgaagcaggaagcaggtggtggctttgtgctgcccccgcctggcactgaccttgtgtttttacgggaaggcgcaagcagtcctgtgcaggtgccgggccctgttgcagcttccacagaagccctgttgcaggaggcccagtgctctggcctgagttgggttgtggccttaccccaggtgaagcaagagaaggcggatacccaggacgagtggacaccaggcacagctgtcctgacttctcccgtattggtgcctggctgccctagcaaggcagtagacccaggcctgccttctgtgaagcaagagccacctgacccagaggaggacaaggaggagaacaaggatgattctgcctccaaattggccccagaggaagaggcaggaggggctggcacacccgtgatcacggagattttcagcctgggtggaacccgcttccgagatacagcagtctggttgccaaggtccaaagaccttaaaaaacctggagctagaaagcagtagactggaggcttctacagactgtaggattcaaggtgatatttgcagactggctttatgagagacaacactgatctactaggggctggaccctagattggttgccagggcttgtgtgtgaatcaaccctaggaggaaaaacctactaccaaaccagaagagcaggcctaagagtactttgagcttctagaagaagtaagcgggaaaggaagagaaagagtagaaagttggtgcatcttctcctccccaagagcctgagtataagaagttggattttaagggtgggggagctgggttggagaaaggtaatataattaaagccaccacaaaacaacctaaacaagccatgttcatgagtaattgtaagtggcttctggatgagacctggcagtgtctctacatacttcctcagggagatagcaattgaaaatgtaattgaataaataaggaaaggaactgctatttggtgtgttcctctgtggacccagtttatttaatccttaaaataatatttttgggaagacattgattttgtccatttatgtggatgggaaaactgagactcattaatttgtccaatgtcgaacagctggtgttagtagagcctagactcaaacccagcttttaaagcccttgttctttactccactaaactgtaacctgtaatcctgtatgcactaacaggagttttcggtgaccttgaaaacacagattactataattactataataaatcccttacattcctgtctctagcatggtttagggagtgccaaggctcaatgtagatggggtcaccttgtcagagcatctgttcatacagaaactgggtttcctgcagaccccaggtgctgcataggattcctcaaaccctacaggatatatctccccactggctgctgtccattttgcttgttaccctgactccccctcttcagccagagcagtctttgtaactaaagctgccagcctggctcatctttcctgacaacgtgcatctcctgccctgtgatcacctttgtgcttggctcctgccctcagcctgaatgtgttctaggaggctgaattcctgcttcgagtcctgcccaagagccagtcttggctcagccctacctcactctctcccaattcttcattcataaagggccaaaaagattagacctgtaatttgttagccagctttacagggccaggactgagtgagtgcctccttaaactttgtatcctgtgtgcctcccttgccttaccctagtcccagccctgcagctttaagtaattcagacatggattagccatttcccagttctgtctcatacagtccagcctctgccaccttccccaccccttcctttattccatcctaactagttcagccctagtcaagactggatagactgatactgctttgtttcccccaggaaccaaccacccaaccccagtattctggtaattttgacaatgatctatatgaaatttatttgattgacatttagactcatgagttaagcttctgctgaccatttatgttagggtacaatcagaggagcagaaccactaagataaagattatgtatatatgtattttaagggatttattatagggatctgaccgcatgccattgtgggagctggttaaacagtctctgtaaggctgttgtctttgcatctaatgctggagcttgaagtctgcagggcaggcactcgggaagggaagatggatgtaaagtgtgggagaccgaggacacagtggagcccacgagcacgagctggaacccacgaggatggcctggaacccatgtcagtctctcaccacctccagcttcgatgatgtgggtgtcctgcagaagaagctggtgcccttcctcacagagttaaatatgcatctggcccaggaattagagaagctga

SEQ ID NO: 63680 - DNA, 774 bp, Homo sapiens
cttatatctcagatacactgggtcaagtctacaaaagtaaaataagatggtggatagaggaaaacggaggaaacgggaacatttcagttgatgatctaattgctcttttggatttagcagaacatgcctcaagtgcattcaaagaatctcaacagcaaagtgaagatagagagtatgaagtgaaggaaagattgtatccgaagtcaaaaaggcggtatgatacttacaatatagctggttatcaaggagagatagaagttgggctttacacaatccaaattctccagctcattcctttttttgataataaaaatgagctatctaaaagatatatggtcaattttgtatcaggaagtagtgatattccaggggatccaaacaatgaatataaattagccctcaaaaactatattccttatttaactaaattgaaattttctttgaaaaagtcctttgatttttttgatgaatactttgtcctgctaaaacccaggaacaatattaagcaaaatgaagaggccaaaactcggagaaaggtggctggatattttaagaaatatgtagatatattttgtctcttagaagaatcacaaaacaacacaggtcttggatcaaagttcagtgagccacttcaagtagagagatgcaggagaaacctagtagctttaaaagcagacaagttttctgggctcttggaatatcttatcaaaagtcaagaggatgctataagcactatgaaatgtatagtgaacgaatatacttttctcttaaaac

SEQ ID NO: 63681 - DNA, 3488 bp, Homo sapiens
ttttttttttttagaatataagttttttaatttttataaataacttatctgttacaaagatagtttacccagctaaatcacaaaaccatcaactcaagatatccaaattacgttttattaataaaacaagtaaaaactgatttatcaatcttcacatagaactgcagatgaagctgaaaaacaaggcctattttaaaaataaattggatcaaacgtaagggctttgggtctatggtttaattacctaggattgtcatatttcttcccatatacaaaatgcaaagcctgaaagttagggctctgacattcatagagatcaactgtaataatcccatttaaaacacagccacttgcaaacatttacagtgggtggtagtctatattatcttccatcctttgctctatttcagcacttcccttagccccattctaagcactcatataatttcataattctgtctttttaaatgcatactgttctttttcttgatttcagttatatacattcctgatcatctgaatattttccttacaaaaatatatcatcaaaataaagagatgcttgaggttgcttcagtgttcaagtttgcttgtttttttttccagcttttcttcagttgtcctaaatatggctagccttgttttataaatacacatgatactgtcaccaagtcaggattagaaatggactgccccaacagtaaagcatttaaacttctctccaaaaaaagggctgtaggtactgctgctgttgctggttttgagactgtactttcccaataacaactgcttgtgcaagttctgtgggacaccaagcagatgaagcttaaccttgttgttctgtcagtgggttaaaaatatcttttgttttaagcttccctgtggaagacaaacactgtgttgtgtcacccactgctcaagtcagtatttaatgtgacctacagacatcacttctgtaatatcatctgcaattcactgtgcagcatctgcctgtcttcacacaacattggaactcatgagggcaaagtacagaataagtagaggaaagttattcctgtgccatactttccacctcattaatgcttttttattttaaggcattgttcctctcaggtaaggcttaaaaagggacatgatcgtgcttaattactaaaaggaaaaaagaaaattagttaacaaaaggctattacactatacatatagaaatataagaaaataatcaagaagaaaagaaatcacttaaagcagactcgagagatctgtacagtaggaaaagctttggggtatttcgctgcacatttgtacagacaatgcatgctgctttcctttgcatctttagcccctagatgctggcttcacagagtggagacacgttcagggaagacaaagacaaggccaagagtaccacagatttctgaagttcttccctatccaatggcactatgcggcagcaaatggttcttaaatagttaaaccttgttccttttcttcgtgtatgtagtgtttcactgaaagctttacaaataaaacaagctatcattctattccttcctcctgtcaaaattcagtagtgacatgaggggaaaaaggtattgggaacacctaggtgttaacatattgagaattatccataatgggacactggtaacactgtacacagttaggcagtgggcaaccaagtctttcagcagattacttttcatgtgatgaatttcaactgctcatgacattatactgaggtattattagctctgtgggctgacatttaacattagcagaacaccatcttgtcacaccttcaatttgacaaaatcctatgtagcagtgaaactttttcccgatgacagactagtttcttgaactttagatgtggttttagagaagatacagggccatttggctcagaaatgccttggcatctcacactgttcacagcgaattaaggctggatggttcaaaaaagtacaggcggtacaattccactgagctccctcatcatcttctgtgtcttgagtctttggtgttttgatgatggacctttgatctttgggttttggtggcacaggacctacaaatccaatattgtcataaaagttatgaatagcgctggggttaaaatgtggtcctcgggcttgaaaaagatcaatttctttggttaagcagtcaatgtcaatctggagttgtctattacaacttctcagctgctgcatttcttcaagggaaggtatctgggatatagaatttgatcttttcaggcgccttcgagttagattattttccatttcattaacctcagattttaatttatccagctttttcttttgaatctcaagttctctttgaagtcgttccattctggccttctggtgtaccaaaagagcttgtgtgtaggcagcatcatcagatcccatactcagtttccgtgtttcacttattctatccacatgtgctaatgtagggtccgtgaggtgctgaatattctcggtttctacataatgatcaggatgattaagaagatttgtaagttcaaaggtaggggacaccacccctggtgaaactgcagggggcttattgggagagactgtaattttgaaagtgtatttcgtattgggctgagtgactaccactcgaggagaggttgcagagttattgcctattgctcgacttttgggaggatggtgatgaataaaggcaggacccatgctcacttgcccagacatgttcctggaggcagcagatgctccagagtttgtggatatgaagagtgtgggctgattccgcatgacctgttcatctcctgtggcagcattcgctgaaatatagaccttaggttgactacgggacatcagctcatccgtatttggggggctggcagctatgtaaacagtgggctgatttctgtttaaggtctggctattgactgaagaggaagtgctggaggttcgaggtccagaagaacgcagttttgaagaattatttctttgtgggggttcaagtttgatttcaatctggttttttcgaggtcctgttgaaatattctgaatgttatattggctatgggcagaagactgtgagctaccagatgaatgaatggttggtggttgtgaagtagtaggtgaactgattggcatgtagacatgagaggtctggtggccttgctgatttggctgttgagatgaggtatgtgacagaggattagatgcaggacaagtagtccagggaccaggctgtgaaggctgataaacttgctgagggttcatgggattaaactgagatacccagccagaatgctgttgtgtctgtcgagttgtaccaccaggagttgtaatgtaaggcctaatatagatagaatttccctgtggactgttaagtacaggtggaggtacaccatgtatgtgcaaagatgtaggagtattacgaccagtctggatatttggggctaaagttaccataatgggattaaatctgggagtttgttgagaaaggct

SEQ ID NO: 63682 - DNA, 1517 bp, Homo sapiens
ccgggcagccactgtttaaaagtaaacacaccacacatcaacttggggcagctttgtaagcagcttcgcaagccctgaaacttctggctggtagggatgccagctaaaccagatggcatcaaacagtgaaatacaggcctggctttcagacttgatgatacaccccctgaagactccattcctttggtctttccagaattagaccagcagctacagcccctgccgccttgtcatgactccgaggaatccatggaggtgttcaaacagcactgccaaatagcagaagaataccatgaggtcaaaaaggaaatcaccctgcttgagcaaaggaagaaggagctcattgccaagttagatcaggcagaaaaggagaaggtggatgctgctgagctggttcgggaattcgaggctctgacggaggagaatcggacgttgaggttggcccagtctcaatgtgtggaacaactggagaaacttcgaatacagtatcagaagaggcagggctcgtcctaactttaaatttttcagtgtgagcatacgaggctgatgactgccctgtgctggccaaaagatttttattttaaatgaatagtgagtcagatctattgcttctctgtattacccacatgacaactgtctataatgagtttactgcttgccagcttctagcttgagagaagggatattttaaatgagatcattaacgtgaaactattactagtatatgtttttggagatcagaattcttttccaaagatatatgtttttttcttttttaggaagatatgatcatgctgtacaacagggtagaaaatgataaaaatagactattgactgacccagctaagaatcgtgggctgagcagagttaaaccatgggacaaacccataacatgttcaccatagtttcacgtatgtgtatttttaaatttcatgcctttaatatttcaaatatgctcaaatttaaactgtcagaaacttctctgcatgtatttatatttgccagagtataaacttttatactctgatttttatccttcaatgattgattatactaagaataaatggtcacatatcctaaaagcttcttcatgaaattattagcagaaaccatgtttgtaaccaaagcacatttgccaatgctaactggctgttgtaataataaacagataaggctgcatttgcttcatgccatgtgacctcacagtaaacatctctgcctttgcctgtgtgtgttctgggggaggggggacatggaaaaatattgtttggacattacttgggtgagtgcccatgaaaacatcagtgaacttgtaactattgttttgttttggatttaaggagatgttttagatcagtaacagctaataggaatatgcgagtaaattcagaattgaaacaatttctccttgttctacctatcaccacattttctcaaattgaactctttgttatatgtccatttctattcatgtaacttctttttcattaaacatggatcaaaactgaaaaaaaaaa

SEQ ID NO: 63683 - DNA, 1265 bp, Homo sapiens
ttttttttttttgattcttaacatatttaatgaaactcgagcttcataaaccagtgaaatgcctacccctatggagacggggagctggtcatgggacccaggtgcctggaggacatcccagtggctttgaaggctccagccagtcaagacggtcaatattagcccttctgccaacatctggcaatgtgaggctggggtggacgttggcctgatgttgccaggagtaggatgctgatgctgccagagagtaggtgggctccaaaccccaggcttctcacttgcttactaagcacagcagtctgaagcttgggacctgggcagtgcgtctttggagaaggcaaaaaagccacagcagcaacacttaggagcaagacccttcccgctctccaccctatttcctcccctgaagaagagcaacagctcaagctctagcatggcacagaacgctaggttgggccaggcaagcagccatggtggggccaggtgaagcaatgtgggtctcagcaaggaacccctctgaaggtggcagtggctcccagggctgctgcacactggacaccacaactttggcatcagctgcatggtgagctgcagagtggtcagaggggctggggccctgccaagagagcaaggccagacctgcccagcgggaggcaggaaggccctgatccagcaaggagaagtagaggaagtccacagccacctctgttactcatcgctactgggacatctggggacaggctctgttcttgggagagcaggtcaccaggatttgtagggctgcctgccggtgacagacacgtaagtcacagggaaaggccgggatccaggcctcagctgtagcagcagctgtctgtcggtcaggatccccggctctgggcgcttccaagatgaagccagaaggatgtagagcaccagcagcccaaaggccaccaccagcatcccggtgctgttggcaaagaccgcctcactgggcaggctgtggtatggcctggtggtgtttttcaaactgaagaaaagcttctcattaatgcccgaaatgacggatgcgatggacagagagaggatggcggctccaaaaaagacgtggataggttttaggaggctgcgcagccacatggacgcccagggcaggaggaagacagcaaagcccaggaacctctggcaggcgaagaggaagacagtggtgatgcccagccagctgtgaagggagtagaggttggcagtccttccatggttgtgaaacgtaaagacagcctcgtgcc

SEQ ID NO: 63684 - DNA, 6050 bp, Homo sapiens
ggcttccccacgggaggacgcgaggccccggcccagccatggccccctggcgcaaagctgacaaggagcggcacggcgtggccatatacaacttccaaggcagcggagccccccagctctccctgcagatcggcgatgtggtgcgaatacaggagacgtgtggagactggtataggggatacctcataaagcacaaaatgttacagggcatttttcctaagtcatttatccacatcaaggaagtgacagttgagaaaagaagaaatactgagaacatcattcctgcagaaattcctctggcacaagaagtgacaacgacactttgggaatggggaagcatctggaaacaactctatgtggccagcaaaaaggagcgttttctccaggtgcagtccatgatgtacgatctgatggagtggaggtcccagcttctctcaggaaccttacccaaggatgagctgaaggaactgaagcagaaagtcacgtccaaaattgactatggcaacaaaatccttgagcttgatttgattgtcagagatgaagacggaaatatcttggaccctgataataccagtgtcatcagcttgttccatgcacatgaggaagcaactgataaaatcacagagcgtatcaaagaagaaatgtcaaaagaccagccagattatgcaatgtattcccggatctcctcatcccccacccatagcctctatgtgtttgtgagaaactttgtgtgcagaattggggaagatgctgagctcttcatgtctctctacgaccccaacaagcaaacggtcataagtgagaactacctagtgcgatggggcagccggggcttccctaaggagattgagatgctcaacaatctgaaggtggtcttcacggatcttggaaacaaagacctcaacagggataaaatttacttgatttgtcaaatagtccgggtcggcaagatggatcttaaggatactggtgcaaagaagtgcacgcagggactgaggaggccctttggggtggcagttatggatataacagacatcatcaaggggaaagcagagagtgatgaagaaaagcagcacttcattccttttcacccggttacagctgagaatgacttcctacacagcctgctgggcaaagtcatagcctccaagggggacagtggagggcaaggcctctgggtgaccatgaagatgctggtgggtgacatcattcagattcgcaaggactatccacacctggtggacaggaccaccgtggtggccaggaagctgggattcccagagatcatcatgccaggggatgtcaggaacgacatctacattactctcttacaaggtgactttgacaagtacaacaagaccacacagaggaatgtggaagtcatcatgtgtgtgtgcgcggaggatggcaaaacgctgcctaatgcaatttgcgtgggagcaggggacaagcccatgaatgagtatcgctccgttgtgtactatcaagtcaaacagccacgctggatggaaacagtcaaggtggctgtccctattgaagacatgcagaggatccatctgcgattcatgtttcgacatcggtcatctctggaatctaaagataaaggagaaaagaactttgccatgtcctatgtgaagctgatgaaagaagatgggactactctacacgatggattccatgacttagttgtcctcaagggggacagcaagaagatggaggatgccagcgcatacctgacccttccttcttatcgacaccatgtggaaaacaagggggccacgctgagcaggagctccagcagtgttggggggctttctgtcagctcccgggatgtgttctccatttccaccctggtgtgctccacaaagctcactcagaatgtgggcttgctgggtttgctgaagtggcgtatgaagcctcaactgctacaggagaatttagaaaagttgaagattgtggatggagaggaagtggtgaagtttctccaggatactctggatgccctcttcaacatcatgatggagcattctcaaagtgatgaatatgacatcctcgtctttgatgccttgatttacataataggactcattgcagaccggaaatttcagcatttcaacaccgttctggaggcttacatccaacagcatttcagtgcgaccttggcttacaagaaattgatgacagtgctgaagacttacttggatacctccagcagaggggagcaatgtgagccaatcctaagaacgctgaaggctttggaatatgtgttcaagttcattgttcggtcgaggacattattttcacagctttatgaaggcaaagaacagatggagtttgaagaatccatgagacggctctttgaatccatcaacaatctgatgaaaagtcaatacaaaactaccatccttttgcaggtggcggctttgaaatacatcccatctgtcctgcatgatgtagaaatggtctttgatgcgaagttactcagccaactcctgtatgagttctacacctgcatccctcctgtgaaactccagaagcagaaagtacagtctatgaatgagatagtccagagcaacctctttaaaaagcaagaatgccgggacattctgcttcctgtcatcaccaaagagctgaaggagctgctggagcagaaggatgacatgcaacaccaggtcctggagaggaagtactgcgttgaattgctcaacagcatcttggaagtccttagctaccaggatgcggccttcacctaccaccatatccaagagatcatggtccagctgctgcggacagtgaaccggacagtcatcaccatgggccgggatcacattctgattagtcactttgtggcatgtatgacagccatcttaaaccagatgggtgaccagcactactccttctacattgagaccttccagaccagctctgaacttgtggacttcttgatggagaccttcatcatgttcaaggacctcattggaaagaacgtgtaccctggagactggatggccatgagcatggttcaaaacagggtcttcctgagagctatcaacaagtttgcagaaaccatgaaccagaagttcctagaacacacgaactttgagttccagctgtggaacaactattttcatctggcagtggcttttatcacccaggattctctgcagctggagcagttctcacacgccaaatacaacaaaatcctgaataagtatggggacatgagacggctaattggcttctccatccgtgatatgtggtacaagcttggtcagaacaaaatctgcttcatcccaggcatggtaggacctatattagagatgacacttatccctgaggctgagctccggaaagccaccataccaatcttcttcgacatgatgctgtgtgaatatcaaagaagtggggatttcaaaaagtttgaaaacgaaatcatcctgaagctggaccacgaggtagaagggggccgaggcgacgagcagtacatgcagctcctggagtcaatcctgatggaatgtgctgcagagcacccaaccattgccaagtcggtggagaacttcgtgaacctggtcaaaggcctcctggagaagctgctggattaccggggtgtgatgacagatgagagcaaagacaaccgcatgagctgcactgtgaacctgctgaatttctacaaagataacaacagggaggagatgtacataaggtacctgtacaaactccgcgatcttcacctggactgtgacaattacacagaggctgcctacacgctccttctccacacctggcttctcaagtggtcggatgagcagtgtgcatcacaggtcatgcagacaggccagcagcacccccagacacaccggcagctgaaggagacgctctacgagaccatcataggctactttgacaaaggaaagatgtgggaagaggccataagtctgtgcaaggagctggcggaacagtacgagatggagatctttgactatgagctgctcagccagaacctgatccagcaggcaaaattctatgaaagcatcatgaaaatcctcaggcccaaaccagactactttgctgttggatactacggccagggattcccctccttcctgcggaacaaagtgttcatctaccgcgggaaggaatatgagcgaagagaagatttccagatgcagctgatgacccagttccccaatgcagagaagatgaacaccacctctgccccgggagatgatgtgaagaatgccccaggccagtatatccagtgcttcactgtccagcctgtcttggatgaacatcccaggttcaagaataagccagtgcctgaccagattataaacttctacaaatccaactacgtgcaaaggttccactactcccggcccgtgcgcagggggaccgtagacccagagaatgagtttgcttccatgtggattgagagaacctccttcgtgactgcatacaagctgccggggatcctgcgctggtttgaggtggtgcacatgtcgcagaccacaattagtcctctggagaatgccatagaaaccatgtccacggccaatgagaagatcctgatgatgataaaccagtaccagagtgatgagaccctccccatcaacccactctccatgctcctgaacgggattgtggaccctgctgtcatgggaggcttcgccaagtatgagaaggccttcttcactgaagagtatgtcagggaccaccctgaggaccaggacaagctgacccacctcaaggacctgattgcatggcagatccccttcttgggagctgggattaagatccatgagaaaagggtgtcagataacttgcgacccttccatgaccggatggaggaatgtttcaagaacctgaaaatgaaggtggagaaggagtacggtgtccgagagatgcctgactttgacgacaggagagtgggccgccccaggtctatgctgcgctcatacagacagatgtccatcatctctctggcttccatgaattctgactgcagcacccccagcaagcctacctcagagagctttgacctggaattagcatcacccaagacgccgagagtggagcaggaggaaccgatctccccggggagcaccctgcctgaggtcaagctgcggaggtccaagaagaggacaaagagaagcagcgtagtttttgcggatgagaaagcagctgcagagtcggacctgaagcggctttccaggaagcatgagttcatgagtgacaccaacctctcggagcatgcggccatccccctcaaggcgtctgtcctctctcaaatgagctttgccagccagtccatgcctaccatcccagccctggcgctctcagtggcaggcatccctgggttggatgaggccaacacatctccccgcctcagccagaccttcctccaactctcagatggtgacaagaagacactcacacggaagaaggtcaatcagttcttcaagacaatgctggccagcaaatcggctgaagaaggcaaacagatcccagactcgctgtccacggacctgtgagctgctgctgactagggctgcatgggagagccagggaggggagtttctggaagaggaaagccatgcgtggaacatcgaagcctcagagagtgggagactgtccccatcagttgtccttacttagaggagacagagaggccaatcaggtcccagagctggagtgctaacaagcccagcatcccctggggctgtgatcatggtggatgaggaagcctcaacgtagattcctgaactcaaggtaccagcaagaatgccttctcccagtgtgctctccccaacatcctaggcacagctttcataacccagtttcttaggtgtaagaaactgcttttatctcatttattaagtctcagaacttaacagaaaaggaagccttttaaatattctttttaattttattttagattaacagttttgtactttacatttttttatacaaccaaccagtttcttttctagccaatcatctctgaagagttgctgtttcttactgacaataaaaaatgttctcttggttcg

SEQ ID NO: 63685 - DNA, 1429 bp, Homo sapiens
gagctataagacaacaggactgaacagggagccaactgtttctttgaacagtaaatcaggaacaccaatggaccaaaatgaacacagtcactggggaccacatgcaaagggccaatgtgccagcagatctgagctgagaatcatcctggtgggcaaaacaggaactggcaaaagtgctgcagggaacagcatcctcaggaagcaagcatttgaatcgaagctgggttcccagaccttgactaagacttgcagcaaaagtcagggaagctggggaaatagagagattttcattattgacacaccagatatgttttcttggaaggaccactgtgaagctctgtacaaagaggtgcagaggtgctacttgctgtctgcaccaggaccccatgtgctgctcctggtgactcagctgggccgctatacctcacaggaccagcaggctgcacagagggtgaaggagatctttggagaggatgccatgggacacacaattgtcctctttacccacaaggaagacctcaatggtggctccctgatggattacatgcacgactcagataacaaagccctaagcaagctggtggcagcatgtggtgggcgaatctgtgcctttaataaccgtgctgaagggagcaatcaggatgaccaagtgaaggaactaatggactgtattgaggatctgttgatggagaaaaatggtgatcactataccaatgggttgtacagcctaatacagaggtctaaatgtggacctgtgggatcagatgaaagagtaaaggaattcaaacagagccttataaagtacatggaaactcaaagaagttacacagccttggctgaagcaaactgcctaaaaggagccttaatcaaaacacaactgtgtgttttattttgtattcagttgtttctcagattgataattctgtggctttgcatactgcacagcatgtgcaatttgttttgttgcttactctttagtatgtgcaatttattctgcagtttgctgtttattatacccaaaaagttaatgatatttttgagaacagttattagactagaacgcaagactcctaggttatagttacagatcccagttattatttactcactatcatttagtgggtgaatcacagtaatttccctgtaaaatgtggtacctgaagtcatatttgagattctatgaaatgtttaaatctgaacatcactccaattattaatgaaccaaatcatacgataagttactgtttgcattgaaatataatatcaaagccttttgaaatctgtaaacataaaattcctctcattttcaaatatctaaagccagttttatgttcctaaaatctcattttcttctttctagtactactatttctattgaatataatgaaaatggcaataaaataatattacataaactgtaaaaaaaaaa

SEQ ID NO: 63686 - DNA, 1296 bp, Homo sapiens
tttcatgactttaaaaaaaaactccaaaacaattaagctatttttatttaacatgtaatagtcataaagcaactccatatatttagttttctgatatcctaatgtatttccacaaaccttttaagtctacaattttatatagttttccatcagggaggcaagatatatataatttctttttatatttaactaaaggttttaagagggcttagtctctaaatcagtaacaattagtcataacaccatacaaacacatttaaatattcaggaaagaggttgttaagattattgcttagtcttataaaatggtgaattttaaccaaattgatacctctgtaatcttatttatgtttcctataacatcatactgcttggcaagtaatgtaagttttgacataatttaaaaattcaagtagttgtaaacaaattctaatttgttaaacaattcatatattcccctttagttactatactacctcagaattaatcctccttaaaaaagtaatcatcccacatagaaaaaactgcagagcttcatctcttccttaaatattttcaagtactgtaagaacacaaatccatgaaaaaactgattaaaatttgacatttcatcttgctttactaattatggaataatacaaaaacataaaaaaaatgttccttaatatttctttgcttaacagagaaatacaaagaaatactgcaattatggttatgggctactttccagcctcttcaagtataggacacaactatggttcctaccagtagggagaaatgaataatcaatcttacataacacaaaagaaagatgagaggcacaaaaagacaaactgactttggcttttaagaacctaatgttaaccctgaaatgccacattcagtaacacaacaacaaaacaaaagattacagcagcaagccaccacttcacacagtattaaaaattcggaaataatgtaatagccttccttccatctcccactcaatctgttgtgtcatctttttgtttttcctgctttttagctgcaggcagttcaaggcttgcccactgcatcggttcagcttttctcatagtgatttcaatctttgttgcagtcatagttacataacttcgctttacatcaatcacaccccataatttcacattttgatcaaattccttctctccttcaaatacaatatgcacatttaacaatgtgctatttgcttctactcggctaagttctggaagtgagtttttagcatatactgaaatggtaacttcacctccagtctgatgccagtcatgtctaccc

SEQ ID NO: 63687 - DNA, 2047 bp, Homo sapiens
tgcggccgccgccgcggcggggagcgcgtctccgcgcagctgggatctatttggatgcgcaggcaggaggaggaggccgtgggcgacggcgatggcgacggggacgcggactcggacggcgaggacgacccggggcactgggacgcggacgctgccgaagccgccaccgccttcggggccagtggcgggggccgcccgcaccccccggtcgctggctgccgaggagatccgacagatgctacagggcaaggccgctggccgacacgatgcgtcctgacacgctgcaggattacttcgggcagagcaaggccgtgggccaggataccctgctgcgctcgctcctggagaccaacgaaatcccctcgcttatcctgtgggggccgccgggctgcggcaagaccactctggctcacatcatagccagcaacagcaagaaacatagcataaggtttgtgacattatctgcaacaaatgccaagacaaatgatgtgcgagatgtcataaaacaagctcaaaatgaaaagagctttttcaaaaggaaaaccatcctttttattgatgagattcatcggttcaataaatctcagcaggacactttccttcctcacgtggaatgtgggacgatcactctgattggggcaaccactgaaaacccttccttccaggtcaacgctgctcttctgagccgctgtcgagtgattgttcttgagaagcttccagtagaggcaatggtgactattttaatgcgagcgatcaactccctgggaatccacgtcctagactctagccgtcccactgaccctctgagccacagcagcaacagcagctcagagcccgccatgttcatagaggataaagcagtagacaccctggcttacctcagtgacggtgacgcccgagctgggttgaacggactgcagctggcggtgctggctaggttaagctctaggaagatgttctgtaagaagagtgggcaatcctattctcccagtagagttctgatcacagagaatgacgtgaaggagggcctacagcgatcccacattttatatgaccgggcaggtgaggagcattacaactgcatctccgccctgcacaagtccatgcggggctcagaccagaacgcctccctctactggctggctcgcatgctcgagggaggagaggacccactctacgtggcacggaggcttgtcaggtttgccagcgaggacataggtctggcagacccgtctgcgttaacacaagcggttgctgcctaccaaggctgtcattttataggcatgcctgaatgtgaggtgcttctggcccagtgtgtggtctactttgccagagccccaaagtccattgaggtgtacagcgcctacaacaacgtcaaagcctgcctgaggaaccaccaggggccactgccccccgtgcccctgcacctgaggaacgcgcccactaggctgatgaaggatttgggctatggcaaaggctacaagtacaaccccatgtacagcgagcctgtggatcaggagtacctgcctgaagagttgaggggggtagatttcttcaagcagaggaggtgctgactcctcagggcacgacagcagaaggatgttgcttttttaagggagggccagaaagaaagttagtggattgcaaagttggttgcctggtggaagttagaacagaccaacattttgtgccagaaatttaagagttccataggtggaggcgcagttctttcgaataaatgtgtaactttgaaattgtgttcatttgcactcggtgccagcggttatgcttatgaaaatacctggcagctttgtgcaatgaattaatgttataaggaattatctattttgtcatagtatttaagtcataatgtcatttcagaattcagttctgtaggattttcttttctttaaaaaatgtatattctgggtagttttaattggtaaaaaaatgtaattgtgatttaatactgcatagtgttttgggtattttttttatatgcaaaggtcttacgagccaataaaactatttcaaagtaaaaaaaaaa

SEQ ID NO: 63688 - DNA, 2319 bp, Homo sapiens
ttttgtgtgcaatacaaataaaatttttatatttattttttattcctacagagaagaagaaacacattcgtacaagggttcatttcccagtggttaaatgtactgagaaaaatacatttaacaaagtaactcaaggatacaactgctgtgaattcaaaagacagactactacaggaaaagtgagtgcacttactttcatattttgcagctgttaatagaagtcttaaacatttaaaatttaactaattcacacaacctccaccaagtatcagtaaataaacttctaaacaataaaaatggataaacatggtcaggttgttaggttaagagctaaaaatttcattttgcttccatggttgcaaccatgagtcttaaggccttcaaagcataaacatcacagaacacctatcacaaaccacaaaccaaccacaggaaaaccctttttatactgtgtatcttctgtatttcattaaacctaataagccatcagttgtaagatgcatcctaattcagagatgtcacaaagtgaaataagtatctctggatcaataaaatatggtatgtatatatacccgagatatgagaggaaactatttaccagtttgaattacttccatactattgtgccaaacaacaattaagtgtcaaaacattgaaattttatgtaggtaagctttttattattgttttctttacaggaacaataatccaaacaaatcttgaaccaatctataaacagaaaacctgttatataaattattatctatttttgcaatacatcaaaatactgtattgatgaaaataaatagataacaaaaaccaatattacattcatttctatgtttgctatcagaccccacaagtatgtttgtttttacaattcattataggtgaaaaacaaactgaaacacaacaggtacgtacaattacgccactgttaaggactgcagattacacgtgttaaagcttttcttaataaaatgggaacacattgctaggtacacagaaacatgattttgccctaaagaacagctgaactgttgagagaagcaagggcttcctagcggccttccagtgtagcagataatattaccctgtgtaacagagtattacagagttttgcattttccaagtctgtaagtctaaccataaacaaaacaaagacaaacccaaacattaagatatactgacaatcttgttcccatatatgatagaatagttctcatacactgttaagattgatttacttttttattaggagcacttctcaggtttttggcatttcacatgtctacactcagtgtccattggctccttctgagagtatccttgaaggttcggtaaattttgcagtgaacaagtaaaaaagggctggtgtaggtaccaaagccaaaaggggcaaatcttgctcaagtttatccactctggaaatggagattattccataggcatgaagtaaccagtggctgaagagaacaataagtcttttctttctgaccagaagatcatagcagttctctatttcagaagcagacatgtacacagccagagtaaccaaagataacactaatataatgtatgggaaggcgtaatataaaaggcctccaccaactgcctgaagcacggttaaaattgggaagaagtaaagtgcagcataaatacttttaaatcgatcagatttccctaacccacatgcaatcttcttcaccagaagaggtcggagcagcatcattaataccaagcagaatgcgtaatagataaatacaatggtatatagtgggtagacggcttcatgagtacagtgtactgtggtaacgtaatctggacttgggttgtaaagcatcgtgtaccagtcagaaagcatcaatactcgacatgaacgaatataaagaacaccaactggatcactcacaagtaaggtgataatagctgccatgctgcattcaaataatgcagtgatgtgttggaaaagtgcgctggaactctttttccccgagtaccattcaatgaagaaccaatgtaaaaccagaggaagcattgccataaatccaagatagagccaatcataaagttcaggagattctgtgcaaggctgacaatatttctgtgcattcgttctctgtcctcttgggcataccccacattctccatatatttcagttgagccatttttaaataatagggtcttcccacaataaagtccaaggcatgctggttgaatatcgacagccatgggccgcctgaaggtttttttcgagaagcgctagatcagcggatctggcagctgcaccgaacatccgggccacagcgagctcggcg

SEQ ID NO: 63689 - DNA, 1703 bp, Homo sapiens
aatgagcgcactcatcgaccactactcgaattccgcgtcgacccacgcgtccgtggacgcgtgggcttggctgtgctgtatgatgggatctgggcttctgtgttgaggtcagtcttcactgggtccaatggaggatggattcttggatgatggccgtggggatcagcctcttcatagtggcctgggttcacctcactgcttcagtcaccacaatggggaaagagtggaacgatattctcgaaaggtgtttgtaggcggattgcctccagacattgatgaagatgagatcacagctagttttcgtcgctttggccctctgattgtggattggcctcataaagctgagagcaaatcctattttcctcctaaaggctatgcattcctgctgtttcaagatgaaagctctgtgcaggctctcattgatgcatgcattgaagaagatggaaaactctacctttgtgtatcaagtcccactatcaaggataagccagtccagattcggccttggaatctcagtgacagtgactttgtgatggatggttcacagccacttgacccacgaaaaactatatttgttggtggtgttcctcgaccattacgagctgtggagcttgcgatgataatggatcggctatatggaggtgtgtgctacgctgggattgataccgaccctgagctaaaatacccaaaaggagctgggagagttgcgttctctaatcaacagagttacatagctgctatcagtgcccgctttgttcagctgcagcatggagagatagataaacgggtggaagttaagccatatgtcttggatgatcagctgtgtgatgaatgtcagggggcccgttgtggggggaaatttgctccatttttctgtgctaatgttacctgtctgcagtattactgtgaatattgctgggctgctatccattctcgtgctggcagggaattccacaagcccctggtgaaggaaggcggtgaccgccctcggcatatttcattccgctggaactaaaggataactgcagtgctcattttcaggcctcagaataagtgcactcttctgttcattctgaccccttcctcaacctcttcacgctggcatgtccttttgtagcagtctgtaacttaactatagtataatgaaaagaatgacctataatataggtgttttgtagattcttgtgtcactgcaaacaatatgaactcctttttcgtattgccatcgggttgcatggaagttttattctcttgttttgctggaaaccaagaggatccaaacttcctgcaacattttcttagaggagagagagaaatattaaaagagaaatgaaacaatagagtattttgggtttttaattaaattattgttaataatataacatataagaatacttttattaaaataaccatgcaacaataacactatcggtctatttgacagtttttcccccagggaagtgcttttgccttttcctttctttttattttactcttctcatcttttttgtctctctcttttttccatccctttttaatttttttaacagcaatggaggaagttaacaatttttaatggaaagagcatgttagagcaaacaaatgcataagcaagactgagcagcattataattaattttcagggttttgaggctgaacataatttcattatccctcaaaaagttaccaccacatcagaaaaa

SEQ ID NO: 63690 - DNA, 1591 bp, Homo sapiens
aaagggaaaatattcaacaagtgtcacaaaaagaagctaagcataaaattacatctgctgatggacacatagaaagttctgcacttttaaaagaaaagcaaaggcatcgattacataagttcttgtgtctcagagttggaaaaccaatgaggaaaacgtttgtatctcaagcaagtgctacaatgcaacagtatgcacagagagataagaaacatgaatattggtttgctgtgccacaagaaaggacagatcacttgtatgccttcttcattcagtggagtccagaaatatatgcagaagatactggcgaatataccagagaacctggatttatagtagtaaaaaagattgaggagtctgaaacaattgaggattctagtaatcaagcagcagccagagaatgggaggtagtgtcagtggctgagtatcaccgcaggatcgatgctctaaatactgaagaactgcgcacactctgcagacgcctccagattactacaagggaagacataaattcaaagcaggttgctacagtgaaagcagacctggagtctgaatcttttcgaccaaacctaagtgatcccagtgaacttttactgccagatcaaattgaaaagcttaccaagcatcttccaccaagaacaattggctatccatggactcttgtttatggtactggaaaacatggcacaagcttgaaaactctttatcgaacaatgacaggtttagacaccccagtgctgatggtgattaaagacagtgatggacaggtttttggtgcgttagcatctgagccactgaaagtgagtgatggcttttatggtactggagagacctttgtttttacattctgtccggagtttgaggtctttaagtggacaggagataatatgttttttatcaaaggagacatggattcactagctttcggtggtggaggaggagaatttgcgctttggcttgatggagatctctaccatggaagaagccattcttgtaaaacgtttgggaatcgtacactttctaagaaggaagatttctttatccaagatattgaaatctgggcttttgaataaataaaatgctctctgtcttagcaggagaatggcccaaacctgacatggacaagcattgtttggaaagttcaagaagcaatacagtgtaacatgtcacttgtgctttaaaattagtctgtatcaccatttattacagttataattttggagtttatttttcaaatcatgttcttgtcccagagttctttaggttaacactagggactgcgtccatgtactagtataacagcttgggtttgttagaatttgggcaacattttgattataatgacaacttcattttcacatgttactcagttccctaataggatggtgctcttttgttgaacctgtattgatttttttttttttaactatattgattcgtttactaaaacagtctaattggggcattgaggaaatgaagactggatacttctgtatctgtgaagttggcacaggtaacatttggacatgttcatcttattcttaggaaggaaaaaatcacttgccaaaataatacatacttcatagaccaa

SEQ ID NO: 63691 - DNA, 2071 bp, Homo sapiens
ttttttttttttaagttaaaaaatatttaatattatcagataaaaacattgattgtgacagctttacatgtttcattccatacacagtgaaaaaggcaaagtattactaggaaggaaatgagtagttgggtttgtaaaagatttattgatcacataaaagcaatgaataggagatgacatatatctaactcatgattacaaaacttttagagacaactaggttaaatatttcatgttttggctaagggaaaagaattcatgatctcgttaaagaagttcaaagtcaacactgatattgtacaactaccagtgcttttctaatgatctagaaatttgctataaatagctttactttttgctagttaatcacttactatgattgggttttatttaacagtgaggactaaagaggcagaatccttttttaaccactggataaaacagagacataaattaatgatgggtgctaagctttacattttatgttaaaaagatggaatatatttaagtggattgaatatatttcatgaggagttggacatattaaacccccaaatctgtttaggaagttttgtgagaaagtgtgtatatgccttgactcactctggcttacttttaaaatggaatacatttggcactaaataaaataaatagacaagcaaactgtgagactaagctgctccatctgagttgcccatcttgacttacaattcatactatttcttagttcttgactgagcacaaacagacctaaccgtatagcacttctgtgatgcatgaaaatagaatctagagctaagatactgcgcttcactgatgagccaatcttctattctgccaaaatcatagttacaaatgtgaaattcattcaagaaattcacatttttaacaaatgcttatactttttcaagttttcttgctagatatgttcttggttttgtggccagctaaaatatgatctttgaattaaggaaatccatataaaagaaacatctattttataggaacctcatttcacttgaaactttctttaccaaaacaccaaaccaaaactttgtcaccaaactcctggaacaaagcactggtggctatatttcagagtctgaagtccactcatttttcatgtttcaagggtctcttcatttgctccacaagtatcgacaacacaaattaaacaacttgtgactggaaaagcacgaactttggagttggcaacccatttgtctgtttcggtattatattcgagaatgtgtcctaatcgaccaacaccctgaaaaccagccaagacataaactatagagccaactgctgcacatttcactgttacacccttccatggcattggtgagaccatcttccattcgttcaacttaatatcgtaatattccacattgtccagaccacctaaaccattctgaccacccacagcaaatatcttgtcttttacaaataccagcccatgattcttcctggcttcaatcattggacacagctcagtccatgtttctgtggcaggatcataaacttcacaggaattaagcactctcccagaaacattgtttcctaaacttccaccacaaacatagattaggccattggcttccaccatcccatggctgcagcgctgggtcagcatgctgggctttgtgtgccagctttcagttctcgtatcatagcactcaaataaatacagagctgagtttcctacttctgaacctccagatgtataaattttgccttctgcagcacatgcagcaaggctgtctcgaggtgtcggaggacccagtttcgaataccagctatccttcactacattatagcagtccattcgctttattgggaaaagctgagagcctcccaaaatgtatactacattgtcccaaaacacgcatgctgcatctcttcgtttttcaaaggggcagcggatgtctgtccagctataatcctttgggttaaaatatctacaagactgtggttgagagcctccaaatagggctatgcggtagtcacgtttctttcttctaggtcttgtgccatctacaagttcttctcggtcatctggagacagtag

SEQ ID NO: 63692 - DNA, 1797 bp, Homo sapiens
cggacgcgtgggcggacgcgtggggctatacatgtgtgtggagtttctctggaagtctgagcgatatgaactcattgctgatgtcaacaagcccatcattgctgtctttgagaaacaacgagacttcaaaaaattgtcagatctctactacgacattcatcggtcatatctgaaagtggcagaggtggtgaattcggagaagcggctgtttggtcgctactatcgtgtggcattttatgggcagggcttttttgaagaagaagaaggtaaagagtatatttataaagagcctaagctgacaggtctgtccgagatttcccaaagattactcaagctctatgcagataaatttggagcagacaatgtgaagataatccaggattccaacaaggtaaaccccaaggatttggaccccaaatatgcctacatccaggtgacctatgtgacgccgttctttgaggaaaaggaaatcgaagaccggaagacagatttcgaaatgcaccacaacatcaaccgctttgtcttcgagacacccttcacgctgtcgggcaagaagcacggtggggtggcggagcagtgcaagcggcggacgatcctgacaacgagtcacctgttcccctacgtgaagaagagaatacaagtaattagccaatcgagcacagaactgaatccaattgaagtggcaattgacgagatgtccaagaaggtttctgagcttaatcagctttgcacaatggaagaagtggacatgatcagactgcagctcaaactgcaaggaagtgtcagcgtgaaggttaatgctgggccaatggcctatgcacgagcttttcttgaagaaaccaatgcaaagaagtaccctgacaaccaagtaaagcttttgaaggagatcttcaggcaatttgcagatgcatgtgggcaggcccttgacgtgaatgagcgcctcatcaaagaggaccagctggagtaccaggaagaactgaggtcccactacaaggacatgctcagcgaactctccacagtcatgaatgagcagattacgggcagggacgacctgtcaaagcgcggagtggaccaaacctgcactcgagtaattagcaaagcaactccggccctacccacggtctccatctcatctagtgctgaagtctgaggactctgcagcatcagacccacctctaagagaactttctgaatttgcagctaatctcggggaagagaaagataggtttaatttatttgaagttttcatggtgttaatatttttgtttacctcgctagcttcagaattttgccaacctctgaatttgcacattttgtataattttttttttctttgagcagtgttgatcaagccaagttgaatatttgccatgaaattccagtgaatgtgtagctcaaatgcaaaccctaagtttgctgtccagttattgtatggtccagtaccccagtcctagtacacatattttaaaggttaaagtgaatgtttttgtaacatttaagccatatttccagatgtaaataaaagattgtaaaatatacggtttttacccaaatttaaaagatcctttttagttaatactatgacagtactaaaaatatatgaataacatttcagataccattatattaaaatatttgtgtatgtgtacgaaaagcgttgataaatactaatctttaaagtttgtggagttcctttatttgtaatatatgtgctcttaaaagcaatgggatgtgaaattatgaaagtattttattgttcatagaaataaaaaacacagttactttgcaaaaaaaaaa

SEQ ID NO: 63693 - DNA, 2514 bp, Homo sapiens
tgaacagatgggtgatcataaaatggccatggatggttataggcgtattttaaaccttttgtctccatctgatggcgaacgttttatgcagctggctagagatatggcaaagagttactatgaagccaatgatgttacttctgctattaacataattgatgaagctttctcaaaacaccagggcctagtctccatggaagatgttaacatagcagctgaactatatatttctaacaaacagtatgacaaagctttggagataattacagatttttctggaattgtgctggaaaaaaaaacttcagaagaaggcacctcagaagagaataaagctcctgagaatgttacctgcactatacctgatggcgtgccaatagatatcacagtgaagttgatggtctgccttgtacatctcaacattcttgaaccacttaatcctctcttgacaacactagtagaacagaatcctgaagatatgggagacctatacctagatgttgctgaagcttttctggatgttggtgaatataattctgcacttcccctcctcagtgctcttgtttgctctgaaagatacaaccttgcagtagtttggcttcgtcatgcagaatgtttaaaggccttaggctatatggagcgagctgctgaaagctatggcaaggtggttgatctggccccactccatttggatgcaaggatttcactttctacccttcagcagcagctgggccagcctgagaaagctctggaagctctggaaccaatgtatgatccagatactttagcacaggatgcaaatgctgcacagcaggaactgaagttattgcttcatcgttctactctgttgttttcacaaggcaaaatgtatggttatgtggataccttacttactatgttagccatgcttttaaaggtagcaatgaatcgagcccaagtttgtttgatatccagttccaagtctggagagaggcatctttatcttattaaagtatcgagagacaaaatatcagacagcaatgaccaagagtcagcaaattgtgatgcaaaagcaatatttgctgtgctcacaagcgtcttgacaaaggatgactggtggaatcttctgttgaaggccatatactccttatgtgacctatcccgatttcaagaggctgagttgcttgtagattcctcattggaatattactcattttatgatgacaggcaaaaacgcaaagaactagaatactttggtctgtctgctgcaattctggacaaaaatttcagaaaggcatacaactatatcaggataatggtaatggaaaatgtcaataaaccccagctctggaacattttcaatcaagttaccatgcactcccaagatgtacgacatcatcgcttctgtctccgtttgatgctgaaaaacccagaaaatcatgccctatgtgtcttaaatggacacaatgcatttgtatctggtagttttaagcatgcgcttggacagtatgtgcaagcctttcgcactcaccctgacgaacctctctatagcttctgtataggcctaacctttattcatatggcatctcagaagtatgtgttacggagacatgctcttattgtacagggcttttcctttcttaatcgatacctcagtttacgtgggccctgccaggaatcattctacaatttgggccgtggccttcatcagttggggctgattcatcttgcaatccactattatcagaaggccctggagctccctccacttgtggtagagggtatagaacttgaccagttagacttacgaagagatattgcctacaacttgtctctcatctatcagagcagtgggaataccggaatggctcaaacgcttttgtatacctattgttctatataaagcaccgcaactgagaacagagcaatggcagctgctgtgtgaggaccagtgtcttctgtctcagggcttattatttgtaactccaaaatagaaatgacaatttcagaattacctaacaaacagtgtatttatttttaatatgtgataatgatcttgtggtatatatgcaaaattattcctacaaaaatttgtatattggtctgtcattttcctttcacattctatagtgaattgttcccaatgttgaaatggacgtgtaagcctttgagctagcttggagtcgaatacactatttttcactcacaccatttattcatctttgtatttaatacctatagctctgtcaatatcacatgaggcagtttttcaaatacgtataaacagaggttgcttattattaaaggaaagacaaagtgggactctttatgatgtcatgacccatgataactaagcacctaagaaaattatttaaactagttatcgtggtaggcagaaagacaaataatttagttttttacttttcaccagcatgtatcttagctacctaaactgaaacatgggaggctgggcttaattcaaaatatattgctccaaggcaaataaaaaaatgctttatctaaaagtcgacgcggccg

SEQ ID NO: 63694 - DNA, 1551 bp, Homo sapiens
gtggaagggccttcatacatgcttcccatcttcaggaacatcagagaattcatactggggagaaaccattcaaatgtgatacatgtggtaagaacttccgtcgtagatcagcacttaataatcattgcatggtccacacaggagagaaaccatacaaatgtgaggactgtggtaagtgtttcacttgtagctcaaaccttcgtatccatcaaagggtccacacaggagagaaaccttacaagtgtgaagaatgtggtaagtgctttattcagccttcacaatttcaggcccatcggagaatccacactggagagaaaccatacgtatgtaaagtgtgtggtaagggtttcatttacagttcaagttttcaggcccatcagggagtccacactggagagaagccatacaaatgcaatgagtgtgggaagagcttcagaatgaaaattcattatcaagtgcatctggtagtccacacaggggaaaaaccctataaatgtgaagtatgtggtaaagccttccgtcagagttcatatcttaaaatccatctgaaagcacatagtgtacagaaaccttttaagtgtgaagagtgtgggcagggcttcaatcagagctcacgacttcagattcaccagctgatccataccggtgagaaaccatacaaatgtgaagagtgcggaaagggatttagtcgtagagcagatcttaaaattcattgtaggatccacacaggggagaaaccatataattgtgaggagtgtgggaaggtcttcagtcaggcctcgcatcttctaacccatcagagagttcacagtggggaaaaaccatttaaatgtgaagagtgtgggaagagcttcagtcggagtgcacaccttcaagcccatcaaaaagtccacactggagaaaagccatacaaatgtggggagtgtggaaagggcttcaagtggagcttgaaccttgacatgcatcagagggtgcacacaggagaaaaaccctatacatgtggggagtgtgggaagcacttcagtcaggcctcaagtctccaacttcatcagagtgtccacacaggagagaaaccatacaaatgtgatgtatgtggtaaagtcttcagtcggtcttcacaattacagtatcataggcgagttcacactggggaaaaaccttacaaatgtgagatatgtggtaagaggttcagctggcgatcaaatcttgtaagtcatcacaaaattcatgctgctggtacattttatgaaaatgatgagaatagtaagaacatcagagagttgtcagagggaggaagttctacaaggtgattaaaaaaaaaaaaaccaaacctcttgtccaccctgaaggcttgaaattaaatttcataggggggaaaaattttttttatcaccctttttgaatttatttgattggaaacgctccacatttccccctaaactttttttggtttttaatttttggtttggaaacaaaatctccttttgttgcccatgctggaggcaggggggctatttaagttcactgaaacctccatttcccgggttaaga

SEQ ID NO: 63695 - DNA, 494 bp, Homo sapiens
cgaacccggaagtgagatgcaaggcggcgattttcccttctgtcagatcttgatgaacaaagcagtcataattcatctctagaaagatttatatcctggcatttgaaatgctttttatttagaatagtagtaaaaaatggaaaaagaaaaaggaaatgatgatggaataccagaccaagagaattccttggatttttctgaacactttaaccaacttgaattgttggaaacacatggacaccttattcctactggtactcaaagtctttgggtaggcaattctgatgaagatgaggagcaagatgacaaaaatgaagagtggtatcgattgcaagaaaaaaaaatggaaaaagacccaagcagattgcttctttgggctgctgaaaaaaatcgggtaaaaaaaaaaattacagagggaagtgtgacagtaggaaaagcactgggttcaagccaaaagacctgcctttactgttatggccatcatacctatctct

SEQ ID NO: 63696 - DNA, 1877 bp, Homo sapiens
aagggttggcgggggttggaggtggggtggcgttattggtttctggtttatattgttccacaaggatcacacaacctagatcttttgcatgcacagttcacaatagggttcccactcctgtgagaatctaatgtcactgctgatctgacaggaggtggagctcaggctgtaatgctcacttacctgctgctcacctcctgctgtgtggccgggttcctaagaggccacagatcagagctagtctatggcctgagggttgggaagccctgctctaggtaacataatccccttatgagaaattagacagatgacattgagatgcaagggaaagcatctcctgatgaaaccatcccaatatcacgcataaatgaaggcagtgatacaatgtcccttatacaatttataatctcttaaaggaagcaataaacatttaaactattggactactgggatgtacattttaccagataccagcatcataatcttataactctatatgaaagtttgaaaaaataattataaagtttatttaaatgttgattgtcccaaggtctacagtttcttttctgttgtgtcatcagtgacaaagagtaaaaaaaggaaactcccatatttagcactttagagtaaaacacatggatcatcgttattaacagtcctctgggcgtgctggagctcactgagaaggcttctattttgagcttggaatgttgtgctgagctgtgcagcctgttcctgcatctgttgttcctgcattttctgttgctctgccagccaattttgtttggctatctccatttgtctcacttgttcctgatggagtctctccctctcctgcatcatttgctcgttctgcctttgaatcgccgccaacctttgcgcttcagccttttcagcttctgctttcacttgtgcctctttcttctttttttccgtctctgtgagagcctggtcagtctgtaatattgcatgactcacagactccttggactttaaatatttctgcagaacttcttcagcctgtattcctttccgaggctcccgatagtactttgccttcagttcttctgttttctgaatgaagagattatggcctcctggcttagaataaattccctgcttcactgcttcttctagaggaccaaaaatatccttaagtaaagccgagcaataatccgaggatgcttccaggttccgtttacaaatgtcattctgttttgcatctagtagagtctccaattctttctggaaactttggtctacatccttgaaagagtttttcatgaagacttcaatggcctccctctcactggtcctgtgcaggtccagcagctcctggagggtttccatgggcagctgcactttctggcccatttgctggtcatagtgggcaatggccttttgcactgcagctgagttctctctctgagccaaggccaggactgcattctctatgcaaggcagatccccactgctgatggcattgacataggtcagcaccaggttctttagacgagatccattgaccatgatgccacctggaagagtcttggtcatagaatggctaaagatgtaggaacagaattctgtcacttgttgcacaaattcaggctctagctcatcatcaggcagtgtttcaagttgggcaagctttttttggtgagcaggtaagtcaaagataaagcatttcttttttggaaagaacttctgtatacacagacggggcaaattgaaattttgaactctttgatcactaccttgctttggccttagggaattctccaggtattcatctggtgtgacaagttgcccatctatttccaggcctaagcagaaatctctcagagtccacactaagtctgggaagaagctcgcag

SEQ ID NO: 63697 - DNA, 4157 bp, Homo sapiens
ccgcgcgcggcggcccgaggcggcggcggggacgcggggacgcgaggacgcggctttgtgcaggcgggtcgcggggcgcccatggcggagtgcggccgggggggcgccgccggcggggccctgcccacctccccgggcccggccctcggcgccaagggcgccctgaaagccggagtgggggaaggcggtggcgggggaggtcgcctcggccacgggcgggcgcgctatgacagcggcggggtttccaacggagactgcagcctcggcgtgtccggggacgaagcccgggctagccctaccaggggaccccgcggcgttgcgctcgccccgacccccagcgcggtcgtctgtaccctcccccgggagagcaagccgggcggcctgccccgccggagcagcatcatcaaggatggtacaaaacagaagagggaacggaaaaagacagtctcattcagcagcatgccaacagagaagaagatcagcagtgcaagtgattgtattaattcaatggttgagggttcagaactcaaaaaggttcgctccaactctagaatttatcataggtactttttactggatgctgacatgcagagcctaaggtgggagccatctaagaaggattctgagaaagccaagattgacattaaatccatcaaggaagtgagaacaggaaaaaacacagacatattccgcagcaatggcatttctgaccagatatctgaagattgtgcgttttccgtcatatatggagagaattatgagtcactggatttggttgccaactccgcagatgttgcaaacatctgggttacaggactgcggtacctaatttcttatggaaaacatacacttgatatgttagaaagtagccaagataacatgaggacttcttgggtttcacaaatgtttagtgaaattgatgtagataaccttggacatataactctgtgtaatgctgtgcaatgtatcagaaacctcaatcctggtttaaaaacgagcaaaattgagcttaagttcaaagaattgcataaatcaaaggacaaagctggtaccgaggtcacaaaggaagaatttattgaggtttttcatgagctttgtactagacctgaaatttatttccttttagttcagttttcaagcaataaagaattccttgataccaaggaccttatgatgtttcttgaggcagaacagggtgtggcacatataaatgaggaaataagccttgaaattattcacaaatatgaaccatccaaagagggtcaggaaaagggctggctctccatagacgggttcactaattaccttatgtcacctgactgttatatattcgatccagaacataagaaggtctgtcaggatatgaagcaacctctgtctcattactttataaactcatctcataatacatacttaatagaggatcagttccgaggtccctccgacatcacaggatatattcgagctcttaaaatgggttgccggagtgttgaattagatgtatgggatgggccggacaatgaacctgtaatttacacaggccacaccatgacctctcagatagttttccgcagtgtcattgatattattaacaagtatgcattctttgcttcagagtatcctcttatcttgtgtttagaaaaccactgttccattaaacaacagaaggtaatggttcagcacatgaagaaacttttaggagacaagctctatacaacatcacccaatgttgaggaatcttatctaccatccccagatgtcctgaaagggaaaatactaattaaagcaaagaagctgtcctcaaattgctctggggtagaaggagatgttactgacgaagatgaaggagcagaaatgtctcagaggatgggaaaagagaacatggagcaacccaataatgtgcctgtgaagcgatttcagctttgtaaagaactgtctgaactggtcagcatctgcaaatcagttcagttcaaagaatttcaggtgtcgtttcaggttcagaagtactgggaagtctgttcctttaatgaagtgcttgccagcaagtacgccaatgaaaatccaggggactttgtaaattacaacaaacgttttcttgctagggtttttcccagtccaatgagaattgattccagtaacatgaatcctcaagatttttggaaatgtggttgccaaattgtagccatgaactttcagacaccaggactgatgatggacctgaatattggctggtttaggcagaacggaaactgtggctatgtcctccggccagccatcatgagggaggaggtctccttcttcagcgccaatacaaaagactctgtcccaggggtctcacctcaacttcttcacattaaaatcatcagtgggcagaactttcccaagcccaaaggatcaggtgccaaaggtgatgtggtagatccttatgtctatgttgaaatccatggaatccctgctgattgtgcagaacaaaggacaaaaacagtgcaccagaatggagacgctcccatttttgatgaaagctttgaatttcaaatcaacctgcctgaactggccatggtgcgctttgtagtgctggatgatgactacattggggatgaattcatcggccagtacacaattccctttgaatgtttacagacgggctaccgccatgtccccctgcagtccttaactggagaggtccttgcacatgcttctttatttgtccacgtggctattactaaccgaagaggaggagggaagcctcataaaaggggcctttctgtgagaaaagggaagaaatccagggaatatgcatctttgagaacactgtggattaaaaccgtggatgaggtattcaagaatgcccagccccctatacgggatgccacagatctgagagaaaacatgcagaatgcggtggtgtcattcaaggagctgtgtggcctctcctctgtggccaatctcatgcagtgcatgttggcggtgtctccccgctttctggggcccgataacacacccctagtggtcctaaatctcagcgagcagtaccccacaatggagctgcagggaattgtgccggaggttctgaagaagatcgtaacaacttatgacatgatgattcagtccctcaaggcgttgattgaaaatgcagatgctgtatatgaaaagatcgtacattgtcagaaggcagccatggaattccatgaacacttgcacagcataggcaccaaggaaggtttgaaggaaagaaaactacaaaaagcagtggagagctttacctggaatattaccatcttaaagggacaagcagatcttttgaaatatgctaagaatgagacattggagaacctgaaacaaatccattttgctgctgtttcatgtggactgaataaaccaggcaccgaaaatgctgatgtccagaagccacgccggagcttggaagtcatacccgaaaaagcaaacgatgaaactggagaatgaggaaacttacaataaaccattatggagtttataactctaggaccaattgtagtcagatgggacatttgctttgcactcactaatgagaataatattcgggattttaaagcacaactggaatagctaattacagtctattaaaactgtgaatgtatgtagcaatcctgcgtgtgaaggcaaataaactctttaacaggcaattatattgctggccaaaatatgctatatttgtatacaaagacattctaactcagttccagtatgaagaaagattattcactctagctccactgagaaacattttcctaagtgaaaacaatttcttaagatggaaatggattggattgtcaaattattatttattggagaaaaaaacctgatctacacatttttacttatatggggttgccagagtctctgggttctagatgattttggtggcatgcttgctgagccataattactaaagagaatgtaagtggacgggttccctgaatccccggggtccttggagagccatcgaggagaatgtgcaattggactgaagctccctggctgaagatacatgccgagtcagcacatgggtagagatgatgtaaaagcagccaatctggaaacaatacattgtaaatagtttttcattgtatgaagtagtgttcacattaaaaagatgttttatgataaaaaaaaaa

SEQ ID NO: 63698 - DNA, 5185 bp, Homo sapiens
gcttatattacttatatgctagtttggatccaaatgctgtaaaagctctcaacgaaatgtggaagtgtcagaacatgcttcggagccatgtacgcgaactattggatttgcacaagcagcctacatcagaggctaactgttctgccatgtttggaaaactgatgaccatagcaaagaatttgcctgaccccgggaaagcacaagattttgtgaagaaatttaaccaggttctcggcgatgatgagaaacttcggtctcagttggagttattaattagcccaacctgttcttgcaaacaagcagatatttgtgtgagagaaatagcccggaaacttgcaaatcctaagcaaccaacaaatccttttctagagatggtcaaatttctgttggaaagaatcgcacctgtgcacattgattcagaagccataagtgcactagtgaaattgatgaataagtcaatagaggggacagcagatgatgaagaggagggtgtaagtccagatacagctatccgttcaggacttgaacttcttaaggttctgtcttttacacatcctacctcgttccactctgcagagacatatgagtccttgttacagtgcctaagaatggaggatgacaaggtagcagaagctgctattcaaatttttagaaatacaggtcacaaaatagaaacagaccttccccagatacgatcgaccttaattcccattttacatcaaaaagcaaagaggggtactccacaccaagcaaaacaggctgtgcactgtatacacgccatattcacaaataaagaagtccagcttgcacagatttttgagccactcagtaggagtctgaatgctgatgtgccagaacaacttataactccattagtttcattgggccacatttctatgttagcaccagatcagtttgcttccccaatgaaatctgtagtagcaaattttattgtgaaagatctgctaatgaatgacaggtcaacaggtgaaaagaatggaaaactgtggtctccagatgaagaggtttcccctgaagtactagcaaaggtacaggcaattaaacttctggtaaggtggctgttgggtatgaaaaacaaccagtctaaatctgccaattcaacccttcggttattatcagcgatgttggttagtgagggtgacctgacagagcaaaagaggatcagtaaatctgatatgtctcgcttgcgattagctgctggtagtgccataatgaagcttgctcaggaaccttgttaccatgaaattattaccccagaacagtttcagctctgtgcacttgttattaatgatgagtgttaccaagtaaggcagatatttgctcagaagctgcataaggcacttgtgaagttactgctcccattggagtatatggcgatctttgccttgtgtgccaaagatcctgtgaaggagagaagagcacacgcacgacaatgtttactgaaaaatatcagtatacgcagggaatacattaagcagaatcctatggctactgagaaattattatcactgttgcctgaatatgtagttccatacatgattcacctgctagcccatgatccagattttacaagatcacaagatgttgatcagcttcgtgatatcaaagagtgcctatggttcatgcttgaagttttaatgacaaagaatgaaaacaatagccatgcctttatgaagaagatggcagagaacatcaagttaaccagagatgcccagtctccagatgaatccaagacaaatgaaaaactgtatacagtatgtgatgtggctctctgtgttataaatagtaaaagtgctttgtgcaatgcagattcaccaaaggacccagtcctcccaatgaaattttttacacaacctgaaaaggacttctgtaacgataagagttatatttcagaagagacaagagtacttctgttaacaggaaagccaaagcctgctggagtactaggtgcagtaaataagcctttatcagcaacgggaaggaaaccctatgttagaagcactggcactgagactggaagcaatattaatgtaaattcagagctgaacccttcaaccggaaatcgatcaagggaacagagttcagaggcagcagaaactggagttagtgaaaatgaagagaaccctgtgaggattatttcagtcacacctgtaaagaatattgacccagtaaagaataaggaaattaattctgatcaggctacccagggcaacatcagcagtgaccgaggaaagaaaagaacagtaacagcagctggtgcagagaatatccaacaaaaaacagatgagaaagtagatgaatcgggacctcccgccccttccaaacccaggagaggacgtcgacccaagtctgaatctcagggcaatgctaccaaaaatgatgatctaaataaacctattaacaagggaaggaagagagctgcagtgggtcaggagagccctgggggtttggaagcaggtaatgccaaagcacccaaactgcaagatttagccaaaaaggcagcaccagcagaaagacaaattgacttacaaaggtaaaaatgcatttgcaaagggagaaaatgaaggccaaacagaagcaggctccagcttctgcaaaaacttggattcacaaatgtccctgaacagaaaatgaagctcacttcagaacacacactctctgccttgaaaactaaagagactattacttccttttcacatgaccacaagtcctctgatggaaatgtacagcagaaactcttgagagagaggctaaaagcaactctgttctcccccttcccctagacttttcttacgaaaagtcaataattaagcaaattgcttaacacttggttccagttcctgcctatctggagtttaaatgcgtaatacaccattaatttccacgctgcagtttttattttaaagaaagtaacaagatgtctttacactgacactgaaaattcatccattttagagccaggaattcccatgttacacaggaaaaaatagaagtctactgaattaattttttaaaagaaaagagatcagattaaatatttctttgtttttccttttggaaacttttatgtataattctttctgcctgcctacttttctgcaaaaatgagatgtacagatttcggttccctgctatgaaaagtgatgtggtagcaattttataaatgttgctttctgatttttatcagagtgagaaaattaaaattattgatttgcaagtagtaaacagttcatattttgatttcccctcattttagtttaatataatttgcaataaatgtacatattgttgtttgtttcataaagcatatcactttaaaatggtttttactcctgtgattatgttggaatatttggaattttaaaggagtaaagactgtccagcatttggttttataatgtttgtcaccagatttttattaatgtaaaaaaaatcaatttttaaaaaatagttggactttggcagcttttaaggaaagttggaggtgttttaggattgctatcaattttcagcattgtgctatttggaaataagtgttttgcttttgtctgatggtctgggctcatttttatgtttattttagaaaactgttgcatcaatatattatgtttcttggcattgttcagcataggtaatgtgtgcactttatgtgtacacataatcatatttaagttttttgcataaaataaatgcttctagatgtcatggcagtctttttaatctttttatcatatgctttcttgtgaattttttcatgttaaagagctaaagtcataacatgattacagtcaactctccattatctatataaaatagtgactaagcctcaggtttttaattttgtgataacaaaataacgaaggcatgtaagacctgattctggaggaacatgaaatttgtcttttctcatgtccagagttctatcctgcccccactgtccactgtagggtcatccgcaaagccctagcagaatgtgctcactccatttccttacacgtttctagcatgggtcagaggaaacaacatttgtgttataacttcgtcttgataggctgtagtgtacatgggatgtaaaacaaacaagtgtatcaaaggtggatgattctgttagagtgaagtttgagagtaaatgtcacttacgtttctcatagataatcaagagttggctgtgtattgactgaaagatgggtaattattttaaatatgcatttacacacatttaggtatcagaagatgcttagggaacaatggataccaatgatagaaaatgatacctttacaggggcagaaaaatccccactcttccttattgcctcttcagaaccctttagaaagtataaaatattgcctccaacatgctgaaaaagagtatctatgcataagtatcagagaagtccctcaagcaatcagtaggtgtgttctatttagagagagtttaaagttctcttagcatcagacaacttgattcctaaggtttccagtgtgtcaccaacaaaaagtgcattgatagggacctttgtctcttcctccctttgattaattgcccggcatcacagtttactagattaccaagtgttacatcatattaaataaaatgtagcagaaccatctgcatcaatatattcctgtttagatttttgcaggagagaagttaaaaggatttgctccttgtatgatgtaagtggcccaccccaattttgtaacatgatgcaagtgtctggcactaagggaagcaagagtagggttgtggaaagaccaagctgatggggagggacttgtttacgggaatttttttagttttccttttcaaaggaaaacattaaaatcccttaggaatttggtattcacatctcagagaactacaacacaaaagtgcagacttatatttgagaattaatgttaaccctttgtgtctagtttgaagcttcttgtatttgtctaaaacaacaagccagaattttgtatctcctttgataaaaagtgtgtataatgtaaagtagttttgcatattcttgtgctgcacatgggctgaatttttaaatttttttttaaaaacttgaagcagaaccttgtaatttgtgtaaatgacaagtgtaaaactcctaccataaaatgctaaaaatatgcactgtttccaataaaaccaagaaatgcagcattataa

SEQ ID NO: 63699 - DNA, 633 bp, Homo sapiens
ctcattgccagattcaggtgttgtggaatacttaagcaatggaggagtagctgacaaccataaagacttcggggaactaaggtacaatgagtgtcttatgaacttcagctgcaatggaaagaatggaagctcagaagggagaatcacacatggcttccaacttaagagcgcctatgaaaataacttgatgccttacaccaattacacctttgatttcaaaggcgtgattgactacattttctattccaagactcatatgaacgtgcttggtgtcctggggcctttagatcctcaatggctggttgagaacaacatcactgggtgtccacaccctcacatcccttcagaccacttctcactgttaacacaacttgaactccaccctccactcctgcctcttgtcaatggtgttcacttgcctaatcggaggtagtggagtactgccccgccaagacggggatctgttgctatggacctgtacagttgtaaatcaaagtatgtaggagtgaagtatggccatccttaagctgcttcttcaggtttctttcattatgtggttgctgtaagactttgtacatttttgtgcatattggtatcatttggcagtagggctggaaccaaagtattactctt

SEQ ID NO: 63700 - DNA, 1554 bp, Homo sapiens
  misc_feature (1)...(1554): n = a,t,c or g
ttttttatctgtacagaaatatttactttagatgacaaaagaactcaagatcacagtacacagcagttatttatttaaatacttgaaaaggctgatgatggaaaaaataggtttatcatgagagtttatattcattagatttattttatcatttaaaaaattactgcctctaggttatcctagcctgatatagaacacttggtgacacatgcagttactgtaatatactataacagacacagccattatagaatgatttacacttgggatgaaattcaacagtagtaagggtgactctttatttaaactaaaaacattggtaatatacaaattttttttttatttcattgaaagggctataaaattcaacatactgacaaggaagcaacataatcacatagataacgcctctgctaattgcttttacctaacttcacccttaaaggtgagctgcacactcagctacacaagtttttagactgtgcgatgggcttcaaggctgggcctaccacaactgactgaaaaaatgtcatgttggtaagctgacactgacttgtatgtttttaaaaatggagagacaatggcaaattgtaccttatgtccttatagaacccaaaggatcattctgagtaaatgtgaaataaataaagtgatccatgagtaaatacaatctctgggctaacttaaacctagaagagtgagccaagtgagcactaacaataccacttagaaatgtctagaaacatcatttctagaactcagcttgggagaccatatcttgcctgaatatgtacatatatttacaaaatattcccttttggcctctggaatttagccattttagtttggctgttagctgttttctttccatatgctagccaatactgcagttataactatcattaaaatactcttatgcatgaattacaaatattaataaagtaactctgcatgtataaatatctcaataattctagcagaacttaaagcattcagaatgtacataaaagtatttgtttttggtagggacagtatttctttttatatcatcgctgtttcaataatgctttgtacatagcaaagcccaaaactgcaaaaacagtagcaccaaaacttgctcgaagccaaaacgtggagctcttgaggtcagcttgtgtcacgtgcggatacatggccattgttgtcaatttaacaaagatatccttactgggggcatcagcagtattgcaagtgaaggcttgtggtggaggcattttgtgtttcctgcagaaatcagtaggtgaaatactgtattcttgtttaacttcatgcaggtctgactttgcagctacgattaagcaaggtattctgctgtccataaagtgttgcttaaaaatcctggcacagtattcaaaggatttgggattgctgacatcatataccaggcatacaacatcacaaatgatctcagcttcagttagaaattccgattttgagatatcatgcaacaacaagtatttctcttgtccctcgtgccgaattcgaacgtnnnngatcctcaaaaaagcgagaacg

SEQ ID NO: 63701 - DNA, 2790 bp, Homo sapiens
acagaatcacagttgccagagaaacatcagcgggctttagctggggcagagcttagcaagtgttggggtatcagcagttagtcactgtttgcctggaaccacaggatgtgaatcctagttcctggattccaaggaatcctgcatccaggtgtttattgtgctttgcagagtcaacatcaagctcaggagctggttgcagacatagatgagtgtgaagtttctggcctgtgcaggcatggagggcgatgcgtgaacactcatgggagctttgaatgctactgtatggatggatacttgccaaggaatggacctgaacctttccacccgaccaccgatgccacatcatgcacagaaaatagactgtggtacccctcctgaggttccagatggctatatcataggaaattatacgtctagtctgggcagccaggttcgttatgcttgcagagaaggattcttcagtgttccagaagatacagtttcaagctgcacaggcctgggcacatgggagtccccaaaattacattgccaagagatcaactgtggcaaccctccagaaatgcggcacgccatcttggtaggaaatcacagctccaggctgggcggtgtggctcgctatgtctgtcaagagggctttgagagccctggaggaaagatcacttctgtttgcacagagaaaggcacctggagagaaagtactttaacatgcacagaaattctgacaaagattaatgatgtatcactgtttaatgatacctgtgtgagatggcaaataaactcaagaagaataaaccccaagatctcatatgtgatatccataaaaggacaacggttggaccctatggaatcagttcgtgaggagacagtcaacttgaccacagacagcaggaccccagaagtgtgcctagccctgtacccaggcaccaactacaccgtgaacatctccacagcacctcccaggcgctcgatgccagccgtcatcggtttccagacagctgaagttgatctcttagaagatgatggaagtttcaatatttcaatatttaatgaaacttgtttgaaattgaacaggcgttctaggaaagttggatcagaacacatgtaccaatttaccgttctgggtcagaggtggtatctggctaacttttctcatgcaacatcgtttaacttcacaacgagggaacaagtgcctgtagtgtgtttggatctgtaccctacgactgattatacggtgaatgtgaccctgctgagatctcctaagcggcactcagtgcaaataacaatagcaactcccccagcagtaaaacagaccatcagtaacatttcaggatttaatgaaacctgcttgagatggagaagcatcaagacagctgatatggaggagatgtatttattccacatttggggccagagatggtatcagaaggaatttgcccaggaaatgacctttaatatcagtagcagcagccgagatcccgaggtgtgcttggacctacgtccgggtaccaactacaatgtcagtctccgggctctgtcttcggaacttcctgtggtcatctccctgacaacccagataacagagcctcccctcccggaagtagaattttttacggtgcacagaggacctctaccacgcctcagactgaggaaagccaaggagaaaaatggaccaatcagttcatatcaggtgttagtgcttcccctggccctccaaagcacattttcttgtgattctgaaggcgcttcctccttctttagcaacgcctctgatgctgatggatacgtggctgcagaactactggccaaagatgttccagatgatgccatggagatacctataggagacaggctgtactatggggaatattataatgcacccttgaaaagagggagtgattactgcattatattacgaatcacaagtgaatggaataaggtgagaagacactcctgtgcagtttgggctcaggtgaaagattcgtcactcatgctgctgcagatggcgggtgttggactgggttccctggctgttgtgatcattctcacattcctctccttctcagcggtgtgatggcagatggacactgagtggggaggatgcactgctgctgggcaggtgttctggcagcttctcaggtgcccgcacagaggctccgtgtgacttccgtccagggagcatgtgggcctgcaactttctccattcccagctgggccccattcctggatttaagatggtggctatccctgaggagtcaccataaggagaaaactcaggaattctgagtcttccctgctacaggaccagttctgtgcaatgaacttgagactcctgatgtacactgtgatattgaccgaaggctacatacagatctgtgaatcttggctgggacttcctctgagtgatgcctgagggtcagctcctctagacattgactgcaagagaatctctgcaacctcctatataaaagcatttctgttaattcattcagaatccattctttacaatatggcagtgagatgggcttaagtttgggctagagtttgactttatgaaggaggtcattgaaaaagagaacagtgacgtaggcaaatgtttcaagcactttagaaacagtacttttcctataattagttgatatacttaatgaggaaaatatacttagcctgggccatgccaattaagtttcctgctgtgtctgtttagggcagcattgctttgatgcaatttctattgtcctatatattcaaaagttatggccaccatcccgttaaaattatcccgtaattaaa

SEQ ID NO: 63702 - DNA, 2394 bp, Homo sapiens
tcattccttagtgccccgcttattggtgctctttctgatgtttggggccgaaaatccttcttgctgctaacggtgtttttcacatgtgccccaattcctttaatgaagatcagcccatggtggtactttgctgttatctctgtttctggggtttttgcagtgactttttctgtggtatttgcatacgtagcagatataacccaagagcatgaaagaagtatggcttatggactggtttcagcaacatttgctgcaagtttagtcaccagtcctgcaattggagcttatcttggacgagtatatggggacagcttggtggtggtcttagctacagcaatagctttgctagatatttgttttatccttgttgctgtgccagagtcgttgcctgagaaaatgcggccagcatcctggggagcacccatttcctgggaacaagctgacccttttgcgtccttaaaaaaagtcggccaagattccatagtgctgctgatctgcattacagtgtttctctcctacctaccggaggcaggccaatattccagcttttttttatacctcagacagataatgaaattttcaccagaaagtgttgcagcgtttatagcagtccttggcattctttccattattgcacagaccatagtcttgagtttacttatgaggtcaattggaaataagaacaccattttactgggtctaggatttcaaatattacagttggcatggtatggctttggttcaaaaccttggatgatgtgggctgctggggcagtagcagccatgtctagcatcacctttcctgctgtcagtgcacttgtttcacgaactgctgatgctgatcaacagggtgtcgttcaaggaatgataacaggaattcgaggattatgcaatggtctgggaccggccctctatggattcattttctacatattccatgtggaacttaaagaactgccaataacaggaacagacttgggaacaaacacaagccctcagcaccactttgaacagaattccatcatccctggccctcccttcctatttggagcctgttcagtactgctggctctgcttgttgccttgtttattccggaacataccaatttaagcttaaggtccagcagttggagaaagcactgtggcagtcacagccatcctcataatacacaagcgccaggagaggccaaagaacctttactccaggacacaaatgtgtgacgactgaaatcaggaagatttttctatcagcacccaggtcttagttttcacctctagttctggatgtacattccatttccatccacagtgtactttaagattgtcttaagaaatgtatctgcatgaactccgtgggaactaaaggaagtgggaacttagaaccagacagttttccaaagatgttacaatttcttttgaaaaaccttttgtttattagcaccaatttctcgccactaagctatttgttttattatacatcctttaattaaaaactatatatgtaacttcttagatattagcaaatgtctctgctaccatttccttaaggtgttgagctttaactctatgctgactcagtgagacacagtaggtagtatggttgtggacctatttgttttaacattgtaaaattttgagtcagattttaatattgtaaaatcttgggtcaaataattcaaagccttaatgcagatgcactaaaacaaagaaatggtaaatgaattgtttgcatttaaaaaaaaaaactcttaagaaaactgtactaaatctgaatcatgttttgagcttgtttgcagtacttttaaacattattcactactgtttttgaagtgagaaagtatcagccatttagcatttaagttggggtatttagagcctgtaatctaaatgctggctcaaatttattccccagctacttcttataccactattcttttaatgtttgcataatcataagcacctcaacacttgaatacataatctaaaaattatatagtaaagctggtagccttgaaaatgtcagtgtgatatctattatgtagataaatatatatagtggcctttcaggactgtcacagtaacactttatttacagagctaatgtttgtcctaaattttcaggaccctagaggagagctttatacaattaccgatgtgaatttctctaaagtgtatatttttgtgtccagttatattatttaaaaaagtgttactttgtaaaaattgtatataaagaactgtatagtttacactgttttcatcttgtgtgtggttattgcttaatgctttttaaacttggaacactcactatggttaaataaaggaattaaaagaaatgaaaatattaagttaataaagttaaatattttaatgattttttttttaaaaaaaaaa

SEQ ID NO: 63703 - DNA, 1505 bp, Homo sapiens
cttcaaaatgctatgttgctgttgttcagtaattaagtcttgttatcctctctacaagattcttgaccactcgcaatctgcatttatttcctattacattgtctttcaatgtaagctcttcaaattaatcaccatatttttaccatacagctgcacaaaagctttagaaaaaagtttcacagaagcatcgaaagcaagcaatatatgtaaaaaatttttttttactaaatcagcataacagactaaaggtgcagcatctgctttcatgttacatttggcaaaaacaaaacaaaaagcacccccaaacccccaaaataacaaaaatctcaagcaagtagagacgataaacttcataacacaaaagaaagattcaaaacctgttccctcagtgattgctgttgtcagtttgggcatgcaggcaaatttgttataaccatgatgggaaatgaaaatattttaaggaatccaggacagtatttctatttaaccactaattcaaaaaccaagaaggaagaaaaaataacacaaggggacaccatacatacataaacatgaaaagctagcttacataattacataattagaaaagttaaataatttagtaaaaataaattcccagtataaacccaaaaaagcatagctataaatgcaatccaaaacaaccaattagtaagctggtcatgtttttactggaaaacaacctttctcatttttgttcttacacaagcaagtaactggagaagcaggccagagtgcatacgaggatttaaacatggttgtatctgtggtactttagatgcaactttaccctgttcatttgaaagtttaaatagacctgtctgctacacagactcggatgggccaaataagtcatctgatatgctgctgaatggctgagagtctattagttggcttatttcattatcaaggtcttcttctgtatcatctgtgtacttgcttatttttttggagtgctggtctaaagacagactttctaaagtttctatatcttcaatgcctgctctgtagtgaatcataagaagtgttagagcttgtagcctttcacctgatttagctaaggcagcagaaagaagtgattttttccttgtatcagttgtctctttttcttctctaacaagggaattattgtgttccaactcctgatcaatttcattctgtagcttatccaacatgaactctagtttctggatcctttcctctgtaggcaagcccctgtacagatcacgaccaatttctttaactgcaatgaaaacactgtcatccagaccaccctcttttctcactaactttattcctgtgctgtttccccgtttagaaggactgtttggaccacagacctccgtgtcactgccttcgttgtctgacgtgttgggtgtgtgttttggtgaaggttctacgagatcggttcctggttcagaaaggcgagttttagagacttgacgcaaatttaataaacgagaactagtattgatcccacgcgtccg

SEQ ID NO: 63704 - DNA, 1025 bp, Homo sapiens
tgttcggcaccgctccgttttgccgggtcgacccacgcgtccgcccacgcgtccgcccacgcgtccgacacaacttttggaggaagatggggaatcttactggtgccgtgcactattccaattaggcgagagtgaagaacacattgagcttgtggtgctgagctatttggtgcccctcaaaccatttcttgtaatagtggctgaggtgattcttttagtggccaccattctgctttgtgaaaagtacacacaaaagaaaaagaagcactcagatgaggggaaagaatttgagcagattgaacagctgaaatcagatgatagcaatggtatagaaaataatgtccccaggcatagaaaaaatgagtctctgggccagtgaatacaaaacatcatgtcgagaatcattggaagatatacagagttcgtatttcagctttgtttatccttcctgttaagagcctctgagtttttagttttaaaaggatgaaaagcttatgcaacatgctcagcaggagcttcatcaacgatatatgtcagatctaaaggtatattttcattctgtaattatgttacataaaagcaatgtaaatcagaataaatatgttagaccagaataaaattaattatattctggtcttcaaaggacacacagaacagatatcagcagaatcacttaatacttcatagaacaaaaatcactcaaaacctgtttataaccaaagaattcatgaaaaagaaagcctttgccatttgtcttagaaagttattttttaaaaaaaaatcatacttactattagtatctatggaagtatatgtaacaatttttatgtaaaggtcatctttctgtgatagtgaaaaaatatgtctttactaagttgaaatgaatactttctgcctttgctcatgatagttattctacaatctccacaagaaaaatataccttttatccggaaatattggtttaaggcaaataaataaaactgtgcttgctctaaagctctgcactacaaaagcaaattttcca

SEQ ID NO: 63705 - DNA, 945 bp, Homo sapiens
ttttttttttttcactagccacaaacatttattgttggggtcaatacgtatatccttttgagaagtgtttcgagccattcatttgataactacaaacacgtcagaatctgttttactggtatatttttggcttgcatgacaagggaaaagagattattgcaaaattatgaatgaagtccaaaaggcctgattaaaaaaaaatctataaaatggaaggattaaacactgcccagccctactgtgtcaacaaagacggtacaattcaaatcaagaagacaatcccatacaagtccagcaaggcagatgttggcaagtagaagttaagcaatctgttatacaaaatgcaaaaggagttaaagataaattacaaaaaataaaaaacaaaattttagtcagaaaactattactacataaagccatataagaatgtgtattagttgtttcctttaagggaaaaggaaatcaaactgttggttttctatttattcagaagaaaaaataaaggaaagtgtttggaaaatatttctgatattaagtgaattatttctcatctgctacctagagtttacaaacaactgacttatccttgtcaatctgtggaaatgagaaaataaaatcagcgtctggccttcgtgggatactcataacacccgaatgaggtccagagtaatcctagatcgggggatgtcaatgttgagtacttggacttccactctttctccggggcccagtccaaggcttcttctcttctttgtttttgaaagttttgcttctgttacatttcgtatgggaatcagcccagatttccccactcctatatccacaaaaattccaaagagagtggcattctcaactttgcctgtaagaactgtcccaatctgcagatcttccaggcatactatgcttctcttgaaatcaggtttatcaaaatctgttcgaaagtca

SEQ ID NO: 63706 - DNA, 1267 bp, Homo sapiens
atcaggttcctgtatgtccactggttttatccgagcagtacaaacacacagctctaaattttttgaagaagatggatccttaaaggaggtacataagataaatgaaatgtatgcttcattacaagaggaattaaagagtatatgcaaaaaagtggaagacagtgaacaagcagtagataaactagtaaaggatgtaaacagattaaaacgagaaattgagaaaaggagaggagcacagattcaggcagcaagagagaagaacatccaaaaagaccctcaggagaacatttttctttgtcaggcattacggaccttttttccaaattctgaatttcttcattcatgtgttatgtctttaaaaaatagacatgtttctaaaagtagctgtaactacaaccaccatctcgatgtagtagacaatctgaccttaatggtagaacacactgacattcctgaagctagtccagctagtacaccacaaatcattaagcataaaaccttagacttagatgacagatggcaattcaagagatctcggttgttagatacacaagacaaacgatctaaagcagatactggtagtagtaaccaagataaagcatccaaaatgagcagcccagaaacagatgaagaaattgaaaagatgaagggttttggtgaatattcacggtctcctacattttgatccttttaaccttacaaggagatttttttatttggctgatgggtaaagccaaacatttctattgtttttactatgttgagctacttgcagtaagttcatttgtttttactatgttcacctgtttgcagtaatacacagataactcttagtgcatttacttcacaaagtactttttcaaacatcagatgcttttatttccaaacctttttttcacctttcactaagttgttgaggggaaggcttacacagacacattctttagaattggaaaagtgagaccaggcgcagtggctcacacctgtaatcccagcacttagggaagacaagtcaggaggattgattgaagctaggagttagagaccagcctgggcaacgtattgagaccatgtctattaaaaaataaaatggaaaagcaagaatagccttattttcgaaaatatggaaagaaatttatatgaaaatttatctgagtcattaaaattctccttaagtgatacttttttagaagtacattatggctagagttgccagataaaatgctggatatcatgcaataaatttgcaaaacatcatctaaaattt

SEQ ID NO: 63707 - DNA, 940 bp, Homo sapiens
ttttttttttttgacgttggcagtgacatttatttttctgggggaggggagttatatacagcagtgacccggagcccctcacccccaccaggcttaggtggggacaggaggcgttggcagaaggcacacagtggcagtagcccagaagaggccaggaagtaagggtgggtatgtgatgtgtcctgggagacccagatgaggaaattgaggctcagtgagggcctcaggtcacacagcaaggtgcgaaggcagctagtcccgagagcttgtggtggttgcttctctcttgcctgggctacaggaggacgcaggggcagcccccgcccttcttcctgggggcactgggagggctcggtgggagctcttgttcctggtatttccggacagcccgcaccagctgctcaaaagcctcgtccacgttgagacgcagtttggccgaggcctcaaagtaggccacgtggtgggaggcgccgaaggcagaggcttctgatcgggggacctggcgctgtgactccagatctgccttgttcccgaccaacacaacggggaagtcgtcgcggtccttgacccgcagaatctgcgtgaagagcttgcccacctcgttgaaactctgccggtcattaatggcgaacaccagcaggaagccgtggccagcacgcatgtactgctctctcatggccccgaactcttcctggcccgcggtgtccaggatgtccagccgggctgggatgccatccacactgcagatcttcgtgtaggagtcctcaatagtggggtcgtagtcagacacgaagtaggactggatgaactggatggtcagcgcgctcttgcccacgccgccgccgcccacgaccaccagcttgtgtgtctcgctgggcggggggtccccgggcccaggtcccccgccccggggccgcccccgccctgtcccggacgccgc

SEQ ID NO: 63708 - DNA, 3821 bp, Homo sapiens
tttcgtcggcagtggcggcgcgtaggaggcggtcttgggcgtctttggtactggcttttttaggggtctgcctggggattacccttgctgtggatagaagcaactttaagacctgtgaagagagttctttctgcaagcgacagagaagcatacggccaggcctctctccataccgagccttgctggactctctacagcttggtcctgattccctcacggtccatctgatccatgaggtcaccaaggtgttgctggtgctagagcttcaggggcttcaaaagaacatgactcggttcaggattgatgagctggagcctcggcgaccccgataccgtgtaccagatgttttggtggctgatccaccaatagcccggctttctgtctctggtcgtgatgagaacagtgtggagttaaccatggctgagggaccctacaagatcatcttgacagcacggccattccgccttgacctactagaggaccgaagtcttttgcttagtgtcaatgcccgaggactcttggagtttgagcatcagagggcccctagggtctcgcaaggatcaaaagacccagctgagggcgatggggcccagcctgaggaaacacccagggatggcgacaagccagaggagactcaggggaaggcagagaaagatgagccaggagcctgggaggagacattcaaaactcactctgacagcaagccgtatggccccatgtctgtgggtttggacttctctctgccaggcatggagcatgtctatgggatccctgagcatgcagacaacctgaggctgaaggtcactgagggtggggagccatatcgcctctacaatttggatgtgttccagtatgagctgtacaacccaatggccttgtatgggtctgtgcctgtgctcctggcacacaaccctcatcgcgacttgggcatcttctggctcaatgctgcagagacctgggttgatatatcttccaacactgccgggaagaccctgtttgggaagatgatggactacctgcagggctctggggagaccccacagacagatgttcgctggatgtcagagactggcatcattgacgtcttcctgctgctggggccctccatctctgatgttttccggcaatatgctagtctcacaggaacccaggcgttgcccccactcttctccctcggctaccaccagagccgttggaactaccgggacgaggctgatgtgctggaagtggatcagggctttgatgatcacaacctgccctgtgatgtcatctggctagacattgaacatgctgatggcaagcggtatttcacctgggaccccagtcgcttccctcagccccgcaccatgcttgagcgcttggcttctaagaggcggaagctggtggccatcgtagacccccacatcaaggtggactccggctaccgagttcacgaggagctgcggaacctggggctgtatgttaaaacccgggatggctctgactatgagggctggtgctggccaggctcagctggttaccctgacttcactaatcccacgatgagggcctggtgggctaacatgttcagctatgacaattatgagggctcagctcccaacctctttgtctggaatgacatgaacgaaccatctgtgttcaatggtcctgaggtcaccatgctcaaggatgcccagcattatgggggctgggagcaccgggatgtgcataacatctatggcctttatgtgcacatggcgactgctgatgggctgagacagcgctctgggggcatggaacgcccctttgtcctggccagggccttcttcgctggctcccagcgctttggagccgtgtggacaggggacaacactgccgagtgggaccatttgaagatctctattcctatgtgtctcagcttggggctggtgggactttccttctgtggggcggatgtgggtggcttcttcaaaaacccagagccagagctgcttgtgcgctggtaccagatgggtgcttaccagccattcttccgggcacatgcccacttggacactgggcgacgagagccatggctgttaccatctcagcacaatgatataatccgagatgccttgggccagcgatattctttgctgcccttctggtacaccctcttatatcaggcccatcgggaaggcattcctgtcatgaggcccctgtgggtgcagtaccctcaggatgtgactaccttcaatatagatgatcagtacttgcttggggatgcgttgctggttcaccctgtatcagactctggagcccatggtgtccaggtctatctgcctggccaaggggaggtgtggtatgacattcaaagctaccagaagcatcatggtccccagaccctgtacctgcctgtaactctaagcagtatccctgtgttccagcgtggagggacaatcgtgcctcgatggatgcgagtgcggcggtcttcagaatgtatgaaggatgaccccatcactctctttgttgcacttagccctcagggtacagctcaaggagagctctttctggatgatgggcacacgttcaactatcagactcgccaagagttcctgctgcgtcgattctcattctctggcaacacccttgtctccagctcagcagaccctgaaggacactttgagacaccaatctggattgagcgggtggtgataataggggctggaaagccagcagctgtggtactccagacaaaaggatctccagaaagccgcctgtccttccagcatgaccctgagacctctgtgttggtcctgcgcaagcctggcatcaatgtggcatctgattggagtattcacctgcgataacccaagggatgttctgggttagggggagggaaggggagcattagtgctgagagatattctttcttctgccttggagttcggccctccccagacttcacttatgctagtctaagacccagattctgccaacatttgggcaggatgagagggctgaccctgggctccaaattcctcttgtgatctcctcacctctcccactccattgataccaactctttcccttcattcccccaacatcctgttgctctaactggagcacattcacttacgaacaccaggaaaccacagggcccttgtcgccccttctctttcccttatttaggagccctgaactcccccagagtctatccattcatgcctcttgtatgttgatgccacttcttggaagaagatgagggcaatgagttagggctccttttccccttccctcccaccagattgctctcccacctttcatttcttcctccaggctttactcccctttttatgccccaccgatacactgggaccaccccttaccccggacaggatgaatggatcaaaggagtgaggttgctaaagaacatccttttccctctcattctacccttttcctctccccgattccttgtagagctgctgcaattcttagaggggcagttctacctcctctgtccctcggcagaaagacgtttccacacctcttaggggatgcgcattaaacttcttttgcccccttcttgtcccctttgaggggcacttaagatggagaaatcagttgtggtttcagtgaatcatggtcacctgtatttattgctaggagaagcctgagggtggggggagatgatcatgtgtgctcggggttggctggaagccctgggtggggggttgggggaggactaatggggagtcggggaatatttgtgggtattttttttacttcctcttggttcccagctgtgacacgttttgatcaaaggagaaacaataaagggataaaccataaaaaaaaaa

SEQ ID NO: 63709 - DNA, 474 bp, Homo sapiens
cgacccacgcgtgcgggatcctatcgaaaaggattggtgcgactgggccatgattagcaggtaggggcagtgatggagggtggctcaggccagggggtggacctgctcattgcaggtagaccctgagtgagagtggggcactcttctccctgggtccaccccctctctcactcaagtcctcttctgcccctaggccttatagcaccctgcgagattgcctggagcactttgcagagttgtttgacctgggcttccccaatcccttggcagagaggatcatctttgagactcaccagatccactttgccaactgctccctggggcagcccaccttctctgaccccccagaggatgtactcctggccatgatcatagcccccatctgcctcatccccttcctcatcactcttgtagtatggaggagtaaagacagtgaggcccaggcctaaggggccacgagcttctcacaaccat

SEQ ID NO: 63710 - DNA, 1837 bp, Homo sapiens
acaaggtgtttggcacccacaaagaccatgaagtttcaacgcttgacacagctataagtgctgtaaaggttcaattagcagaatttctagaaaatttacaagaaaagtccttgaggattgaagcctttgttagtgagatagaatccttttttaataccattgaggaaaactgtagtaaaaatgagaaaaggctagaagaacagaatgaggaaatgatgaagaaggttttagcacagtatgatgagaaagcccagagctttgaggaagtgaagaagaagaagatggagttcctgcatgagcagatggtccactttctgcagagcatggacactgccaaagacaccctggagaccatcgtgagagaagcagaggagcttgatgaggccgtcttcctgacttcgtttgaggaaatcaatgaaaggttgctttctgcaatggagagcactgcttctttagagaaaatgcctgctgcgttttcccttttcgaacattatgatgacagctcggcaagaagtgaccagatgttaaaacaagtggctgttccacagcctcctagattagaacctcaggaaccaaattctgccaccagcacaacaattgcagtttactggagcatgaacaaggaagatgtcattgattcatttcaggtttactgcatggaggagccacaagatgatcaagaagtaaatgagttggtagaagaatacagactgacagtgaaagaaagctactgcatttttgaagatctggaacctgaccgatgctatcaagtgtgggtgatggctgtgaacttcactggatgtagcctgcccagtgaaagggccatctttaggacagcaccctccacccctgtgatccgcgctgaggactgtactgtgtgttggaacacagccactatccgatggcggcccaccaccccagaggccacggagacctacactctggagtactgcagacagcactctcctgagggagagggcctcagatctttctctggaatcaaaggactccagctgaaagttaacctccaacccaatgataactactttttctatgtgagggccatcaatgcatttgggacaagtgaacagagtgaagctgctctcatctccaccagaggaaccagatttctcttgttgagagaaacagctcatcctgctctacacatttcctcaagtgggacagtgatcagctttggtgagaggagacggctgacggaaatcccgtcagtgctgggtgaggagctgccttcctgtggccagcattactgggaaaccacagtcacagactgcccagcatatcgactcggcatctgctccagctcggctgtgcaggcaggtgccctaggacaaggggagacctcatggtacatgcactgctctgagccacagagatacacatttttctacagtggtattgtgagtgatgttcatgtgactgagcgtccagccagagtgggcatcctgctggactacaacaaccagagacttatcttcatcaacgcagagagcgagcagttgctcttcatcatcaggcacaggtttaatgagggtgtccaccctgcctttgccctggagaaacctggaaaatgtactttgcacctggggatagagcccccggattctgtaaggcacaagtgatccttggctttcagaatttgcaagaacagcgatttgaattttgggggggtctgctgttcattcctttaggtgctatacattattcaaaaagtctcccgcgcatttgcactaatgatggctgcatgcatagcaatcagcatgtgagcaaaatcgacaagaaaaccttgactttacagagcagtgtgtgagtaaacaga

SEQ ID NO: 63711 - DNA, 824 bp, Homo sapiens
gcgcggggacacggacgctttcagatcctagagggagtcaggctgaagaggcgggactttcctgtcgtaagagggcggaacttggagtcaggacttctcacgcgaaggcggggcttctcgattttcgagggggcggggctgactgggcctcctgatccccaaaaggggcggggcgggggcaagaggcggggcctctccttcccgggggcgtggtcacaagcgccggctccctccctgcagatggaagggcgagaacgtgtccacgcacgaggtggagggcgtgttgtcgcaggtggacttcttgcaacaggttaacgtgtatggcgtgtgcgtgccaggttgtgagggtaaggtgggcatggctgctgtgcagctagcccccggccagactttcgacggggagaagttgtaccagcacgttcgcgcttggctccctgcctacgctaccccccatttcatccgcatccaggacgccatggaggtcaccagcacgttcaaactgatgaagacccggttggtgcgtgagggcttcaatgtggggatcgtggttgaccctctgtttgtactggacaaccgggcccagtccttccggcccctgacggcagaaatgtaccaggctgtgtgtgagggaacctggaggctctgatcacctggccaacccactggggtagggatcaaagccagccacccccaccccaacacactcggtgtccctttcatcctgggcctgtgtgaatcccagcctggccataccctcaacctcagtgggctggaaatgacagtgggccctgtagcagtggcagaataaactcagatgtgttcaa

SEQ ID NO: 63712 - DNA, 1009 bp, Homo sapiens
tttttttttttattaatatgaacatatgaacctttattaagtggctcacatttcagtataaatcacactaaaaagatatttaaaagctatttacactacagtgctgacacatttaaaatgaaaaaaaaaggatataaataagctctatggaaaagctttaaattgttgcaaaaagaattctggctcatattacaaaatatatatatatatttatatatatatatatatgttaatgtcagctctattctaaaacctaaaattccaacgtaaatgatttttttttaaagactcctttatgtttaaacctgcaatgtttacagtgcatctggccctaagtgcttaatacttcacagttatggacaggcactgaggaatgttacaaagctacataaactatgttttgtaacagacataggagcaagtccttggcttgctttcagaattcatgaatctttattacattaaatttttttaaaaaaggattttagatggtatatgcaaatttagcacaaaatgtcatcgtcttttttatcttgatttgaatgtgctgaactgtgttgccttgtatcaactagacttagatttccagggcacaattcttcctttaaatctttgttgctattttcaaatttagaatccatgtcaatcttaaattctgcaaattgaacatgatccaattttgctttaacattcttgccatccatattattcagtgctgtagtcttttcaggaatattaacattcacaggttcttccttgattcttacagatgcaataggttcatgtttaatctgctgtaattcatatttagaatgaagtttatctgaaaaaacagaatccaaggaggctttgcttacagcacaaatcatgttgtcagtgtgaggtccaagaacagatgatgtggaatctgatgatgtgcctgtttcatgagtagctgtattctgagaagtgtcctcctctgagtgatataatttgagccgaatatgccatgctaaactgcatacagctg

SEQ ID NO: 63713 - DNA, 1536 bp, Homo sapiens
caggttatgatttttaaaccaaacccccgatccaaaggtagaaattggtggccccctttgagatcgggggtaaaagtgtgcttaaactttttttaaatattccaaccaggttaaacggttttggaaatataaaaaaggggtcccttttggatatagataaaaatatttaaaggttttaattcatttggtcatgtaggtttttcaaaattccatgtatattccaatgtggatggtactgaattttgatcataccagtttccctcaggatttatcagattttaaacatcctgcagataagctggttgacaattccccagcagttctttttttttttttcctttttctttttagatttttttaaacagagaacaaagggattcactcagagatcagaatacgaagcttcctctcagcatcatgggaggagataaaataattcattctatggtctttgttccattaagacttggtgctttcttcagtaacagtatgtgaaatgtggctgactttgagtcccccactgtgtaagtggaattatttttcactgcagcatttctgagtctttttcttgttccttactctgaactgtaaaattaagttcataaaggcatttggcaagggtggaggaagcttccatgttactaatggctagcactgataagttattttcatgtctctttaacaatctgcgaccacattctgaatatttaccaatattttttaatattaaggcagctgttagtcggatgtgtttagttattggtccctctttttcatctgtaaaatctcgaaagacaaggtttcttgatcctctcctcagagccataagtgcagcactgggatgattcacaatggccttttgtgctctaggagttgagcttgtgccccctacagttggctgcttggtagaagacttctgacttcctgcttgtcctggttcatcttgttttaatcctgcaagtagggcatcctttgaacagtgcttatcctgcaagtgggtaataaaagaaaaccgctgtcgctgaaaaggctcacaaccttcccaaagacactggcctggatatacatcttttcctccatgttcagttgctgcatggtagaaaacctgtgagggtgtctgaaaccactttttacaagactgccacagacacatgaagttctgtccaggttttctcattggatctccaggctgactggatccactgaatggagaaggctgagaactgttaggctggccctgcacttgtacagctggtgaaggtggcataggagtgttctgcgggaccacattctgtacatatgttggtggatgctgttgcttttgctgaacagcactttctattgctactttagctacagtgcttggatctgctcctgctggcacagcaaccattgttgcgctgcagccagcattgttggggtcactgattgtaacaattctaactcctactttatttggaattcctgcgactgtttccctatcagtatcctctgctggcctctttacagttttgcattctgctgtgccatttgtag

SEQ ID NO: 63714 - DNA, 3105 bp, Homo sapiens
ctgaatgtcaataggttgctgcatatcgttggatatggtgatttccagatgaaacagatagatgcccccggagaccctttccctttaaatcctagaggaattaaaccccaaaaggacccagacatggcaatggagatttgtgctacggatgctgtagatgatatggaagaaggtcttaaagtcctaatgaaggcagaccctggtagacaggaatccttgcaagcagaggttatcccagatccaatggagggagagcaaacctggcccactgaggaggagctgagcgaggcaaaggatttcttgaaggaaagttctaaggtggtaaagaaggtccccaaaggaacatccagttaccaagctgaatggattttggatggtggcagccaaagtggtggggaaggagatgaatatgaatatgatgatatggaacatgaggattttatggaggaggaatctcaggatgagagtagtgaagaagaggaagaatatgaaactatgactattggggagtctgtgcatgatgatctgtatgataagaaagtagatgaagaagctgaggcaaaaatgttggagaaatataaacaagaaagactggaagagatgtttccagatgaagtggacacgccccgtgatgtggctgctcgaattcgatttcagaaatacagaggccttaagagcttccggacatctccatgggatcctaaggaaaaccttcctcaagattatgctcgaatatttcagtttcagaactttactaacactaggaaaagcatctttaaagaggttgaagaaaaagaggttgaaggagctgaggttggctggtatgtcacacttcatgtctctgaagtccccgtctcagtggtcgagtgcttcaggcaaggaacacccttgattgcattttctttactacctcatgaacagaagatgtcagtattgaatatggtggtgaggcgtgaccctggcaacactgaacctgtgaaagccaaggaagagctcatatttcactgtggattcaggcgcttccgagcctcacctttattctctcagcacactgcagcggacaaacataaattgcagagattcctgactgctgacatggccctggtggcgacagtctatgcgccaatcacttttcctcctgcatctgtgctgcttttcaagcaaaaaagcaatggaatgcacagcctcattgctacaggccatcttatgtcagtagatccagacagaatggtcatcaagagagttgttctgagtggtcatcctttcaaaatttttactaagatggcagtagtacgttacatgttcttcaacagagaggatgtgctgtggtttaaaccagtggaactgagaacgaagtggggccggagaggacatatcaaggaacctttaggtacccatggccacatgaaatgcagctttgatgggaagctaaaatctcaagacacagtactgatgaacctgtataaacgagtcttccccaaatggacttatgatccatatgtaccagaaccagtaccctggctgaaaagtgagatttcttcaacagtgcctcaagggggcatggagtaatggattcaaagagattctgtcttaccggtgccagtcagtactccagggatgggaggcacaagttgtgattgggcaaagtttattttctatgtcagcctgtcagtccactgccccattttgcaagacttttttttagccttgacaaaatgtctcagttaagtataaaagtttttccactacttagtccaaaaaaaactattaaatcttaatgaaatagccactctccattaagaatctgataactaagagttgacaatactaggaaacaaaatgtcttcagtatctaaagacactgaattcccaccatttccttttctgtaaattaaacagaaacagactgataagaagctggcctttcagcctgcttcacccaagttatggaggaggttaagtctacatttccaccactgagcacaatacaaatgttctttacttctggggaaacagtttgaaaatgttgagacagcacagcagccactccaacaccagctgtaggttcaatgagtagtttcatcctctcccacaccagctgggttgcacactgttgatatggaagggagtaggaattagtgaaaggggagtctagttggtttacctataaagttcagatgagaatacgtgtccagtttgaattttcttatcactgtgtacacacgcttcccaaagcttttctttaattctgactctgcttctgtcaagagggttgtcattaatacatctagggtaccctcccatgtcatgaagttacctagtcaggttcccgtgggtcacttgctactcctaagggaagtttcttctgcctaagaagttacaccatgctttgctatttcttttcttgctggagcctcaccttaatttcatcctctgtgacagtgaagatatcatccacaaggtccctgataataggccaggtgttcaagccaatgctggatttgacaccatctgctatggtttctggaggataaagattgggcatcagtttccccttcagcttggactggtagcagtcatctgcatttgagggttcagcagcatataccttcacactaggtttcagagccttaactgtaattgctattccagcaagcattcctcctccacctacaggtaccaccagtgcatccaccaaaggaacctggttcagcacttccagggcaattgtcccttgtccagctatcactgcaggctcctggttgggatgtaccatgatgccttctgtttcttctgtaactctttttgcaacattttctctggactcatcactaggttcacagtatacaattgacgctccgtaggcttgtattgcaagttttttacagtctggagctgtctggggcaccacaatataagcaggaattccttccaatttggcagcataggtgagagcctggccatggtttccactgctgtgagtaacaacagctttcggcttcctttctaaagcatcaggaaccaagcttctgacggcattgagagcaccacgaatcttaaaagatcctgttttctggaagagttcacatttgaagaaactcgtgc

SEQ ID NO: 63715 - DNA, 1860 bp, Homo sapiens
  misc_feature (1)...(1860): n = a,t,c or g
tttcgtggcaacaagctggtcttctcctcctaccccggcaccatcttctcctgcgacgacttctacatcctgggcagtgggctggtgacactggagaccaccattggcaacaagaacccagccctgtggaagtatgtgcggcccaggggctgtgtgctggagtgggtacgcaacatcgtggccaaccgcctggcctcggatggggccacctgggcagacatcttcaagaggttcaacagcggcacgtataacaaccagtggatgatcgtggactacaaggcgttcatcccgggtgggcccagccccgggagccgggtgcttaccatcctggagcagatccccggcatggtggtggtggctgacaagacctcggagctctaccagaagacctactgggccagctacaacataccgtccttcgagactgtgttcaatgccagtgggctgcaggccctagtggcccagtatggggactggttttcttatgacgggagcccccgggcccagatcttccggcggaaccagtcactggtacaagacatggactccatggtcaggctgatgaggtacaatgacttcctccatgaccctctgtcactgtgcaaagcctgcaacccccagcccaatggggagaatgctatctccgcccgctccgacctcaacccggccaatggctcctaccccttccaggccctgcgtcagcgctcccatgggggtatcgatgtgaaggtgaccagcatgtcactggccaggatcctgagcctgctggcggccagcggtcccacgtgggaccaggtgcccccgttccagtggagcacctcgcccttcagcggcctgctgcacatgggccagccagacctctggaagttcgcgcctgtcaaggtttcatgggactgaagttctgtccctgctctgctgctttcgcccctgctgaccctcgtcagggtcacccccgtcccaaggccaccggacttctaactccagcccctcctgggggcttcgttctctgatctggggtctgagtcatctcctcctagagtgggtcacgaacctgatggggctcagaactgaccccctctctcccccgaggtgggtgggcaccgtggcgtctcttctgccctgccctaaatctcccactctctgtttctgtctgtttcctactgctgctctctcaacctcattcccacctctggggccccttcctcgtgcttctccttcctgagggtttgggaaggtcctggggcagactctggggctcccatggggtggaaggagcctgttccagcacccttctcccagctgcattcccacgggtggccctggagctggtgagctttgtctgggcgttgtcttcggctggcattgctcctcccagctctggcccctctgctccctcaggaagcagtcccctcgtctccctttctgggcagcttccttgaggacagaaacttgaaaacaaacacaaaccaaagtttctggccatctgtggctggagggttctgaatgtcctctctccatgtcaggcagagggtcagcccccatgcttctgcctcaggccccaccccaccccaccccaggcctgcccctcacctcagggccatacccacagcgccctgatggaggaaccagaccgcaggctgtgccaccattaaacaagagcggctgtggaaaaaaaaaaaaagggggggcccttttaaagggaccaagtttaaggcccgggggcgggcaaggtaaaatttttttaagggggccccaaaaataaattcccgggcccgcgtttaaacaccgcggggaggggaaaacccggggcgaacccaaataaaaccgcttgcgaaaaannnnnnnnnnnntntttnttag

SEQ ID NO: 63716 - DNA, 1389 bp, Homo sapiens
cgagatggaccacgtcatggacgtggtagtgaagtccgtgaactggatatgctcccggggactgaaccacagcgagttcacaaccttgctctatgagctggacagccagtatggtagcctcctgtactacacggagattaagtggctcagtcgcgggctcgtgctaaagagatttttcgaatccttggaagaaatcgactccttcatgtcatccagagggaaacccctgcctcaactgagctccatagattggatccgagacctggccttcttggttgacatgacgatgcatctgaacgctttgaacatctctctccaaggacactcccaaatcgtcacgcagatgtatgacctgatccgggcgttcctagcaaaactgtgcctctgggagactcatttgacgaggaataatctggcccactttcccaccctgaaattggtttccagaaatgaaagcgatggcctgaactacattcccaaaatcgcggaactcaagaccgaattccagaaaaggctgtctgatttcaaactctacgaaagcgaactgactctgttcagctccccgttctccacgaagatcgacagtgtgcacgaggagctccagatggaggttatcgacctgcaatgcaacacggtcctgaagacgaaatacgacaaggtgggaataccagaattctacaagtacctctggggtagctacccgaaatacaagcaccattgcgcaaagattctttccatgttcgggagcacctacatctgcgaacagctgttctccattatgaaactgagcaaaacaaaatactgctcccagttaaaggattcccagtgggattctgtactccacatcgcaacgtgatggagagaaaactcctggcagggccctatggtgggaaaggctggagtcttctagtcccaagggattgggagatgacaaaatgaattttttttttcttttttgagatggagtcttgctctgtcgcccaggttggagtgcagtggcgtgatctcggcttactgcaacttccagctcctgggttcgaacgattctcctgcctcagcctcccgagcagctgggactacaggcatgcgccaccatgcccggctaatttttgtattagtagagatgaggtttcaccatgttggccaggctggtctccaactcctgacctcaggtgatccacctgcctcgacctcacaaagtgctgggattacaggcatgaaccactgtgcccagctgacaaaatgagttcttaaactttttttttttttcagttttttttccactttgaatcagaaatataatctgcagtatcatacttgtttatattacattgtatgcctcactattcattaaaaatcaagaaagttttattgtaaaaaaaaaaaaaa

SEQ ID NO: 63717 - DNA, 1529 bp, Homo sapiens
ttttttttttttgaaaaataaatgattttattgcagggccaatgataggtagtcacaagggcatgaaatggcagatctcttgtctgaagcagagaaggcacactggcagactccatgtgtgtcaaacgctgtgcatgaatcaggtttttagaaggaaggtaggagaggaaaactactcactagcagaactgaactgctgtaaaataggttaaattctttgaaaagtgaaaaatgatagtacgcaaaatcatgaacgttgtatttgaacccaaagcccggatgtaaccaagtaaggatgggaagtttccatccagaggagtttaattcccgaacaaggtcacaggaaaggtgagacgctgccggttccggcacgcctgtcttctggagtgccagtgaccgggcaagaaattttgattctttcctttgatactcttgggaaagaacacatttcccaagcccctggagacccacagggtttggcactgtccgtgaggctgtgctcctgaggacggacgttcaggaggccgtggaggagcagcgctgcaggagcagggtgtggcagctgtcgcacactcgcaccggcttggggtaggagggcagggccagctcgttgctggagcaggtgttgcagaagatgtggccacagttccggcagtggtgctttctccgggaaatggagaactccttctcacactgcctacagtgtgtcgcttcgtcatctttcagccaggcgtggcccttcagtgcctggttcacttcttttatatcttccatcttcagcttggactggctgaggtgcaggcccatttcctggagggcttgttcctgctcctcgcagatcttctgcagctctgccttctcgtcctgaagctcccgcaactcctttttcagtccttccacttgttgcagctccatcctgagtagagaggaagtgtctttctcgtgctgtaattcgcgctgaagagcctgtctttgctctttttctgatttcaattctttctccaggcttgagcattgctcgtgcagctgggagagctgcagctgcagggcgccgatcctcccgcccagctcctgctgcagcttgtggctccgctcctcagccccctgcctcgcccgctccgagtgctgcaacctttcttccatttgtttcatgctggacataacttggttggtttttccttcaaaggatgtgatggcttcattcttctgctgcaaactgctctctgcattctgagctttgtgaaacatctgtaaattaatcgctttgacttcttccagctgctggcggagggcaactagtgtgtcctgcttctcgtgggtgtccttttccagtaacttcattgcaatttccatttcggttttcattccaatttgtaactccagttctttttccagttccaaccggactttcttctcctcttttagctgcttccacacatcactgtacatttcatccagaccttgccgagtttgcttgtaagtctccagctcaactttggtatcctgttttgttatctctacactctttt

SEQ ID NO: 63718 - DNA, 1838 bp, Homo sapiens
ttttttttttttatatttaaaaattaatttaatgcttggctaaatcttaattacatatataattatcaaacgatagtccttaatttccaaaaaaattcctcttttgaaaatccagaatcagaaagcataaacttttaaaccaagttcccctgaatatttacaatgtggtataaacattatagaagaccatggatattaaattgcctggggtgtggctaatcagcaaggcgtattctttattgcatatttaactcacatatgtgggattttaaatatgacagactactaaaattcaaatgcatgtatctgcaagctgggcagggagtaaaatcatgaatgagacaggacggtcagcccaaaaccatgcaattaggttgtgggtttattattttcaaaagtgaaatttctatgttccatttgaaactatgttgcatattcatttagcattcacattaaacccacatttgactctaacgctgattcaaggaagaaagttcaacattcactcaatgactaagtccacaactcaactctcaatgttaaggcagcacagctacagtgatagcaacgctaaccaaaaggtaatgaacatttagtcacttgccagcccttttgttacaacagtgtagtaatttccctaagacaatttgctaccggataattttctgctgttaaaaggcttcctctgtggaaaaacaccacaaatttccagtgtgaaagtaagtccatggtggtataaatatatatatgcataattacacaatttacactgcacacatcgtttacaggggacaattaactgagagggttaatttaaatgaccatacaaaatacttcagtaaacaaagtatgacaggcagtaaagaaaacattcatagactcctagaaataatctgaattcctttcattctgaagaaatatcatttaaggacacagtattgaatataatgttttttgtattaaaacaagaattgctattttacagtttaagaaactttacatatatacaaaatttacacattgggaatggtaatcaagcaaataggtttttcagtctcatagatctattttccttcgatcaaagacttaaattctttcacattgtggtcacttgcaacagacatagcatgatccaaagctcgaacacttgcaaggagttttactatctgttttatgttttcccttgcatttcttttttccacatcagaacacccgatactatttctataaattgtatccgctaagtgtacaaggtatcggcaaaagttttctaactgagaaatagtcctttctcctttcagattcatgaaccattgtttggggaaacaattgattacattttgggcttttttgatgctgtcatctccatattctgaattctgaaaagccatgagaatatatcgatttaataaaccatctattgataactcttgcagagttttatttgagaaaatgccataccactgaagaaaattgcctaacagcttaactgaagaccaaaactgtcgttgaaaaaacaagtaaggcccagaatttttattttctaagacatttttgggatataagggcataaatacatcatcatctaaagttcttctcattctcaataaaagtgcctttaggtatacctgtgtatttttattttctgcattcactactgaaggatatccattgattaattttagtgtaattcccaccattcttgaagtctgtgttgtagaaaaagggtcccacatattttcagctatcactgttagtttaggaagaatcaccttttccacaatggtaggtagtagggcaacatctacatcatctttttcttgctctcgttcttcaca

SEQ ID NO: 63719 - DNA, 1356 bp, Homo sapiens
aggcatgcaccaccatgcccggccatttgctgtcacttctgtctccttgagtctgcctcctcctgcttcacctccatgaagccagggggcttttgcttgcttgggtcactatgactgaattcttcccacgtagtctgtggtagacatcttcgtaaactcagacacctcatgtcctctttgtcttcatccttcaggactatggccccaaagtcaactttcggaaacagaagctaaagaccgagggcttctgcggcctccccagcttcagccgggaggtggtgcggaggatgggcctctacccggggctggagggcttccggcccgtcgagcagtgcaacctggactactgccccgagcggggctctgccattgacccccacctggacgacgcctggctgtggggggagcggctggtcagcctcaacctcctgtcccccaccgtgctgtccatgtgtcgggaggcgcccgggagcctgctcctctgctcggccccgtcggctgccccggaggccttggtggacagcgtgatagcacccatccggtcggtgctatgccaggaggtggaggtggccatccccttacccgcccgctccctgctggtcctcaccggggcggcacggcaccagtggaagcatgccatccaccgcagacacatcgaggcccgccgcgtctgcgtcactttccgggagctgtcggctgagtttggccctggagggaggcagcaagagctgggccaggaactgctgcggatcgccctctccttccagggaagacccgtgtgaaccgcctccttggctccagacttgactgatcccgggattgaaatgaggagcacagaacagggcctcctgcaactcacggggtttcaagagaagatggctgacccctgatgctgtgagcagtgtgagccctgcccaggagcaggttttgatgggaacgtacctccaggcagcccccttccacctggaccgtggccacacttttttggttatttagtttgtcacagtcttggggacatgggatcatttgagcttaaaaaatactgggggccgggcacagtggctcacacctgtaatcctaacactttgggaggctgaggtgggcggatcacttgatgccaggagttcgagaccagcctggccaacacggtgaaaacccgtctctacaaaaactacaaaaattagccgggtgtggtgactcacagccgtaatcccagctactcgggaggctaaggtgggagaattgcttgaacctgggaggcggaggttgcagtgagccaagatcacgccactgcactccagcctcggtgacagagcaagactgttttgaaaaaaaaaaaaaatgggaacattttaa

SEQ ID NO: 63720 - DNA, 2008 bp, Homo sapiens
  misc_feature (1)...(2008): n = a,t,c or g
agcctgccaggcccccacgaagcaaaggctgtcaacgatgacatcagaccctgcagtcggagaaggggaaggctgggtgatgcagctccccgagccnactgtcagggggacgggtcactgagaccacatggggaacaaaaggctccaggagggctggaatcccagaaccccagggctggcactgccctcctccaggcaagaaggagcagagataaataaccatgtccacgccaccatcggggagcgggaggggacgtcctaggacagacacggagcagggagcaggtcaggcctgcagtccaggccccttgcggcaggaggcggtgggcggagcccgcgcgcgatcgggcagggggtcccggcgtctcctctttaatcgtgcatgtgtgcttaccccagtccgagggcggccggctcccaggactggggggctcgtccgcaagtccgtagcctggccccgggacgtctcccaagctctcctccaaggaagttcaaagacaaggaaaagaagaaacaatccccccccagtctcggagagcaacagaaaaaagctctgtaattcagtgttccaaccaccgccggggagggagagggcccctgtccctgcagggccgcccgggggggggccagtgtccactcactcgtgctcggccccagggactgtggagcggcgggggctccggctgtgggggtggctgtgtcactgtgtcttggccttcacgagcagcctctggacggtcttgtagaggaggctgaagtgctgagcctgggcactgctcacctggacagccacgtaggccatgccgaggtaggcagcaatgccaacagccaggagcaggtcaaagacggccggcttgactctgtacgcattcatcacttgcttcagctggtcgtagaagacaaactctgggtcccgcttgtcagccttgacgtggtgctgcttcacgtccttcaggtagcggctcaggtggtgctccagcgtgctgaggaaggtgctgtccttgtccaccagctgcgcggcccgcggctggttggtgagccagtccatcaccgagtccagctgctcctgctggatctgcatctgctctgtgaacaccggcatgtctgggggtgtccccttctctgtcaggttgtagatgactcgagtcagggcctctgcaatgatcctcgtgttacgggtcagggtcttagaatccacccgggaccgcacgtccatgatgctgctgcgctggccgtcacggtggctctccaggtgggacagcgtgaaggcgggcagtcggcggatggcgaagcgctcgtgctcccaggccagcacgtcctccgccaggttgatccgcttgtgcaccatggagaaccgtacctcagggaactggtgcgcggccaccgtctccagctcccgcaggaaggcgtgctgcagggtgccctcccgaggcggcttggacacgtgcaggtgcaggctgctgccccggcccacggtgtccaggcacagcacgaaggccacattgtcctgaagcaggctggagtctgtgtggtccaggttgtcttccagccagcgcttggttccctggtagttaaacttgcctcctccagacgcaaagaacaggaggttgtaggcggcgtgcgtgcgcttgtaggtgtagagccgggagaagaggcgtgccagctccagcagcacagagacgccgctcccgttggagtccgcgcccagcgacagccagggggccactccaaaggcgtcgtagtgggccacgatgacgatggtgggaaggtcctctccgcccagccccgtcagccgcccctccacgctggcaatcagccagtcactcacggccttgctctgtaccccgctggtgaccatctggaagccgttggcagtggccgtgcgcagcagtacttcagcagcagaggcggagccctgggaggcgcaggcagcttgggtctgcttgtagatagacagcagggcttcgtcctccacggcaaagtacacggggcgggcggtctccatggc

SEQ ID NO: 63721 - DNA, 1475 bp, Homo sapiens
ggagatgaaaaaggttactgaaggtgttgtcgatgtcatcgtctacccaagcgctgcagataaaaccaaaaaccgaggctttgccttcgtggagtatgagagtcatcgagcagctgccatggcgaggaggaaactgctaccaggaagaattcagttatggggacatggtattgcagtagactgggcagagccagaagtagaagttgatgaagatacaatgtcttcagtgaaaatcctatatgtaagaaatcttatgctgtctacctctgaagagatgattgaaaaggaattcaacaatatcaaaccaggtgctgtggagagggtgaagaaaattcgagactatgcttttgtgcacttcagtaaccgagaagatgcagttgaggctatgaaagctttaaatggcaaggtgctggatggttcccccattgaagtcaccctagcaaaaccagtggacaaggacagttatgttaggtatacccgaggcacaggtggaaggggcaccatgctgcaaggagagtatacctactctttgggccaagtttatgatcccaccacaacctaccttggagctcctgtcttctatgccccccagacctatgcagcaattcccagtcttcatttcccagccaccaaaggacatctcagcaacagagccattatccgagccccttctgttagagaaatttacatgaatgtacctgtaggggctgcgggagtgagaggactgggcggccgtggctatttggcatacacaggcctgggtcgaggataccaggtcaaaggagacaaaagagaagacaaactctatgacattttacctgggatggagctcaccccaatgaatcctgtcacattaaaaccccaaggaattaaactcgctccccagatattagaagagatttgtcagaaaaataactggggacagccagtgtaccagctgcactctgctattggacaagaccaaagacagctattcttgtacaaaataactattcctgctctagccagccagaatcctgcaatccaccctttcacacctccaaagctgagtgcctttgtggatgaagcaaagacgtatgcagccgaatacaccctgcagaccctgggcatccccactgatggaggcgatggcaccatggctactgctgctgctgctgctactgctttcccaggatatgctgtccctaatgcaactgcacccgtgtctgcagcccagctcaagcaagcggtaacccttggacaagacttagcagcatatacaacctatgaggtctacccaacttttgcagtgactgcccgaggggatggatatggcaccttctgaagatgcttttttaaatttaagaataagacacacaaaactctattaaaaaaaaaaaaaagggggggccgttttaaaggatccttgggggggcccaagtttacgcgggcatgcaacgtaatagttttttccttatagggaggcgtattataac

SEQ ID NO: 63722 - DNA, 729 bp, Homo sapiens
ttttttttttttgatcaaaaacctttattctggtcctcatcattcaggaagccacttatgcagaacactttctttcatctctgctctaagcagcagcagttgcatccaggcttgatatggaagacagacagaaatagtggaagaccttgcagagaagagctaattgatgagatctctgcttatcccggcataggtgaaggcagaacaggaagagtgtgtgtaagtgcaaagactccgttcttcaaagctgaggcctgtgcagaggggtgaactgaaggcttcagatgaaggctcacaaaactgccccgctcggcaatcaatctaaagtaccttccagaaaagcaaattcatccacagcttctattgcattatccaagtctctcctctgaagggttttcctttttccctgctgagcgcaacagtaggcatcttttgcaatggtctccacaaacagttccgcggctcgtgccagaatgaagatggcttcctgtcccgctagcgtcacgtcgggatctgccttcaccaaggccttcactcgcgccagaggcaacctcgagagacgagccccaggcacactcgttggggcctggggctgcgaggccgctgcctccccagcaggtccctcctcctctcggggcgtcccgcttcctgccgccgccgccgccgccatcccggccttgagcgtgctgcgcgcggccgccgactgtcgggggggggggattaaaataa

SEQ ID NO: 63723 - DNA, 1092 bp, Homo sapiens
aatagaaaatcgatcgccctcggtaccggcccggaattcccggggggtgatatccatggaccgggattatcactttgagtgctaccactgtgaggactgccggatgcagctgagtgatgaggaaggctgctgctgtttccctctggatgggcacttgctctgccatggttgccacatgcagcggctcaatgcccgacaaccccctgccaactatatctgagctgcaatcactgctgctgctgtcaccctgcagacaaactgctgtggccagtgggcccctctgaggccagccaaggcaaagaatgcactctgcaggcctggcagaagagtcctctggggaggaccccaagggccggagacccaaagatcatgatattccaaatggattgtggaagagaaaccttatatttaccagggtgggggcgactggcctttttcccatgtgtgcagtctgagcttaggcacacacaggagggttccaggactttctgaacatctgattctgtatcttcagtatatatattttgtttgttttagagatggggtttcaccatgttggacaggctggtctcgaactcctgacctcaggtgatccacccaccttggcctcccaaagtgctgggattataggcgtaagccactgtgtctggcctagtgtatgattatgcatgagtcacgcaatgttctggtcctggattccaggagtagaggacctagctttaaatcaattagtttcagctaaactgactagaaccgggtcaaagtgtaattctccctccagctcccccaaaccccagagttttggggttgtggttgatgcagtgtgggatgtccctgagaggtagcaagtctagggtggtgagttcctgctaggcaaccaaatttaagctcctcactttttgtgacacatggtgtcagatatggggtcccgcacctatatctggatgaagaggtagaaactctggacctcattaatgagttatttcttggccttcttctaaggactaggagagctccttatctgtctgagaatggggaccagctctgagtggggttgctgcctgtattccctgtttctcaggaacttacatg

SEQ ID NO: 63724 - DNA, 1538 bp, Homo sapiens
ttttttttttttgaaaataccacattaaagatatatttatatacagaaaatggcagcaatgccaataaaattttataatttaaaaaagttacttgttaaaggcagatttcataagttgtgtttacaatcatccatttaatcatctccaaaaaaaggatgaatttattattttaaactaacattctgtaagttaaagagaataatcaagttgtctcatggactggaaggtgacttattaattccctttcatttccaaacctcatcaagcagtcactacatttatgaggcaagtcagctgaatgcttgaaatctagatgaattttaagatcttcaatttgtcctgttgaatattcacaatattgacataaataaatcccttcagataaatgtgaatttaaatgcttgcaatattctagcatacttgaaaagcctttcccacagtcatcacaaacatgaggaaaaatttttgtatgttcaatagcaacatgcctgttaacatttgtgtgaagtctactccgaaaaccacatacttgacatacaaagaagtttttacatttgtcaaaggtaattttgcttaagaggctatactgtccatgttcaccattgttatacttatcacttaactctattaatttacatgcatgctcatttaccacatggctatgcaagtcttctggatcattagtttcatgttcacagaactgacacaagtactgttcatcacagctgtgctcctggaaatgtaggtagagttcactgcttgaggagaactgtacatcacactgttcacaccaatagaggtgatcactaaaatgggtgtctgcaatgtgctggctgaggttctcaaaaattactgtcttataatcacagtatttacaaatgtagggatcctcttcatgcagtttggcatgttctatcagaagcatattggtagagaaactttccttgcatactcgacacacatttgaatcagtacgtttatgcttcaggatcatatgctgctttaagtcagaaaaatatttgctgttaaactcacaaagttcacatttatagaggccactgctattagctctcagtaaaggccatttctgctgggcagtcacattcaaagcttggctcttgtcaagaattttacaaagtttagctggcggttcttcatcagtttggtcttggagactctcagaggaattgttttctgtctctatatcataatcctcagaaatcgcatgcacttctacagcaattggaacatcttcagcagtgtgaacttctataggactctcctcttgggtttgctggttgactgattcaggtgagtcacactcttcatcacaaattacaatatcagcagatttttctgtagaaaaggcagtgtggtctagaattctaagtacaggactgggaaccaggtagttctgatttctgtttctggccttgattccatctgcaaattttggcaagtcatttgacaacaaagatgatgattctgataccgagacgtcaaatgacttgccaaaatattttaaatctggctgtct

SEQ ID NO: 63725 - DNA, 2009 bp, Homo sapiens
tgtcagaacaccatatgatcttgataatatttatttagaagaggtggacagtgtagtggctgctgagtatgagctggaatacctgttactggaaggtcattgctacgacatcaccacaggccagcctccacggggactacagtttaccttaggaacttcagccaacccggtcattgtggacaccattgttatggccaatctgggctactttcagctgaaagccaacccaggagcttggatcctcagacttaggaagggacgctctgaagatatttatagaatttacagccacgatggcaccgattctccccctgatgctgatgaggtggttatcgtcctcaacaacttcaaaagcaaaattattaaagtgaaggttcagaagaaggcagatatggtgaacgaagacttgctgagtgatggaacgagtgagaatgaatctggattttgggattccttcaaatggggctttacaggacagaagactgaggaagtgaagcaagataaagatgacataattaatattttctccgttgcatctggtcatctctacgaaagatttcttcgcataatgatgctatccgtgctgaagaataccaagactcctgtgaaattctggttcttgaagaattacttgtcccccacatttaaggagtttataccttacatggcaaatgaatacaatttccagtatgagcttgttcagtacaaatggccccggtggcttcatcaacaaactgaaaaacagcgtatcatctggggttacaagatcctcttcctggatgtacttttcccactagttgttgacaagttcctgtttgtggatgctgatcagattgtacgaacagatctgaaagagttaagagatttcaatttggatggtgctccttatggttacactcctttctgtgacagccgaagagaaatggacggctacaggttctggaaatcagggtactgggccagtcatttagccgggcgaaagtatcatatcagtgcactatatgttgtggatctgaagaagtttaggaaaatagctgctggtgacagactcaggggacagtaccaaggtctgagtcaggaccctaacagcctttcaaatcttgatcaagatctgcccaataacatgattcatcaggtgccaattaaatccctccctcaagaatggctttggtgtgaaacgtggtgtgatgacgcctctaagaaaagggcaaaaaccattgatttgtgtaataatccgatgaccaaagagccgaaactggaagcagctgtgcggattgtcccggagtggcaggactacgaccaagagatcaaacagctacagatccgctttcagaaggagaaagaaacgggagcactgtgccaaagagaagcccaaaaaaacccaagccgaaaaggtcctcagaaacgtgaagaattatgatctctggagaaggacaggaaatcaccccatttgaaaaacagtttttataataaatgctagttttttctgatctgtctatacaactgctgataagccggctgggcaggagtgccacaccttttgattctgagcatttgattctgacttctgtactctggtggccactggatctttgggattaaagctctgttggatttgtacctcagaggaagaccaagtggctgatcctttggactctgtaaagagcattcttctagtcagagggtggaatggcagcagcaactggaagaaaatgagttttttggtgcccacacccaagagcacacacatgctgcactgtctcggaaagcagggccagctagagccaccatgttcttccttacctcagtttacctgcggcctgcgctgcactgcagatgcccaccctgccctgggtctggccggcggaagctctgtccaaggtccacacacctccaggtttacgccaacatccttgtgccctccccaccttctcttccaacgcattaggtgcattgtttaattgaaatccaaccaacaattgtgtgtcaaataaacaaaaaaaaaaaaa

SEQ ID NO: 63726 - DNA, 1699 bp, Homo sapiens
ctgtcaaatagttgtttagaaagtgattttacatctggtggagtttgtcattcggatcccaagatgacaagtaacatgctcgcctttctgggggaaaatgcagaggtcaaagagatgatgactacatggactctccagaaaggaatccccctgctggtggttaaacaagacgggtgttcactccgactgcaacaggagcgcttcctccagggggttttccaggaagaccctgaatggagggccctgcaggagaggtacctgtggcatatcccattgacctactccacgagttcttctaatgtgatccacagacacattctaaaatcaaagacagatactctggatctacctgaaaagaccagttgggtgaaatttaatgtggactcaaatggttactacatcgttcactatgagggtcatggatgggaccaactcattacacagctgaatcagaaccacacacttctcagacctaaggacagagtaggtctgattcatgatgtgtttcagctagttggtgcagggagactgaccctagacaaagctcttgacatgacttactacctccaacatgaaacaagcagccccgcacttctcgaaggtctgagttacttggaatcgttttaccacatgatggacagaaggaatatttcagatatctctgaaaacctcaagcgttaccttcttcagtattttaagccagtgattgacaggcaaagctggagtgacaagggctcagtctgggacaggatgctccgctcggctctcttgaagctggcctgtgacctgaaccatgctccttgcatccagaaagctgctgaactcttctcccagtggatggaatccagtggaaaattaaatataccaacagatgttttaaagattgtgtattctgtgggtgctcagacaacagcaggatggaattaccttttagagcaatatgaactgtcaatgtcaagtgctgaacaaaacaaaattctgtatgctttgtcaacgagcaagcatcaggaaaagttactgaagttaattgaactaggaatggaaggaaaggttatcaagacacagaacttggcagctctccttcatgcgattgccagacgtccaaaggggcagcaactagcatgggattttgtaagagaaaattggacccatcttctgaaaaaatttgacttgggctcatatgacataaggatgatcatctctggcacaacagctcacttttcttccaaggataagttgcaagaggtgaaactattttttgaatctcttgaggctcaaggatcacatctggatatttttcaaactgttctggaaacgataaccaaaaatataaaatggctggagaagaatcttccgactctgaggacttggctaatggttaatacttaaatggtcaatagaaaaagtaggctgggcgcggtggctcacgcctgtaatcccagcactttgggaggctgagaagggcggatcacgaggtcaggagatggagaccatcctggctaacacggtgagaccccgtctccgctaaaaatacaaaaaattagccgggcatggtggcaggtgcctgtagtcccagctactcggcaggctgcagcaggaaaatggcataaacccgggaggtggagcttgcagtgagccgagattgcaccactgcattccagcctgggtgactgagcgagactctgtctcaaaaaaaaaa

SEQ ID NO: 63727 - DNA, 408 bp, Homo sapiens
tgcagatttttatgctggtcaagagaaagattaacatactttctggaatcagaacctttcttgtatgaaatctttaggtatcttattggaaaagacatcacaaataagctctactcattgaatgatcccaccttaaatgataaaaaagccaaaaagctggaacatcagctcagcctctgcacacagatctccatgttggaaatgaggaacagtatagccagctccagtgacagtgacgacggcttgcaccagtttcttcggggtacctccagcatgtcctctcttcatgtgtcatccccacaccagcgagcctctgccaagatgaaaccgatagaagaaggagcagaagatgatgatgacgtttttgaaccggcatctccaaatacattgaaagtccatcagctgcct

SEQ ID NO: 63728 - DNA, 1232 bp, Homo sapiens
taatgaattaacataaatcataaagattctatatttaattataaaaacataaaattatcacatcaatttaattcttataagtttatacatactgcataatgactttgaaaacagtataactcaaaataatagaaaacaaaattgggtgcaatgaagtactactgaatttcaggtatttctgtgacaacacaaatttaaaatttaataaaatattaccttttcttagcaaaaagggtttttaagccagattatcctttcatgttttaaatgaagcttcttctaaaagaagtccttttattcacagttgcaaatttctttttaacacatacaatgtatactacatgctggaatcaaacacctgaaggagctggaatcttatgaatacagccagggcaacagtgtagagaatcatgaacaaaaacatcacagtccacacagaaaacattttggcacacagcacaaacataaacatgttggtctttcaattccccctgacatccataacaaaatctttctccattatattcttctaggggaatttcttgaaaagcatccaaaggaaacaaatgatggtaagaccgtgccaagtggggagcagacaccaaagtaagaccacagattttacactcaacaggtagctcacagtactttgcccgacactgtgggcagaaatagcctcctaatgtaagccctggctcagtattgccatccaaatgcgccatgctgaaagagggttttgcatcctggtcagataaagaagcaatggtgtgctgaggaaatccttcatagaagaaaatgtattactttctttttccaagcaaacagcagaattctaggactaagaacctaaaaatgttcttctcaaaaagccaatgaagttgtacaaaatatcactttactgcctttcagataagcttattatagcatgatgaaactgactaattccaagctacaagaaaaagtagaggaaacgggggaaagacctgtctatatatgacctcagattttgaagttcaaaaaaaaaattttcttttttttttttcttgagatggagtcttgttctgtcacccaggctggggtgcagtggcatgatctcggctcactgcatcctccactgcctgggttcaagcgattctcccacctcaccttcccatgtagctgggattacaggcatctgccaccatgcccagctatatattttctaacttaatgattaacactactttttaaag

SEQ ID NO: 63729 - DNA, 2222 bp, Homo sapiens
caccgctcgcagacccgggacgagtttgcccagctcttccagtacaaggcagtgttcattttggaagaggtgctgagccccattgtcacacccctcatcctcatcttctgcctgcgcccacgggccctggagattatagacttcttccgaaacttcaccgtggaggtcgttggtgtgggagatacctgctcctttgctcagatggatgttcgccagcatggtcatccccagtggctatctgctgggcagacagaggcctcagtgtaccagcaagctgaggatggaaagacagagttgtcactcatgcactttgccatcaccaaccctggctggcagccaccacgtgagagcacagccttcctaggcttcctcaaggagcaggttcagcgggatggagcagctgctagcctcgcccaagggggtctgctccctgaaaatgccctctttacgtctatccagtccttacaatctgagtctgagcccctgagccttatcgcaaatgtggtagctggctcatcctgccggggccctccactgcccagagacctgcagggctccaggcacagggctgaagtcgcctctgccctgcgctccttctccccgctgcaacccgggcaggcgcccacaggccgggctcacagcaccatgacaggctctggggtggatgccaggacagccagctccgggagcagcgtgtgggaaggacagctgcagagcctggtgctgtcagaatatgcatccacagagatgagcctgcatgccctctatatgcaccagctccacaagcagcaggcccaggctgaacctgagcggcatgtatggcaccgccgggagagtgatgagagtggagaaagcgcccctgatgaagggggagagggcgcccgggccccccagtctatccctcgctctgctagctatccctgtgcagcaccccggcctggagctcctgagaccaccgccctgcatgggggcttccagaggcgctacggtggcatcacagatcctggcacagtgcccagggttccctctcatttctctcggctgcctcttggagggtgggcagaagatgggcagtcggcatcaaggcaccctgagcccgtgcccgaagagggctcggaggatgagctaccccctcaggtgcacaaggtatagacaaggctgagcagggttcctgtggcccaggatggaggccaccgctgccctgccatcccgtctgcctgccatgggacggctcctctgagtgttccctggccccacgtgtgtggtgtttgtgtgtctgtgcctggccaagggaggtgccaacactgggcttgccacagccccaggagaggaatttggggcctaggaaccgagggcacacgggactctagcctcatccccagaacccccttggctcagagtgtggtgctagaaactggtccccagcccagccccagtactgccacctttacacctacccctgcaagtccccagagggctgcccacgatagaagctgccaagcagggagaacctgtgccaactgtggagtggggaggttgggcctggaccctcaacccctgcaaccttccctagccccctcaatagatgagcaggtcaggctgtggcccttacctcacccgcagttctcgcccagtgctgcagccggctcacctctctccgcttcttgcacatcactggcctgtgtgtgctgcttgctcctgttctgttcgcttgctcccgttccgttcggcttttgctttgcgttagggtgaagaccctagcgtccagctcccctcaacgctatattttgacactaaaaaagaaggtttctaaattgtaggagcaggatggaaatactttgctgcccttgccatcttttaggatgggcccccaggagactgaggtcttcctgggccctcattgctgcttatcgtaccccccatcacctgcacatgggacagaccgggctggagggtgaccttggctgtgtacgtcccagcaaaagagctctggcccgcatctcgctgtgccctgaagggggatgaagggcgatgcctcgcccgaggctttgggctgctgcactgcatgctgggactgctcctactctctgtcccacccctcacccagctgtggtccggctttgggagagtggtgaattgcgctgcccgaactcggagcggagcagggtagggaccgtgtacagcttaataacccttaataaaaagggagtttgtccagaaaa

SEQ ID NO: 63730 - DNA, 382 bp, Homo sapiens
tatatatgtaatgaactaagtcagcctgtaacgttccctgtcagagcagcattagtcaggcagtcttgttctcagttactttggctgttaaagaaatcaaacaggtacagcctgactatttggactggaaaaaatgataactattccgttgaagatttactttacattagagaccattttgacaaaaaacaagttttctatgacatcttggaaccacaaaaccatgaatttaaacaagccattggaatcaaagttaatctctaagaagaagattctcaattatttcctgtgttttggtttcataatccttctctccattggtctgaattaattaccatataaattatggttattgattgacgttccaagtcatctaatcaaa

SEQ ID NO: 63731 - DNA, 1790 bp, Homo sapiens
tgatccgatcttgcactccgtcactgtggctgactgcattgtcacattcacttggcggaggccaatttcctacaggtgctttcaggatcaggtcactgcgatggtctctaaacaccattctgctttctctgctctcttgtctttaggagccgggtgtgggctgagccctgcctgattgatgctgccaaggaggagtacaacggggtgatagaagaatttttggcaacaggagagaagctttttggaccttatgtttggggaaggtatgacttgctcttcatgccaccgtcctttccatttggaggaatggagaacccttgtctgacctttgtcaccccctgcctgctagctggggaccgctccttggcagatgtcatcatccatgagatctcccacagttggtttgggaacctggtcaccaacgccaactggggtgaattctggctcaatgaaggtttcaccatgtacgcccagaggaggatctccaccatcctctttggcgctgcgtacacctgcttggaggctgcaacggggcgggctctgctgcgtcaacacatggacatcactggagaggaaaacccactcaacaagctccgcgtgaagattgaaccaggcgttgacccggacgacacctataatgagaccccctacgagaaaggtttctgctttgtctcatacctggcccacttggtgggtgatcaggatcagtttgacagttttctcaaggcctatgtgcatgaattcaaattccgaagcatcttagccgatgactttctggacttctacttggaatatttccctgagcttaagaaaaagagagtggatatcattccaggttttgagtttgatcgatggctgaatacccccggctggcccccgtacctccctgatctctcccctggggactcactcatgaagcctgctgaagagctagcccaactgtgggcagccgaggagctggacatgaaggccattgaagccgtggccatctctccctggaagacctaccagctggtctacttcctggataagatcctccagaaatcccctctccctcctgggaatgtgaaaaaacttggagacacatacccaagtatctcaaatgcccggaatgcagagctccggctgcgatggggccaaatcgtccttaagaacgaccaccaggaagatttctggaaagtgaaggagttcctgcataaccaggggaagcagaagtatacacttccgctgtaccacgcaatgatgggtggcagtgaggtggcccagaccctcgccaaggagacttttgcatccaccgcctcccagctccacagcaatgttgtcaactatgtccagcagatcgtggcacccaagggcagttagaggctcgtgtgcatggcccctgcctcttcaggctctccaggctttcagaataattgtttgttcccaaattcctgttccctgatcaacttcctggagtttatatcccctcaggataatctattctctagcttaggtatctgtgactcttgggcctctgctctggtgggaacttacttctctatagcccactgagccccgagacagagaacctgcccacagctctccccgctacaggctgcaggcactgcagggcagcgggtattctcctccccacctaagtctctgggaagaagtggagaggactgatgctcttcttttttctctttctgtcctttttcttgctgattttatgcaaagggctggcattctgattgttcttttttcaggtttaatccttattttaataaagttttcaagcaaaaaaaaaa

SEQ ID NO: 63732 - DNA, 900 bp, Homo sapiens
  misc_feature (1)...(900): n = a,t,c or g
cccacgcgtccggtgagtgttgaaggagaacatcatgaaaaagctgtagaactgctgaaagccgcacaaggaaaggttaaattagtggtacgatacacacccaaagtcttagaagaaatggagtcgcgctttgaaaaaatgagatcagcaaaacgcaggcaacagacctaatacatttcaaaacttgatatttcattttgcgttttagctagagaagttttccttgtgacttactaatggctgcaatgccaatgattgtaagaaaacaaacaaatttatcatgaaattctccttgtcattttataaatgcctattttaacatcatttatggttccagagatgcatacacttttttctgacaagaaaaagtaaaaggtgatgagggcaattctgtcctactgtttttacaggcctttttcaaatgcaaattttgtcataaagttgttatagattttttaaaatgcttttttaatattaaaatgtacttttacattcttaatctttttttagaaaggaaaagttttcttcatttagctgctgatttaaaagtaaagttctccaattctttttttttgcttactctattttttttaacctgtgaaatttctttacagttttccaagaaattaagcataacagtctcatctacggcagttcattacactgtcaatgttaacatcattgctgcattttgtactttgaacacacacataatatatataaccagtggtaaatcatgactcagtacagtgcaagttttttcacttttacttaaacataatatataatggatattcatttatactgatttatgaaagtaagtttttaaacactgaaacaatcattgctaaaatacatattcttaatatttgagcattgaggnnagaggatgnaattgat

SEQ ID NO: 63733 - DNA, 367 bp, Homo sapiens
tttttttttttgaattttacagtatcacttcattaataaaacttgtaaaggacaaaattagagaacaagagagcaaaacatcacaggtgcccatgaagcatgtgtaccacgtgcttcagtgtcaggaggaggaactcacacaggtggtgtccaccatgtccgacagctggaagtttgaacaactggtcagcaatggctcttcttacaactatgggaatgaagatcaggccaagttcctctatgtggtgtccaagaaacttcacaacaccccatacagtatggccagtgaacccagaaagaaggccaagattttgcaagaacaaggttcaaggatgtgagggacacagtattgacagctgaaaaaatg

SEQ ID NO: 63734 - DNA, 1293 bp, Homo sapiens
  misc_feature (1)...(1293): n = a,t,c or g
tgcgcaagcgggagttccggctggagacccgtgctctgggccggcgccttcaccatggcctcggcagagctggactacaccatcgagatcccggatcagccctgctggagccagaagaacagccccagcccaggtgggaaggaggcagaaactcggcagcctgtggtgattctcttgggctggggtggctgcaaggacaagaaccttgccaagtacagtgccatctaccacaaaaggggctgcatcgtaatccgatacacagccccgtggcacatggtcttcttctccgagtcactgggtatcccttcacttcgtgttttggcccagaagctgctcgagctgctctttgattatgagattgagaaggagcccctgctcttccatgtcttcagcaacggtggcgtcatgctgtaccgctacgtgctggagctcctgcagacccgtcgcttctgccgcctgcgtgtggtgggcaccatctttgacagcgctcctggtgacagcaacctggtaggggctctgcgggccctggcagccatcctggagcgccgggccgccatgctgcgcctgttgctgctggtggcctttgccctggtggtcgtcctgttccacgtcctgcttgctcccatcacagccctcttccacacccacttctatgacaggctacaggacgcgggctctcgctggcccgagctctacctctactcgagggctgacgaagtagtcctggccagagacatagaacgcatggtggaggcacgcctggcacgccgggtcctggcgcgttctgtggatttcgtgtcatctgcacacgtcagccacctccgtgactaccctacttactacacaagcctctgtgtcgacttcatgcgcaaactgggtccgctgctgaaggccattgctccatctcacctctgctcccagaaaataaatgccctgaaaccctccccccanaacctgcaatctgtcgggcactcttctcgttcaactccctgtagccctttgggactttgcggtcccctaagtagaaaattcctatgggcctgtctcctgggggcctctgtctgctggtggtctgcttaccacagaatcctaaggggcaggagtgcctgggcatgtgtctgtgggagccttgcagtcagttgtgtttggacaagtgcaacagtcaggctgctgattcctgtggcatgcaggctgtagaggttgacaaatggaggggggtgttgagggtgagccctagttgattttttaaaatttaaactctggtaagaacatttaatatgaaaaaaaaaaaaa

SEQ ID NO: 63735 - DNA, 511 bp, Homo sapiens
gggacaatgagaaggtgaaggctcacattctgctgacggctggaatcatcttcatcatcacgggcatggtggtgctcatccctgtgagctgggttgccaatgccatcatcagagatttctataactcaatagtgaatgttgcccaaaaacgtgagcttggagaagctctctacttaggatggaccacggcactggtgctgattgttggaggagctctgttctgctgcgttttttgttgcaacgaaaagagcagtagctacagatactcgataccttcccatcgcacaacccaaaaaagttatcacaccggaaagaagtcaccgagcgtctactccagaagtcagtatgtgtagttgtgtatgtttttttaactttactataaagccatgcaaatgacaaaaatctatattactttctcaaaatggaccccatataaactttgatttactgttcttaactgcctaatcttaattacaggaactgtgcatcagctatttatgattctataacc

SEQ ID NO: 63736 - DNA, 1808 bp, Homo sapiens
ttttttttttttgagcaacaaggctgtttatttcacctgggcgcaggtgggctgagtccgaaaagggagtcagtgaagggagataggcgtgaggccgttttataagatttgggtaggtaaaggaaaattacagtcaaaggggggttgttctctggcagacaggagtggaggtcacaaggtgctcagtaggggagcttttgagccaggatgagccaggagaaggaatttcacaagatagtgtcatcagttaaggcaggaacaggccattttcacttcttttgtggtggaatgtcatcagttaaggcaggaaccggccatctggatgtgtacgtgcaggttacagaggacatgatggcttagcttgggctcagaggcccttggctccagcaatgctgatgatgaggtgctggggtccccgaggacaggaggcctccaggaaggaaccggcctcagtccacgccgtccagggactgtggctctgccctctcgagctgtagcacctgattttctatgcaccgaaactgccaaggccagcttgtgttgtacagaaatggtcgcagatcaaacctgttgtcctcagggctgtagttctcggcgtggtacgcgggtgtgagcgtggtcatcttgtgtctgttcatggagtacttggagaaaaaccgcttcactttgtcagcgacctgtctcggggtgcagatgtgtctccacatgccgaggagtttgcagaacatgctgtagggccccatcttggccaccttcctgagtttcccatagaccgagagctccgcatatgtcatccccatatcttcctcgtcggtctgggacacctgtccatcagccaagggctccagctctgcggtggccggcgccaacaggatgctctgcagggcaggaagctggaagcgctggatgcagaactggacgaaggccctgaggtccgtcttgctgatcccgcctatggggttgatgtccgcactggagcagtcgtacttggtcaggtagcccaggagactctcatccacgttggcggatcccagcacgaggagcccaccgtggacaccccgagaccagaggctcaactgagcaaacagataggcgaggaccatccgtattcgagcctgcacattttgcagcgccaggttttccctgctgcttcctccatgagctgcaaacagagggctcttccccgtcaccaggctgaagatgcccatgacggccttcacggctggatcgatgttgagactgatgtggtggcttccaatctgctgggccaactctctggcccgggtgcacgtctcctgggaggagttcttgctggccatgtagcaggtggtcagtatgcgtccacagaggtctcggggatcctggggggtgtagctgatctggttcacgatggtgcggacatcagccagcacttcctcatttccactcctcacggcctcgcagacctggcagcacatggagtagatgaggcaggcggtggctgcgctgtccaccccgccactcaagggcagcaaaaaccctgcctgttgacttcgtcttaaaaaatcccagagccagcaggcaggtccaaggcttatctcctcctcagggctgtggtatttccactcgatgggctcagagatgggtgccagcaagtcctcgtggcacgagagggcaaagtccaccttcactctggggtaggggctcgccctgctggcttgaatctacgaggcagaggttgtgctgagctgggattgcgccattgtactccagcctatggtagttcacagcaagggtgaaactccgtctcaaaaaacaaacaaaaaacc

SEQ ID NO: 63737 - DNA, 1216 bp, Homo sapiens
  misc_feature (1)...(1216): n = a,t,c or g
gctctgtgtatcacatcaatcacgggaaccccttcaacatggaggtgctggtggattcctggcctgaatatcagatggttattatccggcctcaaaagcaggagatgactgatgacatggattcatacacaaacgtatatcgtatgttctccaaagagcctcaaaaatcagaagaagttttgaaaaattgtgagatcgtaaactggaaacagagactccaaatccaaggtcttcaagaaagtttaggtgaggggataagagtggctacattttcaaagtcagtgaaagtagagcattcgagagcactcctcttggttacggaagatattctgaagctcaatgcctccagtaaaagcaagcttggaagctgggctgagacaggccacccagatgatgaatttgaaagtgaaactcccaactttaagtatgcccagctggatgtctcttattctgggctggtaaatgacaactggaagcgagggaagaatgagaggagcctgcattacatcaagcgctgcatagaagacctgccagcagcctgtatgctcggcccagagggagtcccggtctcatgggtaaccatggacccttcttgtgaagtaggaatggcctacagcatggaaaaataccgaaggacaggcaacatggcacgagtgatggtgcgatacatgaaatatctgcgtcagaagaatattccattttacatctctgtgttggaagaaaatgaagactcccgcagatttgtggggcagtttggtttctttgaggcctcctgtgagtggcaccaatggacttgctacccacagaatctagttccattttagacaatgaagctgcttagtaatctctgccaagccatctcttaatattaaagcagacaccacagaatagatttcttcacttacaaatgcatattgggcacttataatacagcaggaactcttctcacctggagccttgatgttaaaagacacagccatgctcttgaggagcttacaatcctggctggaggcaggggagggtatattctttaaatatgcttaagtgttatagggaaagacggggttaccagtacacatgtaactagaaagccaggctcagttcttacctctgggaatcagaactctttatgcaacttggttaatagaatctactatctggaagataaagaaggattgtaatataannnaggggnntcgatgcaagggaggcccca

SEQ ID NO: 63738 - DNA, 1095 bp, Homo sapiens
cgaaaacatgagagaactcacactggagagaagccatatggatgtcatctatgtgggaaagccttcagtaaaagttctaaccttagacgacatgagatgattcacactagagaaaaagcacagatatgccatctatgtgggaaagccttcactcattgctctgaccttagaaaacatgagagaactcacttaggagataaaccatatggatgtctcctatgtgggaaggctttcagtaaatgttcttaccttagacaacatgaaagaactcacaatggagagaaaccatatgaatgtcatctatgtggaaaagccttctctcattgttctcaccttagacaacatgagcgaagtcacaatggagagaaaccacatggatgtcatctatgtgggaaagcattcactgaatcttctgtgcttaaacgacatgagagaattcacactggagagaaaccatatgagtgccatgtatgtgggaaagccttcactgaatcttctgacctcagacgacatgagagaactcacactggagaaaaaccatatgaatgccatctatgcggaaaagccttcaatcactcttctgtccttagacgacatgagagaactcacactggagagaaaccatatgaatgcaatatatgtggtaaagccttcaatagaagttacaactttagacttcatagaagagttcacactggagagaaaccatatgtatgtcctctatgtgggaaagcctttagtaaattttttaaccttagacaacatgagagaactcacactaaaaaagcaatgaatatgtaagaatcatcagctgtagcgttaacactaaatacaccaaggacaaacatactacaggaatattatgtctgtaatcagtgtggaaaagcctttatttatatttaccactttgctcaacctaaatgaattcaaggtagagagaatccagatgtatttaatgtttatggcacaaacttcagactctaggctgaccatatacaacgtgagagaatgaaactatagatcaaaggaatgtggaggagtcttcatccacagctctgttaaataaatgggagaaatcccatcccgaaaaaaaaa

SEQ ID NO: 63739 - DNA, 962 bp, Homo sapiens
acttatgaaagaccattgtaattctagctttttctgttgtgtccatgttctttttcctttacaaatctaccctgatgttttgtattgattactttgccctttgatgtcattcatcaaatactttggtgttattcattctacttttgtggctctgcatatgatctgcagtgcttactttaaattaagttggcagttaggtatcaatggtggaaattaggtgtttatgttccataacataaacattatcataacattactaagacttaatgttttagtaattagattgtcagtctacctatgtaactgtttcctagagaaaaatcaggatagaagacagataaaatactagttacctaaaaatttaaataaatctattgttaggattttctggtaacaaattacttgggtatttatttctgtaagaaaagtttggaaggctttccacagcatttgctgtatttcttgaaggcagaagaaaaagtaagtaccatgctaacaatgtaaatttgtaaggcccttcataaatttgcacaatgccttcttacttgctcaagacacttgtgatgtattaattgctcttattcatatttacgaatcaggagtataagacccaaagaaatagccaagagcacagaggctggaactgagctttttctgaaacaagaaagctgtctgaggattcctccaatgctttagaacctggtaattttattaatttgatgtttttaaaaatatgtttatacagatgcttgcattgggcaatcaagttggcaaactttatgtttgggatttagaagtagaagatcctcataaagccaagtaagtatttagaaatttctgttcaaaatttcaggctttttctccacacttgtatgccaatgtagagaagatcatttatatttgcagtgccatccttaagtcatttttaacatttactgttttcagagataaagttattcttt

SEQ ID NO: 63740 - DNA, 1952 bp, Homo sapiens
cggacgcgtggggaagaaacctatgcaaattttataaagcacaatgatggcaaaaatatcttctatgctgctcgtaccccagccacactgtttgcggtcatgtttgctatgtatataatctcaggactgactggcttcattggcctaaactctatagctgtcttgtgtaaccttgtcatggggttagcactgatatttctttgtacttgggcatatgttaaatactctggggagttcagagaaattggaacagtgattgatcagattgctgaaacactatgggaacaggtattgaagcccctgggtgataatttgatggaggaaaacataaggcagtctgtaacaaactctatcaaagcaggcctgactgaccaggtgtctcatcatgccagattaaagacagactgacagttcatctcctcacggactccactctctttttttttcatgcttgctgtacaatgagaactcaaataaaaataaaccaaagtttacaatcaactgtagaagtagtttagtgtaactggcttcacagatggctgccacagagtgtgaagattgtttgttagttttaagcattcttttaatggctcctaagacatgcagatggactgaggagcattggttaatcatgcacctttgtgccatgtttaactcttttatttctttttacttaatctaatgttagtgaatttgtcttatgtaaaaggatatttcagggaaatattttcagaaatctatttagagtctctttaacacagtgtcccattgaaattttaatttttagagaatttatgaatcactgtttcaagaaccagattggaaagacaatgaagcctttattgagccactacattaaaagtatatattgctttactgccttcaataccagtattacataaatgcatgtatcagaaacttcacagaaattacatggcaactcttgtagctaagaaagtaattctgaggtgtacatttgtcttgcctttttaaatttataaacttgccctaaaaggagatgcatatctgggaaactgaactgtctttttgcagtttagccttcatgtatataaaatatgccattaattttattggggaagaaattccatccaaaaatgttgcctacagctatgagttaagagtgtctgtacagtgtgtagcttttattttctaaaatcacagatagggcatgtatatgacttataaatatataaatacgattttgtattaaaagttttgtagtttatggcaaaatctggtcctgtggtaggctaaataagtactgtccctgtgaaaggaatgtttgtggctcatgtcagtgtgtgaatgcatagacaatttgaagtttttgatatatttgtgatatttatcttgagcactgcaatctcaccccccccccgcccaccaagggaattcaatgggaatgtttattgtgactttgtcctctgttgcattttaaagttatttcctgtaatttattttcagtacataattaaaaatttgttgtatatataaaatgaaacttgtgattcttttttaaggaatttttcaagtatgtattccacttcataaaccacatttgtttatagtgaaaagagcatgagcaggaaacaccccagttgagagctctaaggcattgtacctcaaaactaagcttgtaaaaagttacttttctgtgtctgtctctataagggaaaacctatgattagcctagttgtagatggggattgttaatttctttctctctctttttttttttttggggggatatgaaagggtaacattttttcaaaacttttggggccttttttgggaaccccgataaaggccctagttttggtgggtttttttttgaaaagggattttttttttgcccccagggtggaagggcgggggggcgatcttggtttaatggaaccccccccttcggggttaaagggaatttccccccc

SEQ ID NO: 63741 - DNA, 928 bp, Homo sapiens
ccaccactcctggggggcatccaccattaaaactcacatttccctaagagtcagtcacacactgaaggaatgccttttgtattcgggccgttatttggaccctttaagtttatcctctctgttataacatagacaagaaagagggagaatagatcagggcccaaattgagccactgacgcccaggttttctctatttggggtgcttgaagacagtaccaatgaaaatgtgcaagggagcagctgaacaccaaagactacttcctaaatcaaatgggtgttttgatggcataaaagatgcgctttctgacggaagctcttgttacatttactacagtggaaaggtttttctcctgtatgcgttctctggtgtgtgaggaaatgggaacgctgattgaaggtcttgccacactcaggacatcgatagggcctgtctcctaagtggattcgctgatgggtaataaagtgggagctctgattgaagctcttcccacactctccacatttgtagggtctttctccggtgtggattcgttggtgcttaatgagggcggagctgtcggcgaatcctttcccacagttttcgcacttaaaaggtctctcacctgtgtgtgttctttggtgcgtgaccaaatgtgagctctgactgaagcttttgtggcagtcaggacaactgaaaggcctctctcctgaatgagtgctcatgtgagctacaaaatgagaactatctctgaagcccttcccgcactccgggcatttgaagggccgttctcccgtgtgggttcgttggtgcttaatcaaatccgagctctggctaaaactctccccacagtcattacacctgtaaggcttcacccctgtgtgggtcctctggtgagtgatgaaatttgagcttcgactgaagcttttgtgacattccaggcccgcctt

SEQ ID NO: 63742 - DNA, 737 bp, Homo sapiens
atggagatagttgtgctgtgtgcattgaattgtataaaccaaatgatttggtacgcatcttaacgtgcaaccatattttccataagacatgtgttgacccatggctgttagaacacaggacttgccccatgtgcaaatgtgacatactcaaagctttgggaattgaggtggatgttgaagatggatcagtgtctttacaagtccctgtatccaatgaaatatctaatagtgcctcctcccatgaagaggataatcgcagcgagaccgcatcatctggatatgcttcagtacagggaacagatgaaccgcctctggaggaacacgtgcagtcaacaaatgaaagtctacagctggtaaaccatgaagcaaattctgtggcagtggatgttattcctcatgttgacaacccaacctttgaagaagacgaaactcctaatcaagagactgctgttcgagaaattaaatcttaaaatctgtgtaaatagaaaacttgaaccattagtaataacagaactgccaatcagggcctagtttctattaataaattggataaatttaataaaataagagtgatactgaaagtgctcagatgactaatattatgctatagttaaatggcttaaaatatttaacctgttaacttttttccacaaactcattataatatttttcataggcaagtttcctctcagtagtgataaccacatttttagacaattcaaaactgtccttcaaga

SEQ ID NO: 63743 - DNA, 663 bp, Homo sapiens
ttttttttttttctataacaacatctcttactatttttacttgaaaaaatgttttgcgtagcagactgtcatagccttgaacgccggctccctttcttcctccctccaagtggctctggggctgttgatttccgcagagcttgggttggggtaggggctcagcctcaccagctttcagcagctggtttaggccagcagtgcctccccacctccccaaggggaggggtggtggcaagacctcagcacagtctgtggtatcacagggctcactggtagagcaggtagcgcttcatggcagggggcaagggcagggcagacacctggccgagccgggtatcccccaggttgtggcgcacacacaggcggctcaggtgcagaagggagtgtggctccgctctcctttcgcccaggtagcggatgcggacctggcactggccccagacagcgcttactgccggatagagggtcctgcccttcagtccgcggaatgctggccccaggtaggtgcccccaatagcgtagcccagagttccctcctccatgtccagaaccaccagcagtctctctggcacctccagctgctcaccctgagttcccgctggatactggggggctccgggccccttgctctgatggtacagcttcccccgcccgatgtcccag

SEQ ID NO: 63744 - DNA, 2839 bp, Homo sapiens
ggtgattgaacaagaaaagcttgaagctcaagattcaggagaagaggctaggaatctttcatttaatgagttatatccctctggaacacttaagcttcagtacaattttgatactattgaccaacagttttgtgacttagctgataacaaagacactgctgaatgtgacattgctgaagtagatggggaactttttgtggctcaaagcaactttaccttgatattggaaggtgaagaaggagaagttgagccaggtgattttgcatcatctgatgtgttacctaaagcagctaacacagcaactgaagaaaaacttgtatgcagtggggaaaatgataatcatggacaaattgcaaatttgccatctgccgtaactagtgaccaaaagtcccaaaaagtagacactttaccatatgtgcctgaacctattaaagtagcaattgcagaaaatttactagatgtaattaaagacacaagaagtaaagaaattacttcagatacaatggaacagtccattcatgaaacaatacctttagtgagccaaaacataatgtgtcccactaaattggtcaaatctgcatttaagactgctcaggaaacaagcacaatgactatgaatgtcagccaggttgatgacgtggtttcctccaaaactcgtacgagaggtcaacgtatccaaaacgtgaatgtcaaatcagcacaacaggaagcatcagcagatgttgctactcctaagatgccagggcagtcagtcaggaagaaaactaggaaggcaaaagaaatttctgaagcttctgaaaacatctattctgatgtcagaggactatctcagaaccagcaaatacctcaaaattctgttacgcctaggagaggaaggagaaagaaagaagttaatcaggacatactagaaaacaccagttctgtggaacaagaattacagatcactacaggtagggaatcaaaaagattaaaatcatctcagctgttggaaccagcagttgaagaaactactaaaaaagaagttaaggtttcatctgttacaaaaaggactcctagaagaattaaaagatctgtagaaaatcaggaaagtgttgaaattataaatgatctaaaagttagtacggtaacaagtcctagcagaatgatcagaaaattgagaagtactaatttagatgcttctgaaaatacaggaaataagcaagatgataaatccagtgacaagcagctgcgtattaaacatgttagaagggtcagagggagagaagttagtccatcagatgtgagagaagactccaaccttgagtcatctcagttgactgttcaagcagaatttgatatgtctgccatacctagaaaacgtggtagaccaagaaaaatcaatccatctgaagatgtaggatctaaggctgttaaggaagagagaagccccaagaagaaagaagctcccagcattagaaggagatctacaagaaataccccagctaaaagtgaaaatgttgatgttggaaaaccagctttaggaaaatccattttagtgccaaacgaggaactttcgatggtgatgagctctaagaaaaaacttacaaaaaagactgaaagtcaaagccaaaaacgttcattgcactcagtatcagaagaacgcacagatgaaatgacacataaagaaacaaatgagcaggaagaaagattgctcgccacagcttccttcactaaatcatcccgcagcagcaggactcggtctagcaaggccatcttgttgccggacctttctgaaccaaacaatgagcctttattttctccagcgtcagaagttccaaggaaagcaaaagctaaaaaaatagaggttcctgcacagctgaaagaattagtttcggatttatcttctcagtttgtcatctcacctcctgctttaaggagcagacaaaaaaacacatccaataagaacaagcttgaagatgaactgaaagatgatgcacaatcagtagaaactctgggaaagccaaaagcgaaacgaatcaggacgtcaaaaacaaaacaagcaagcaaaaacacagaaaaagaaagtgcttggtcacctcctcccatagaaattcggctgatttcccccttggctagcccagctgacggagtcaagagcaaaccaagaaaaactacagaagtgacaggaacaggtcttggaaggaacagaaagaaactgtcttcctatccaaagcaaattttacgcagaaaaatgctgtaatttcttgggaagattttaatgtacacctatttgtaaagtcatcagaatagtgtggattattaaatatctagtttggaagaaaataatttatataaattattgtaaatttttatgtaaacagaaggtcttcaataagtaaagtaactccatatggagtgattgtttcagtccaggcaatttttctattttatattaagacttcatacatttatatatgtaaatatggcttattaatggaatgttaaataaaatgtatacttcacagtcgtttgtgtcttggatttttgaaagggaggggatatctgtttaaatagttttatatgctcattggtctcattttctctataattaaaatactagaccagtcttaaaatggggatgattgaagtattgatatttctttttacagttactattttataatttatgcactttgattctgtgattcagatttctaatcagaaaatgtattttttttgtttttggctgttactatgttaaaattgaattatgggcatgtcattttgccatctttgtagtttcacaaattttgtgtaatctacctcaaatgaataatccaagtattggttaaaaaaaaaa

SEQ ID NO: 63745 - DNA, 1125 bp, Homo sapiens
attttgcaaggcagatccagcgccggttcaaagacactattataaatgccaagtatggagggcacacagaggcagtacgccggctgctgggtcagctccccatcagtgctcagtcttacagcggtagcccctatctggatttgtctctcttcagttatgatgacaagtgggtatctgtcatggagcggcccaagacttgtggagatcacccaatcaggttctatgcccgggactcgggcctgctcaagtttgagatccaggcggggttattgggccgccccatcaaccacacagtgcgacgccttgttgccttcacctttcacccttttgagcctttcgctatttctgtgcagaggactaatgctgagtatgttgtcaacttccatatgcgacactgctgcacgtaggtgcctcaccagagccagattatctggtcttccaagactttgccactcacttatctcagtggactccaaagcaaaagctcccgactactagctctgttagttccagcctgctatacctcagatgggagagagccagagagaggagtgagggtggctcaacctaatggaatttttaaattgtatacaatactgctactgattgttataatatcctcttgcgttttccctgtgggaatgcccagcattaattaagtccatttcatttttgctttactttgcatttgattgctgtgaagatgaaagcattagacttttatccccttcatgtcacttcttcggcattatggtttgcatctgaaagcagttaaatcttgtttactgatgagaatgacatacatcctttccatttagctcataagcacggctatctttttaagagaaaaataaagccatggtattttcatacttaaatatatgtggttggatgactgctttatgttcctatcatactcaatgctttcaagtacttgggttccaggaaggactgtgaaagagatgagaggccatggatgcagcagctgttcctgggagaactaagtgggacagtggagacagatgaaggaagggcagaaaaagaaaaatatactgtggaagagcactggagttggatcaatgggaatgtgttgtatgaccaagagttgaagatgtttcaaggaga

SEQ ID NO: 63746 - DNA, 1939 bp, Homo sapiens
cggacgcgtgggcggacgcgtgggctggtgattaaaaagtgggcaagtcaccatcagataaatgatgccagtcggggtactttaagcagctatagtcttgtattgatggttttgcactatttacaaaccctacctgaacccatccttccatccctccaaaaaatttacccagagtcttttagtcctgctatacagctgcaccttgtacatcaagctccatgtaatgttcctccttacctctcaaagaatgaatcaaaccttggggacctcttactgggctttcttaaatattatgctacagaatttgactggaatagtcaaatgatttcagttcgtgaagccaaagccattccaaggcctgatggtattgaatggagaaataaatacatctgtgtagaagaaccttttgatggaacaaatacagccagagcagtgcacgaaaagcagaaatttgatatgatcaaggatcaatttttaaagtcatggcacagattgaaaaacaagagagatttgaacagtatactacctgtaagagctgctgtcctgaaaagataactgggcctctatttcttaattaaattcttcccaggaaataaaggaacaatagtttcattcataattacattgtgtttacctccatcataggttgcttttttcatagttcttgttttcatgttttatttttaaaaagacatataaagattgcatattttattatgacatttcctaataaacccctttgatttaaaaatgtatttttaaaaatgtttacattgatgatgagtaatattgcatgtgttttcaggtgatcagataaaatatattttgggaaattaactgaacaaataaaaagtttttgatataacttcaattaattgtaccacatgctaatcctgaagagatgtgtagaattttggaaagggtctaattcatacatgcttaaagtataacctacgttagatagtttgttgtcaaagtctgttctagtaaagtgaagattcaagtcagttgttcagttacttgaagcaaaacgaaatctttcatttcagtcaaatcactgcagtcatgaaatactgaacaattgccttaagtctttgcttgactcactgggatagactgaggctttgggtgtgtctgtattagcatttcattagtacttcacatgcttttgatgtactcttgagattgctttaaattttgtattgaaacaacaatacattttgcactgtagtaatgggagcactaactcttacaacagttagtgaatcgttttaaagaatcagttcagtgtagacattttgaaaagattgtttcctgtgctttacgatagcttagtgcaatgtgcacttctgttttacttgccattttcctgctctgttttctctgtgacatgaagcaacagaaactgagatcaaagttaagattatatcctgtttgtagtatcagatatttttctgtgtacaattataggattgtaatctaaactggaatttttaggcagtaagtcaccacaaaatgttttagataagacacaataaaattattataaataaaagcttaatgtttgtaaaaaatctcttttttagtatttcttttttcacatgaaagaagtggtggctgctaaaaaaaaagctacagtgtttattaagggtctttttgatttatgtaaatatttgtaaattggtcagtgcctgtaaatttaaatataaaaagtaaccttgaaaacagttttaactttttcaaaagaactatgtccaacattttttagacctgctgtagtacagttttgtacctctaacgtattttttttttgcagaccaaatgttaaaacttttgcttttctttgacttgtaaaaggtgcacattttcattttcttccttaagttcaaatttttgtatgatgtcaaatgcaataaaatttatatatggaaaaaaaaaa

SEQ ID NO: 63747 - DNA, 1468 bp, Homo sapiens
cccacgcgtccgcggacgcgtgggttctcatctgtatcaacggaaacatttgttccaaaacaagacttgccacaggtgaagagaccactaaaagcatccaggaccagacagccatccaggaccaaccttccagttctgtctgtgaacgaggacctaatgcactgcacagcatttgcaacggcagatgagtatcatctgggaaatctgtctcaagatctggcctcccacggatatgttgaagtaacaagcttgcctagagatgcagcaaatattttggtgatgggtgtggaaaattctgcaaaagaaggtgatcctggaacaatattcttcttcagggaaggagctgctgtgttttggaatgtgaaagacaaaactatgaagcatgtgatgaaagttctagaaaaacatgaaattcagccctatgaaatcgcactggtacactgggaaaatgaagaacttaactacataaaaatagagggacagtcaaaacttcacaggggggaaatcaagttaaattcagagctggatttagatgatgccattctagagaagtttgctttctccaatgctctatgcctttctgtaaaactggcaatttgggaagcatcactggataaatttattgaatctattcagtcaattcctgaggctttaaaagctgggaagaaagtgaaactatctcatgaagaagttatgcagaaaatcggtgaactctttgctctaaggcaccgtataaacttgagttcagacttcctgattactcctgatttctactgggacagagaaaacctggaaggactttacgataaaacgtgtcaattccttagcattggccgaagagttaaggtcatgaatgaaaaacttcagcactgcatggaactaacagatctaatgcggaatcacctgaatgagaagagggcactccgcttggagtggatgattgtcatcctcattaccatagaggtaatgtttgagctgggacgagtatttttctgatcaagtgataaccaaagtgtcactgcaagagatattcaagttctacaatcaaaaattaaatgttcggcccggcgcggtgcctcatgcctgtaatcccagcactttcggaggccaagaagggtggcttgagatgagatcaggagctcaagacaagcctggccaacatggtgaaaccccatctctactaaaaataccaaaattagccaggtgtgttggcacacgcccgtcatctcagctactcaggaggctgaggcaggagaatctcttgaacttgggaggcggaggttgcagtgagctaagatcacaccactgcactccagccagggcaacagtgagactcagtctcaaaaataaacaataaaataaataaataaatgttcactactgggtgatcatttaataggtgtttttttaatcaagaaattatctttttcagcccagtatatcgtgtgaaaaaaataatgaagaatct

SEQ ID NO: 63748 - DNA, 773 bp, Homo sapiens
ccatgtggtcggtttctttattgagaccacagacggtagcgcaggtccctgctgtccacatgccccttgtagggacaggaggcccttcccgagtccaagtccgaatgccgggtccgggccgagcccacggccccgagtccaagtccgaatgccgggtccgggccgagcccacggccccgagtaccaagtccgggttccgggtccgggccaagcccatggccccgagtccaagtccggatgccaggtccgggccgagcccacggccctactggctactactgggaggggctgcttttgctttttggtgaccagatcttggacaagcggaacttggacttcttcctctggaggcccagcttctcaatcatgtcccgcagcatctgatcctcctcttgttcccggagccggtcctcgtccagcgagtccacgatgtcactgcggtcgttcacggtgctcacgtactgctccagcagctcctgctcccgccgccgctcctgcagtgacttcagagcctcgggcttggccatgagccggcgcagctcgccctcgatgtccagctgctgctcctccagacgctgggccttggacttgtacatcagctctgactcctgtctcagcagaagctgcttctcgtgaatgagccagaaccagtccaccatgaggctatcctcagcgtcatctccctcggccgcccgcagtcgcttctccagctccacgccgcggagctccagggcgtccagccgcctctcgatgtcctgcagctgcctctgtat

SEQ ID NO: 63749 - DNA, 3507 bp, Homo sapiens
cacgtggctgcagcggggccagagcagcaatggcggcgggcggcggcggtagctgcgaccccctggcccctgctggggtcccttgcgccttctccccgcacagccaggcctacttcgctttggcctctaccgacggtcacttacgagtatgggagacggccaacaaccggctgcaccaggagtacgtgccttccgcgcacctcagtggtacctgcacctgtctggcctgggcgccagcgcggctgcaggccaaggaaagtccccagaggaaaaaaaggaaatcagaagctgtaggaatgagtaaccagactgacttattggctcttggcacagcagttggtagcattttattatacagcacagtaaaaggagagttacacagtaaattaataagtggtggacatgacaacagagtcaactgcatacagtggcatcaagacagtggctgtttatatagttgttcagatgataaacatattgtggaatggaacgtacagacatgcaaagtaaagtgcaaatggaaaggggacaatagcagtgtcagttccctatgtatcagcccagatggaaagatgttgctttcagctggtcgaacaatcaaactatgggttttggagaccaaagaagtctacaggcatttcacaggacatgcaacgccagtttcgtcactgatgttcactaccatcagacctcctaatgagagccagccctttgatggaattacaggtctttatttcttatctggagcagtacatgaccggttacttaatgtctggcaggtccgatcagaaaacaaagaaaagagtgcagtgatgtcatttacagttaccgatgaacctgtctatattgacttaactttgtcagaaaacaaagaagagcctgtcaagttggctgttgtttgcagagatggtcaagtccatctttttgaacacatattaaatgggtactgcaaaaagcctttgacttcaaactgcacaattcagatagcaacacctgggaaaggcaagaagtcaacaccaaaacccatccctattctagctgctggtttttgctcagacaaaatgtcattgttgcttgtatatggcagttggtttcagcctactattgagcgagtggctttaaactccagagaacctcatatgtgtttagtaagagatatttcaaactgctgggcccccaaagtagaaacagctataacaaaggtgaggacaccagtgatgaattctgaagcaaaagttctggtgcctgggattcctggtcatcatgcagctatcaagcccgctcctccacaaaccgagcaagtagagagcaagaggaagtcagggggaaatgaggttagcattgaagaacgtctgggagcaatggatatagacacacacaaaaaaggaaaggaagacctccagacgaatagctttccagttcttcttacccagggcttagaaagtaacgattttgaaatgctaaataaagtacttcaaactaggaatgtaaaccttataaagaagactgtattaaggatgcccctgcatactattattccgttgttacaagagcttacaaagaggttacaaggacatcctaatagtgctgtgctaatggttcagtggctaaaatgtgtgttaacagttcatgcatcatacctgtccacgttgcctgacctggtaccccagctggggacactctaccagttaatggaaagcagagtcaaaacttttcagaaactttcacaccttcatggaaagcttattcttctaattacacaagtaacagcatcagagaagacaaagggagcaacttcccctggacagaaggcaaagttggtgtatgaagaagagtcttctgaagaggagtctgatgatgaaatagcagataaggattctgaagataattgggatgaagatgaggaggagagtgaaagtgaaaaagatgaggacgttgaagaggaagatgaggatgccgaaggaaaagatgaagaaaatggcgaggacagagatacagcaagtgaaaaagaattaaatggagattctgacttagatcctgaaaatgaaagtgaagaagaatgaagacagcaaagcaagccggtcaaactatataaactctggctcaccttgcccagtggtgagggctgcctctgtgccaggatgccaaggaccgctgcacatttccaaattcacagcagtggatcccatgccactttgctgtcctgagcaccccagacttgactgtgtaaataagagtgtttcattcaaatgttaataaactttacacagtatatagacacattttctgcaatgtactgacatcagagtccaatatatggtatatttttataatataatatcctagtatgattggttatatcaagaattgacaagtgcagataaagacctttcccataggagttcaagaactggactgttgtgaagaagtcagctcttatctcaggttggtatctttcatcaaatccagatgcaaagcagcactagtgaaaatttttttaatttagtacatttaatttggtacattttcataaaatatgaagggataactacaaactggagtaaaaatgatggtaattaaaaaaaatcctcagtatccctagcttgtctattaactgtgataatctgacttgagtcagattgaatatttggagtgcttccccagaataaccacttatttttgaagctatcatgtgaagtatttttttaaaacaaaacaaaaattatggtcattaaaaaactagagaattagccatattaaggatttttcttgactgcaaattacttctaaagaatcatcagtgtatagattagaagtgctcattacctgcaacttttaaaaaaaattcagttatagctgcttttgaagaggtttccatttttatttaaattactaatggatcaaagaacaattgtttattttttctctttggttttagatattaatgataaccttgttggaattttttttccaaagaaaatatttttataattaaataatttaatgtttttcttccttttcattacctactcttggcagtgttagggtatctgtttacctttaaaatgataagtctcactcaagattttttatgtatgtataaatattttggtgtgctacaaaagcctttgcaaattatcagtagtagtttttttttttttttttttttttaaaagaatgagccgatattggcttagtgctcactaggggacatgcacatggaagctcacctctaagaaagggctgggcagatggatttattttttcccacctgtgaatatgtaaaacaaaaccattatctttgagggagtttttaataccaatgacagaacagagatttgtgtgctcatcttaagagccagagccatataagcatcttgggaaagcaagtttgaaccagctgctggtgtaatgtacagttatatttgtctataaatggagctgtttatggcaatttaataccattctctttgtaaagtgaataaatattcatctttaaaaaaaaaa

SEQ ID NO: 63750 - DNA, 2521 bp, Homo sapiens
gagcctggttagcagtcgctttctgatcccggaaaggaccctgagctgggaaatagcgagaggcggggatgttggggattttaaaacttatgtagatcaggcatgtagagctgctgaggagtttgtcaatatttactatgagacaatggataaaagaagacgggcactaaccaggctgtatctggacaaggccaccttaatatggaatggaaatgctgtttcagggctggatgccctaaataatttttttgacacattgccttctagtgagttccaggtcaatatgttagattgccaaccagttcatgagcaagcaactcagtcccaaactacagttcttgttgtgaccagtggaactgtgaagtttgatggaaacaaacaacattttttcaaccagaacttcctgctgactgctcagtccactcccaacaatactgtgtggaagattgcaagtgattgcttccgttttcaagattggtctagtagttaaaggggcaaaagtccattctcatttggtccattagttccagcaattgaaatttatgtgaattattttgattgtagaagcactataatatgtgctgaaactaaatttctttaatattttctattcctgtcagcaccttttctagcagctgccagtttggagcattgccctctaagagctttaaaactatttttttacatgccttatatacattccactaatgacattcttataataatattaaacacatgatcttggtactaacatactcactgtgaacccagcctattgcaaaaataaaatctttttataatattatctatgggatgtcagcacaatataacactctgggaagaagtggagttttttggttattaggttaattttctagtaaaacacattgcctgttttcagttaacactggtaatgccattttaatatatggctttttcaaatcagttcagtgaaaatagtacagatttaggtttacataactactctgacatactggaattgcatatagagatgttcagtggtcgtttttcattttaagtaatttttgttttggcatttttttgtgtgaagtaaattaatcaactagagaggtgcaaaacgttctcagttgatatctgagtattgggtgcatttggtggcttaaaagcaaagcttcctaaaaagatttttcttggcagctccaggtctatacatttaggtaatgaatggtagtagaactaatagctttaacaggagaatagggaatgagaaatagaaatccaaggctgaagccaaaagtaaggagggtggccaaatggtaaactattggtacttgttttctacctcctaaaaatgtagcttatttttaggatttaaatcactaagtaaataagtatccttgccaagtgatcatgagtgtcatttttgttctaagactaatatttttagatctttttacttcacctcatacttatcaccaatgtatatctccatttattcaataacttactggggtaaaataacagcaataaacctaaccttttaacagggtctaacatgagagttggagtcaaagccattgttatcttttggtgacacccttaaattttaagtcttccagtcttccatgtgaactttaggcccaaagtttcttatgtatcacacatcccccaaataagtgattttttcccagtgctttgtactgtcaactgcattatctttaattatttaaaggtagaattatttaattttgtgatttgttcttccatatgacattgagcaaatagatctgtttcaaaatatgttcccgctatgtggataactcttctttttaaaaagaaaatagagaatagcaaatcttcatgataatcctcaaaagaacaaaatgcttaactttatctcttaatttctaaaggtaaataacctaggttcagcttttgcttaaacattaaatatcttttccattttttaatgtttgtaagctagatatgccagctttgtttctacattgcaaccaaaaactgtttcttttcacttaattataaaaccagtaattcatttactcttgcccaaaactatacactgtatttctgttatagtaacaaaatagagttatgtagaattgtatggaactcaaatttaaaccatgctttcttgtagtactgattgaaacttacacgttttattctactcatagtgagcttattcttattttggattgattttccccaaaacccacagcttcagcagcaacaatccagaatgtccccaaatgcctgtcctttccccttacagagaagaacaatggtaacctaaaagctgccatataacctagcaataacctacattgaacggtgtgcaattgttcatgattgttgtgttttaagacttgtatataaactgctttttccaaactctgtataacttttaaatggctggaactactcgtataaggactagactgtatttttgacatgctcctatttttgtaacttgaaaaaataaaattttgccttgtgccagattttaaaaaaaaaaaaa

SEQ ID NO: 63751 - DNA, 1146 bp, Homo sapiens
ctgggcgtggtggcgcacgcctgtagtcccagctacttgggaggctgaggcaggagaatcgcttgaacctgggaagctgaggatgcagtgagccgagatcgcaccgtctcaaaaaaggaagtaaacatgtccttcctgttctcattttaaacttgatttagatttccaataatgaaagacaagtgggtgtgtcacatgtgtgctagcaatgtgaaacaaatgctattcatatttctcaattcataattgcagtttgatttttgatgttagttatgggctttggattcctcttcaatcaaatcagcttcacaagttaaatggattgtttttattaatttacaatgaaatagtttttgaatgacttcacacaaaaacctagagataacatcacaattgcaatgttataaagtttaaaggcctattcatttcactgtcagttgaaattcgttaccaggtgaaaattctggagctggggttttgcactgaggatgctacacagccactagcctttttaatttgggctttattaacagaaatactgacttagtgaaattacaggcataggcctcttaatcgctttttatgagtctgaacttttgctttcaataccaaatagtatctgaaaaacatgctcacttttgtgcttcttgagaaattctaagaattggcccagattcatgtgatagtcattccttaatccatagtcaccatgagcctcaaggagtaactcttcaaaagaatggaaaaggcgcaggtcctcaccatttccttctgtctccacgctttcagcatgcttacaggaaatgtgcttccaattggggtacctaattgtgtgccagaactcctcacagtgctctttgaaaccctccacacagattataccaggctttcctgtcatgcaaaatccagtcacatctaaccttttcccaacatccaaaatctttttccttaggtcctgctgatatatatggtgactgtagatccacattcggaggaatgtgttcttgactggctttgcttgtgtagatggttcatatacaagctttctgttcaggaaataagatgcactgttgtcctgtagccactggattgctgcacatacacagagctcacctggatcaaaagtccctatgtaagactcgtgcc

SEQ ID NO: 63752 - DNA, 747 bp, Homo sapiens
gaaaaatgttatcttgtaaaaggaaatatttatccggtcccagatagccggtttcctttcctaggagttcacttcacaccaaggatggatggcagtatttggctagggcctaatgcagttcttgcctttaaacgagagggttacagaccctttgacttcagtgccacagatgttatggatataattatcaatagtggcttgattaaactggcatcccagaatttttcctatggagttactgaaatgtataaagcatgttttcttggtgcaacagtgaagtatcttcaaaaattcatccctgaaattactatcagtgatatacttaggggcccagctggagtaagagcccaggccctggatagagatggaaatctggtagaagattttgtatttgatgcaggagttggggatattggaaatcgcattcttcatgtgagaaatgcaccttctcctgctgctacttcttccattgcaatttctggaatgattgcagatgaagtacaacaaagatttgaattataaataatgaaaggagctaggtcaaagataaccactgcattgttaaaatgatgtaacatagaaataataattttctacaaaaattagccaggcatggtggcgcatgcctgtagtctcagctactcaggaggctgaggcaggagaatcaattgaaccgagcagacggagacggagtttcactcttgttgcccacgcttgagtgcaatggtgcgatcttggctcactgcg

SEQ ID NO: 63753 - DNA, 1912 bp, Homo sapiens
gctaccttagcaacaaaaagaagtaacaaatacaaatgtttggagatgtgtgaatacttacattctttctaaatcacgtcaaatagattagttcaaatctgaaaatctcatcaccataagtaacaaactaggactgccattcaattccatttagatgagatcctttgcttcttagtataccaagccaaaaagtaaaacaaagtcaagcatgagaagcaatggtagaaactgataatatttcccaaggaaaggaacagacgcatttcttcaaggaaaaaaaaggggggagggttattaaatgaagaagagatctaatgtttcaccatgtttatttgatatcatgatttcttagtccttacacaaagggaaataagcactcccttcccttttttgttgcatgtgtgttagcaggagtcggaagaacagaatatgagggaacaagcagagggtgcagaaaatagaaagatggggaaagaaagatgctgttgaagacacagagtgagtgtttatatgaacccttctctaaataagcagtatcaacaaagagtacaaagctgacaacatggagtgtcttcttacagaaataatctgggaccacattcaacatacattatacagcatcagggtacaggttttccgtcagaaattatgtgtatattcttttttctcgcttttaagtttcattgatgacattgttcatatacttttagtgtattattaagcaaatattaatttaatcatataaaccaatcctggtcagcaaaaagcactgttagctgccatgtaaaggtccttctgtcaagtaaaacttcattctacacttctagcttcctatcagaggaacttcttgaaggaactctttcagttggctttacaactcatctgcaacaccaaatgtggattaaattcagatcacaccttggttgtgtatatatgtatataacagcccctggcacaattagctaatatcttgtaattgtaaacgaattgttctcttttagccatttcccccccatttcctataacggtctttatccaaatgctttggtgctccataagtaactgtgagtcagaggtgcctcagtgctggagatgcctgtcacagagaagatcagaatgtgtgaagataaccctgcattacgttcatctcatcagttctgcccaatccacaggggtaaaaaatggatgagatttgatatcttcaacaccagcaactccagcaccaagtcgttccagaggattgaactgcaagagctgttgaatgagtgagcgagcctcttcagagacacattctggcatgttcaaagtagtgtgagtatttattcctgctggatggcattcaaccagagtcttgccagtgagaagttcaaagaggacagcacccaaactccaccaatcacaggcttcagtttcttcagtgattgctccaacctctggggcacagtacattctctctatggcatcgctgtcacaggaatcttcaacctcactccacctgctaaaatacgttagctgaatgtgtcctctatcattcaataagatgttgtttgggttcaaatcgcggcacacaattccctctctatgtaaagcatcaagggctaccaccatttcagctgcccatctttgaatgcagccctctgggatgtaaaacctggaggctagtgctaattttttatcaaggtcctcaaaaatctgatgtatttccttgtctccttctagcactaaaccactttcacccttagtctcagagtctctctggaataaagaagttggttcctctttagccaaatcatcagtctgatctgtaaacagcaatacttcttctgtttttaaagtgtctgtgcttgcaatatattcattagcacctgagagtggactacaaatacggcccacgcgtccgcccacgcgtccg

SEQ ID NO: 63754 - DNA, 1740 bp, Homo sapiens
tcgcacacaaaaccaatggatgaacctgggtaaagagtgttagtataaacaagtagtgtttatactatttgtcttcttgcaacttttctgtaagtttgaaattattcttcaatattaagctaaaaattttttttttaaatcttggccaaataaatgattgtttttcaaatgaatattttttattttacgtcctttcttttcctgttctcttacttcttttcttccttttttgtgtcccttcttttagaagtccaaggcttgcgagaaggtcatttccgtgggtcaaacggtcatcacgaagcatcggaacacccggtattacagttgcagagtgatggctgtgacatcgcagaccttctatgaggtcatgtttgatgatggctcctttagcagagacacatttcctgaggatatcgtgagccgagactgtctgaagctgggcccacctgctgagggagaagtcgtccaagtcaagtggcccgatggcaaactctatggagcaaaatattttggatcaaatattgcccacatgtaccaggttgagtttgaagatggatcccagatagcaatgaagagagaggacatctacactttagatgaagagttacccaagagagtgaaagctcgattttccacagcctctgacatgcgatttgaagacacgttttatggagcagacattatccaaggggagagaaagagacaaagagtgctgagctccaggtttaagaatgaatatgtggccgaccctgtataccgcacttttttgaagagctctttccagaagaagtgccagaagagacagtagtctgcatacatcgctgcaggccacagagcagcttgggttggaaaagagaagatgaagggacatccttggggctgtgccgtgagttttgctggcataggtgacagggtgtgtctctgacagtggtaaatcgggtttccagagtttggtcaccaaaaatacaaaatacacacaatgaattggacgcagcaatctgaaatcatctctagtcttgctttcacttgtgagcagttgtcttctatgatcccaaagaagttttctaagtgaaaggaaatactagtgaatcacccacaaggaaaagccactgccacagaggaggcgggtccccttgtgcggcttagggccctgtcaggaaacacacggggacctctctctctagctccagcaggtggcacctcggtacccagcgggtagggcgataatttatatattttccacagtcagggaaggactctcacttatttgtttcaaattgcagtttttataaaacatttttaaaacacaaatggcatgtatgctaatgagatttacccgtgtgctatctgtatttcccttgtacagaacttttacatttttgaatattcctattacttttgattgtgtctgatgggaactgagttgttggcctttgtgaaatgaaatttttggctcttgagaaagaattcttatgaattgttatgcgaattttatatatttaaagagggagatctggggctgttatttttaaacactttttttcataatacatattccgagtagatatttataaaatatatgtttctttcattatgtgtttgtaaaattagagtttaaataaatatgctttgatgcatagttttgaactaatgtaacatgatttttcttttttaaaacagcctgaaaatgtactagtgtttaaaaataaagatttccattttctccaaaaaaaaaaaaaa

SEQ ID NO: 63755 - DNA, 4013 bp, Homo sapiens
cagacagagctgctcctgcgggacatcgccgccttctgtttcctgggcatcctgtgtaggcgctccgctttccttctggatgtctttgggccgaagcatcctgctctgaagatcactcgtcgctatgccttcgcccatatcctaacggttctgcagtgtgccaccgtcattggcttttcttattgggcttctgaactcatcttggcccagcagcagcagcataagaagtaccatggatcccaggtctatgtcaccttcgccgttagcttctacctggtggcaggagctggtggagcctcaatcctggccacggcagccaacctcctgcgccactaccccacagaggaagaggagcaggcgctggagctgctctcagagatggaagagaacgagccctacccggcggaatatgaggtcatcaaccagttccagccaccccctgcttacacaccctaatgccagccctgggctctcttcctcggcagcccctccctcaactctgcagctcctctcgcacccagaggagctcctttccccagcaggcctcactggtaggatcctgaccatcttctccaaaccttccccaggagagactctgcctttagggtcatccaagtatccctgctctcagaaccggaggtccactggttttctataatgtactctttccctcctgccacatcctgcccccttcacattcacgagtcattaccagccagggaaggtcatccaagtttcctccagcatgggcgatatctttgggaccgagactttccttggagagctgctgagagcggacagtcccaaaaacaagtgtcaaagggcccaagggaaaggggactgtgccctggaggctcacttcacagggatcagtgtttgctccacagctgtagctctgggctgacgccccccagaccccttccttctcggagtgacccgcccccaggccacctgctccggggagttctgtgcactttactctttggacttctcctcacgtgtgccctgggttttatggggagagggaattcgctgttgggaaaggcagagcaagttgcaaccctctctgcccttgcttcatgtgggctggagcccaggcaaggagaagcaggagccagcgtgagactgaggccccctggtgcctatcaaggaccagagtgaaggggactacatctcccagcccttcaccttttaaatatgagtggttttaaaaggaaaaaaatgaaaccaggcaacagcaacaatattctgtttttaaaatagggacaagactgttgtcactttttagacatgtatcccattccttttggctctgcaatatttggggctgtagctccttccaagcccatggtagtccctccccgagtctctcccagtagaatgcagcctcccttccctggccccttccctctcagtgacggtgactccctggggccttctcgtggaacccagaggggctgaggactgtggcctggctggcgggccagcgtggtgctcctcaggactgcagcactgagatggaacctggcctcagtttaggaacaggggccacaacagggcaggaacccaccaccctccacataggaatacaaccagtggggccacatcatgtgaggcatcagacccacactgtcagcccagcaggccgggctgtgtccttcagacccagtgctgccctagactctgactcgggactccagcttgccacgtgccctctcccctcttgaatgtactctggtcttgcagtgtgctgctgggactttcttgctcagccatcactctggtcaccttgtttgctctgggtctggctgaattttctgccctgagatctgggcataaagtggatgaaacttgaaagaccttcagtgtagatccagatggccaacctgtccttgttaagttacttgcttcttgggaatcagtgtcccctgctgagctgaaaaggaaatggattccaatctcttccaacctttaaggtgatagatagtttgagcaagactggagaatggacaacactatgaagctgtggctagaaagggactgtcatgtcccatcctttggccagattgactggggatgtccggacagatgcctgcatgggtggtgagggccacatctgcacacgagccagtggctgcttgcagttcactgctgtgatgccagagtgtgttcaaaggtgactctcctgctcttctggactcttctctcaggcaagaaaggctgcaggctgcctgctatgtgatgcctgagcacaaagccaaggaactgaactaagtctttctgttaagtcctgagtttgtcattggcaggtttacttgtggccagctctctctgcccttgggtgtctgagcaggcagaccagaagaccaggcactggacctgcatgccaaagggactggtcatctcctgaggacctgtacatgaccctgtggactgttccgcacgatccggaacccactttttattcactccccatgtctttggccttcctcttctttctctttccctctgccatcctgacactgatagtttgtcatataaattccccgggttgtgtttttttttctagaaaaaaattaaaagggaaaacaaaaccaaaaaaaccagaaaccacgaataagaatggaaatgacaatggctgcctgtcatttttctgtcacgattttcctgatttggtttgttccctttgtctcagagaagcaggagatgttgatgaggctgtatttttttttctttttcttgtttttgagacaagagtctcgctctgtcacccgggctggagtgtaacgtggcatgatctcagctcactgcaacctctgcctcctgggttcaagcgattatcctgcctcagcctcctgagtagctgggattacaggcatgcgccactatgcccagataatttttttgtatttttagtagagacagggtttcaccatgttggccaggctggtctggaactcctaacctcaggttatccacccaccttggcctcccaaagtgctgggattataggcatgaaccaccgtgcctggccaaagatgtaatttaaaatagttagaagggacttggcatgggccagctccgtgcatggcattttcacccccagagcttcctaatcctgttttcacacaggaagtttctaggtctttctagaacagctagaaatagtagctgactcccgcccaaggcccaaccttcaaaccctgagctcttcaggctgcatcctctggtgagctatagaggagaacgtggctcctaaactctagccatcctgtgggaggaaatagacttctttgggctgtggcttgcagaacaaactacactttttttccctctattgtttaaattttatttaataatttgtgtgtttttctgtctttattttctgtatttcacgtgttccttcactccctagaaactgcactttctttgaaaccataggtaatgaatcttactaggagaggcatggggatagagacagttctgggagtgtgacctgtaagcctcctgtagggcagtgccaggccttgattgcccacgttctctccgttccttcttccttcatacatttgatcacacagcctacacccagccccgagtgtgcatcacggtaaaagagctgagggctctcttcagggagcagcccatttaggtctcttttgttgttgttagggagaatacacatctttcttggaagctgggagtgtgttctcatttcatgtccattcagacaaagcaccattaggcaccatgaaatatacagtgacggacaggaccctgtctgcaaggattttatgtccttagttcaggagatggacttgtccacacaaaggcaaagtgaagtgggcggccggctcggaaaagtcctgtgcccagaagggagccagttctgacctgagtgataatgaaaggcttcctggaggacgcagcttgagccacacttgatgtgggagtgaactgggatagggacactcctgctgagagaatggcaagagcaaaagcacactggtggt

SEQ ID NO: 63756 - DNA, 1616 bp, Homo sapiens
ttttttttttttacaaaagattattttattaattcaatttttgcataaaagactgttaaaagaacttgctaacttgaaaacaattttgagtatttatgatctttccaacttgaaaacacctgaaccttatagaacagattgtgtaaagcagccagggccacaggagtgaaagaagatggagacccgccgtctggtcatgatatgagaggcctggacagtgacctcacgaacaaaaagaaatgatcctcttcagtccaaagtgtgtttgtgagactaatgactccatgccctcacatggccactcctcttacagcagacagcttcactccgctccagccccggtactgcggtctgtggtaatttacatgggaatgggatgagatctagtagttttagatccaacgcaattctgggaagggttggtaataaaccaaaactcaatctatgcagtatttaaaaaataattgagagttgtgacaacttcgattcttttcaggaggtgctgtcttaagatagaagaaagggatcaagctcttatcttagaaagcacagacacgtttagctcagggtagtgcaattcaatgctaagtggctgctccatgaaatctaagggccgggtaaggggaagaggcccagggacttcttccttgtctgacactctcgggactagcattctggcaggtcttacaagttataatacaaaaccatcagataaattctaatcacgactgtgtagttcctccccaaaataattttcctcttagaagtaaaatcaggaaaggggctgagttctgaaaagaaacatcggggctgtggcccaggccctctgagtgtggacgctgtcccccgtgtctccatgtttactgccttatcgtctcctttgtatgaaagtataatttacgtaattcgtccttggagaatcacagtggtgttcaagaaccttttgaggccatccaagtttttgtccttcagtaccttgaaatcagataatctcaacatccagaaatagcctttgatttgttctttctctgatgtcttgtgtccttgggatcaaagcctctttcactggcaccaaataatgcccagtgaggagttctggccatataatcctttgcgctgaacgtttttgatccaccactatcttcatattcctggatgagctcctggaagcggttataattgatccatgtccaccattcaccaccaattttaaactttctgtgtgctatcaggaggcaattagagtgttcgtgttcacatgcaatttcatattcggggatcagatccaccagctcgcggacaaactgtaccacttcctcatgccagggcacgtgggccatggtaagactgcttgctgaactttctccgcagtaggtaacgcccttcacttcgatgaagtcaggatttcccagggacacgagctgcgcgtaggcctggagctcgtccacattccatgctttcacgagcgtcagtctgtagacagttcgttgttgcttgactgccaaggcttttaaactgtcaaggaattgctgccagaaatccttgaagagtgggcggtcgattttcttcaggctgtctttggtactggcatccacactgacatacagctgagtaac

SEQ ID NO: 63757 - DNA, 749 bp, Homo sapiens
cttttacatcatcatgaagctccgcagctctgaaaaggtcctcccagtcccgctcttctgcatcgtggccaccgctgtgatgtgggctgccgccctatattttttcttccagaatctcagcagctgggagggaactccggccgaatcccgggagaagaaccgcgagtgcattctgctggatttcttcgatgaccatgacatctggcacttcctctctgctactgctctgtttttctcattcttggatttgttaactttggatgatgaccttgatgtggttcggagagaccagatccctgtcttctgaacctccaacattaagagaggggagggagcgatcaatcttggtgctgtttcacaaaaattacagtgaccacagcaaagtaaccactgccagatgctccactcaccctctgtagagccaactctgcattcacacaggaaggagaggggctgcgggagatttaaacctgcaagaaaggaggcagaaggggagccatgttttgaggacagacgcaaacctgaggagctgagaaacacttgctccttccatctgcagctttgggagtgcaacagggataggcactgcatccaagtcaactcaccatcttggggtccctcccaccctcacggagacttgccagcaatggcagaatgctgctgcacactttccttcaagtgttacccttcccagaaaggccaagctcgtggacttcttggccaaatacttgggtaggccccgcgttccg

SEQ ID NO: 63758 - DNA, 926 bp, Homo sapiens
aagggccctgaagccaccgccatggtctgtgtgtgttcccatccaaactgcagacagaaccacatcaaacccagccacagcgcggcacagacctggtgtggaagccccactcccgcctctgcccccaaccacaagctcatggctatggaacaaggcaagacccttccatctgccacggaggatgcaaaggaagagggtctggaagcccagatcagccgcttggcagagctgattgggaggctggagagcaaagcactgtggttcgacctgcagcagcgcctgtcagatgaagatggcaccaacatgcacctgcagctggtccggcaggagatggccgtgtgccccgagcaactgagcgagtttctggactctctgcgccagtatctgcgggggaccactggcgtgaggaactgcttccacatcactgccgtgaggctctcagatggcttcacctttgtcatctatgagttctgggagacagaggaggcgtggaagaggcacctgcagagccccctgtgtaaggcgttccggcacgtcaaggtggacacactgagccagcctgaggccctctccaggatcttagtgccagctgcttggtgcacggtgggacgggactgacagcctcccagaggcccgtggaggagcccaccagccccttcttcttgtgaaggaaatcccctgtttttttctagacagacactttggtgcagaagcttcttttcaatccatcctccacaagaaggtgtttccctgttgttaagtgaaggaggccgcccctgcccccacctgagaaggcagagcagtgtctgtgctgccaggtcctggtgaagcccaaggttgaagggggcggcttcctggagccagcacccctgcctcctggtcctggcctctcccctacccctcacatggccacgcatgacccacac

SEQ ID NO: 63759 - DNA, 602 bp, Homo sapiens
ccacgcgtaaacttgggcccctccagggatcctttaaaacggccgccccttttttttttttttagaagtttggaccagaatatattttatttttctcataaaagttataccaaaaatatattttcttaacttaaaaatacagcttcaaaaagcaaaatttgagttgttagaattcattacacattttataaacagcagtgaaaggaagaagtcagcagaatggattcaatttttaaatacacaaatgttcatttcacaagcttgactttgtcctttaataacttaaaggtagggttcttgctgattttcttgttaaagatgaccaggagttcctcttcggatctgtgatgctcatctgtcactgtgtagtactgagctaaaacctttttccttagctttttgatggttatttcattgtctggggcctgtttcagaattgctttaatagttcccttccagttgaatttaccttttgcaggagcctcatcgtcttctggttctccgccctcaggatgctctgggagcttcatctttttcttcttagaatctgtttcaactttcgagtgcctccgcttcctcttccctgcgcccacgcgtgcctc

SEQ ID NO: 63760 - DNA, 1773 bp, Homo sapiens
tctttgtggaggagaagatcaagctgtgtgaaggtgaaaatcgcattgaggttctggctgaaggctgggaccacttcttcactgagactctccctaccctgcaggcaatattttatccagttcagggccaggagctgactatccgccagatctccctgctgggcttccgagacctagtcttgctgaaggtgaagctgggtgacctgctgctgctggcccagtccaagctgccctcgtccattgtccagatgttgctcatcctgcagagtgttcacgagcccacaggcccaagtgagagttatttgcagctggaggagctggtgaagcaagtggtttctcctttcctcggcatcagcggggaccgtagcttctcaggccccacgtacacgctggccaggcggcactccagggtccggcccaaggtgactgtcctgaactatgcctccccgataaccgcagtcagccggccactgaatgagatggtcttgaccccactgacagagcaggagggggaagcctacctggagaagtgtggcagcgtgcggcggcacacggtggccaatgcccactcggacatccagctgctggccatggccaccatgatgcactcgggcctgggggaggaggccagcagtgagaacaagtgcctgctcctgccacccagcttccccccgccccaccggcagtgctccagtgagcccaacatcaccgacaaccctgacggactggaggagggggccaggggcagccaggagggctcggagctgaactgtgcttccctcagctgagtcgccacccctgggcctttccatctcctgttttgcaaccaggatgaggacccctccatctccgtggattactgaggggggctcttgctttatgcgatgctgccttatttcctttagggtactgtcctggtcaaaatgacctaaggggaaaccgttgttgtaaacctctttattttggtgactgtgaccacttctttgtagccaccaattgtagtgaccagttgcctaatggtcactttctgactccagccttgccagcctgactcagatcctcatctctgggcctttctccctccgatgttggactgcctgatgctcccaatgacatatccaatgctcctggcatttctggagcaggaggttgtcaggacaacacatataaccaccaaggatgtgttggcctttggagttcccctttaggttcctagtgatgtggaggtttatgggtgaaaaattagtggagagggaactcctctcccccattttgtgtagagtgaaaatagcctgaagcccctactcagcagggctctgggaatgtgccttccttattttaggttcagaattgctgggaaagttaccccactggtgggtgaggatctatcctcaacctacatccagatcctatgtgctgcttgcacagaggcctttggcttttgacccaggagggccgcgaggctggagctgccctgtctttcattgagccttagcatttccctctcaggcttcctctcaagctcaaggaactcacccccagataagaagctggtgcctcttgtctctctcatttcagaaacggactttctcatcatgctttcctatggtgggtatgaggggccagctgataccaaccaactggcctgtatctatctatctggatttgacttgaatttttaaaatgtgtatcgtttaaaaaaaaaaaaaagggggggccttttaaaagaatccttgagggggcccaatttaaccgggggttggaaggttatat

SEQ ID NO: 63761 - DNA, 684 bp, Homo sapiens
ttttttttttttggtatccaaaacttgtttttattaatagtcttaaagggcattcaataaaacgttcccataaatatgccagtgaatttgttttaataacagaagatcatgaccttataaattactaagaaaaatatgctgcacagtaaaacaatgtctgatgttcttgaaaatactttttcactttacaagagatacaatatgtgcttcagtttacattttactctccatctaacttcagaaaaaaaacacaaaaaggatgctatactaagaaatctttagtatgaggagtatgtaatcatagcctcagaaatttcaaaagctgccacaatgtttttccactcctgtaaagtcaaagatataactccctgtttcctgccatggcaactggaatcatttccctcacccatttggttaacattcatcggctctaatattggcagcctgtcttcatcaagccttattcttgcaaaaccatctcttacaataaaagaaacataaaatatattctccacagtacgagaaaaagagtttggatcaatcacaaactcaaaataggacacaggagtatcaggatactttcgaaagtaggtttgcaacaatcccaaaatcctttctacgtttttttctgtcgcttctggataactactcaggtccaacttctgcaactttgtaggcatgttg

SEQ ID NO: 63762 - DNA, 1157 bp, Homo sapiens
acggagtcgtgggatcaaagactttgaaaacgatcccccattatcatcgtgtggcattttccagtccagaattgcaggggacgcgctactggacagtggtatcagaatcagctctgtgtttgcctccccagccctccgctgtgtgcagacggccaaactcatcctggaagaactcaaactggagaaaaaaatcaagatacgagtggaacctggaatctttgaatggacaaaatgggaagctggcaaaaccaccccaaccctcatgagcctggaagagctgaaagaggcaaatttcaacattgacactgattacaggcccgcgtttcccctgtccgccctcatgccggccgagagctaccaggagtacatggacaggtgcacggcgagcatggtgcaaatcgtcaacacctgtccacaggacacgggtgtcatcctaattgtgagtcacggctccactctggactcctgcacgcggccactgctcgggctgccgccccgggaatgtggggattttgcccaactcgtgagaaagatcccttccctgggcatgtgcttctgtgaagaaaataaagaggaaggaaaatgggagttggtgaacccaccggtgaagaccctgacccacggggcgaacgcagcatttaactggaggaactggatctcaggcaactgagagccacggtgatgttgtcataacctcagagtggagaggcagaaaccatgtgcagaggctgggagatgctgctgtttccagaggcgtcttagtctcacccaatgtgatttgtagaagcacgagacgcacttttatatcccggaatatttccctccggctttcgcctttgtaactcccatctgtggacccatcgtccaccagcccagctgcggggagcacagggcaggtggctgggtgaggatgccgccctgcagcatgtacaccgagtgtctgcagctggggacacaactgcccgggactctaacttccaggaattaaagactcaccacacacgaaggatctaaccacttcattttccatggtctaatcattaaattcccaatcgttttttctttttctgggtccatcactctttagccatatccacatgggctaaaacaggtgtaatagtcaataaaatggtcccagaaaaccatcgaccacgtca

SEQ ID NO: 63763 - DNA, 1107 bp, Homo sapiens
caggatgaatatggtgtttcttctatcattccaaactttcagatctctcaagattcagtagggaacagcaataggagtgaaacatccacatctgataacacagaaacttaccaagagaatacaagttcttctggtcatcctacttttaagtgtcccctgtgtcaagaatcaaattttaccagacagcgtttactggatcactgtaacagtaatcacctatttcagatagttcctgtgacatgtcctatttgggtgtctcttccttggggagatcctagccagattaccagaaatttcgttagtcatctaaatcagagacatcaatttgattatggagaatttgtgaatcttcagctagatgaagaaacccaataccaaactgctgttgaagaatcttttcaagtaaacatctgaaggctgtagacatctctgcatctttgtacctgcaagtgccatctttaagggggaaactacatgaagtcaccgttacagtaacttgatgtgtatattaataaaagtaattcagtcattttagtttttgattgaaaataaaggtagggcttctaaaaacttcatcatcttgataagttaaaaaatgaaagttatgacattagctttaaaggtgtaaaaaagatgtttcactaatgtaacggtgaaagagaatccctgttgtactttatctttttgtaatattatttttgaatttttcattattatgttgcttttgaaatttgatgcattcctcccatttactttattattgtacacatttaacacacagtagcaaattttgaacgatgtgattgatataacctaacaaatctgagccagttattattagagttgcagaatagaaacttgaagtgctaaatggaataatccaaaggaaattttttaaatgcaggttctagctgaaaaattcaactataagaaaattgtatttatataacatttactatttttgaagactagtgagatttctgtaataattttaattctttaaaaagtgaaagcttgttgtaaagatattttctttttgttattataaggaaatacaaagagaaaaatttctttctttcatgggcatttgataatttcagtctttgg

SEQ ID NO: 63764 - DNA, 7853 bp, Homo sapiens
ctgcgaccggtctgccacttgccaggtgaccgctgatgggaagaccagctgtgtgtgcagggaaagcgaggtgggggatgggcgtgcctgctacggacacctgctccacgaggtgcagaaggccacgcagacaggccgggtgttcctgcagctgagggtcgccgtggccatgatggaccagggctgccgggaaatccttaccacagcgggccctttcaccgtgctggtgccatccgtctcctccttctcctccaggaccatgaatgcatcccttgcccagcagctctgtagacagcacatcatcgcagggcagcacatcctggaggacacaaggacccaacaaacacgaaggtggtggacgctggccgggcaggagatcaccgtcacctttaaccaattcacgaaatactcctacaagtacaaagaccagccccagcagacgttcaacatctacaaggccaacaacatagcagctaatggcgtcttccacgtggtcactggcctgcggtggcaggccccctctgggacccctggggatcccaagagaactatcggacagatcctcgcctctaccgaggccttcagccgctttgaaaccatcctggagaactgtgggctgccctccatcctggacggacctgggcccttcacagtctttgccccaagcaatgaggctgtggacagcttgcgtgacggccgcctgatctacctcttcacagcgggtctctctaaactgcaggagttggtgcggtaccacatctacaaccacggccagctgaccgttgagaagctcatctccaagggtcggatcctcaccatggcgaaccaggtcctggctgtgaacatttctgaggaggggcgcatcctgctgggacccgagggggtcccgctgcagagggtagacgtgatggccgccaatggcgtgatccacatgctggacggcatcctgctgcccccgaccatcctgcccatcctgcccaagcactgcagcgaggagcagcacaagattgtggcgggctcctgtgtggactgccaagccctgaacaccagcacgtgtccccccaacagtgtgaagctggacatcttccccaaggagtgtgtctacatccatgacccaacggggctcaatgtgctaaagaagggctgtgccagctactgcaaccaaaccatcatggaacaaggctgctgcaaaggttttttcgggcctgactgcacgcagtgtcctgggggcttctccaacccctgctatggcaaaggcaattgcagtgatgggatccagggcaatggggcctgcctctgcttcccagactacaagggcatcgcctgccacatctgctcgaacccaaacaagcatggagagcaatgccaggaagactgcggctgtgtccatggtctctgcgacaaccgcccaggcagtgggggggtgtgccagcagggcacgtgtgcccctggcttcagtggccggttctgcaacgagtccatgggggactgtgggcccacagggctggcccagcactgccacctgcatgcccgctgtgttagccaggagggtgttgccagatgtcgctgtcttgatggctttgagggtgatggcttctcctgcacacctagcaacccctgctcccacccggaccgtggaggctgctcagagaatgctgagtgtgtccctgggtccctgggcacccaccactgcacatgccacaaaggctggagtggggatggccgcgtctgtgtggctattgacgagtgtgagctggacgtgagaggtggctgccacaccgatgccctctgcagctatgtgggccccgggcagagccgatgcacctgcaagctgggctttgccggggatggctaccagtgcagccccatcgacccctgccgggcaggcaatggcggctgccacggcctggagctggaggcaaatgcccacttctccatcttctaccaatggcttaagagtgccggcatcacgcttcctgccgaccgccgagtcacagccctggtgccctccgaggctgcagtccgtcagctgagccccgaggaccgagctttctggctgcagccaaggacgctgccgaacctggtcagggcccattttctccagggtgccctcttcgaggaggagctggcccggctgggtgggcaggaagtggccaccctgaaccccaccacacgctgggagattcgcaacattagtgggagggtctgggtgcagaatgccagcgtggatgtggctgacctccttgccaccaacggtgtcctacacatcctcagccaggtcttactgcccccccgaggggatgtgcccggtgggcaggggttgctgcagcagctggacttggtgcctgccttcagcctcttccgggaattgctgcagcaccatgggttggtgccccagattgaggctgccactgcctacaccatctttgtgcccaccaaccgctccctggaggcccagggcaacagcagtcacctggacgcagacacagtgcggcaccatgtggtcctgggggaggccctctccatggaaaccctgcggaagggtggacaccgcaactccctcctgggccctgcccactggatcgtcttctacaaccacagtggccagcctgaggtgaaccatgtgccactggaaggccccatgctggaggcccctggccgctcgctgattggtctgtcgggggtcctgacggtgggctcaagtcgctgcctgcatagccacgctgaggccctgcgggagaaatgtgtaaactgcaccaggagattccgctgcactcagggcttccagctgcaggacacacccaggaagagctgtgtctaccgatctggcttctccttctcccggggctgctcttacacatgtgccaagaagatccaggtgccggactgctgccctggtttctttggcacgctgtgtgagccatgcccagggggtctagggggggtgtgctcaggccatgggcagtgccaggacaggttcctgggcagcggggagtgccactgccacgagggcttccatggaacggcctgtgaggtgtgtgagctgggccgctacgggcccaactgcaccggagtgtgtgactgtgcccatgggctgtgccaggaggggctgcaaggggacggaagctgtgtctgtaacgtgggctggcagggcctccgctgtgaccagaaaatcaccagccctcagtgccctaggaagtgcgaccccaatgccaactgcgtgcaggactcggccggagcctccacctgcgcctgtgctgcgggatactccggcaatggcatcttctgttcagaggtggacccctgcgcccacggccatgggggctgctcccctcatgccaactgtaccaaggtggcacctgggcagcggacatgcacctgccaggatggctacatgggcgacggggagctgtgccaggaaattaacagctgtctcatccaccacgggggctgccacattcacgccgagtgcattcccactggcccccagcaggtctcctgcagctgccgtgagggttacagcggggatggcatccggacctgcgagctcctggacccctgctctaagaacaatggaggatgcagcccatatgccacctgcaaaagcacaggggatggccagaggacatgtacctgcgacacagcccacaccgtgggggacggcctcacctgccgtgcccgagtcggcctggagctcctgagggataagcatgcctcattcttcagcctccgcctcctggaatataaggagctcaagggcgatgggcctttcaccatcttcgtgccgcacgcagatctaatgagcaacctgtcgcaggatgagctggcccggattcgtgcgcatcgccagctggtgtttcgctaccacgtggttggctgtcggcggctgcggagcgaggacctgctggagcaggggtacgccacggccctctcagggcacccactgcgcttcagcgagagggagggcagcatatacctcaatgacttcgcgcgcgtggtgagcagcgaccatgaggccgtgaacggcatcctgcacttcattgaccgtgtcctgctgccccccgaggcgctgcactgggagcctgatgatgctcccatcccgaggagaaatgtcaccgccgccgcccagggcttcggttacaagatcttcagcggcctcctgaaggtggccggcctcctgcccctgcttcgagaggcatcccataggcccttcacaatgctgtggcccacagacgccgcctttcgagctctgcctccggatcgccaggcctggctgtaccatgaggaccaccgtgacaagctagcagccattctgcggggccacatgattcgcaatgtcgaggccttggcatctgacctgcccaacctgggcccacttcgaaccatgcatgggacccccatctctttctcctgcagccgaacgcggcccggtgagctcatggtgggtgaggatgatgctcgcattgtgcagcggcacttgccctttgagggtggcctggcctatggcatcgaccagctgctggagccacctggccttggtgctcgctgtgaccactttgagacccggcccctgcgactgaacacctgcagcatctgtgggctggagccaccctgtcctgaggggtcacaggagcagggcagccctgaggcctgctggcgcttctacccgaagttctggacgtcccctccgctgcactctttgggattacgcagcgtctgggtccaccccagcctttggggtaggccccaaggcctgggcaggggctgccaccgcaattgtgtcaccaccacctggaagcccagctgctgccctggtcactatggcagtgagtgccaagcttgccctggcggccccagcagcccttgtagtgaccgtggcgtgtgcatggacggcatgagtggcagtgggcagtgtctgtgccgttcaggttttgctgggacagcctgtgaactctgtgctcctggtgcctttgggccccattgtcaagcctgccgctgcactgtgcatggccgctgtgatgagggccttgggggctctggctcctgcttctgtgatgaaggctggactgggccacgctgtgaggtgcaactggagctgcagcctgtgtgtaccccaccctgtgcacccgaggctgtgtgccgtgcaggcaacagctgtgagtgcagcctgggctatgaaggggatggccgcgtgtgtacagtggcagacctgtgccaggacgggcatggtggctgcagtgagcacgccaactgtagccaggtaggaacaatggtcacttgtacctgcctgcccgactacgagggtgatggctggagctgccgggcccgcaacccctgcacagatggccaccgcgggggctgcagcgagcacgccaactgcttgagcaccggcctgaacacacggcgctgtgagtgccacgcaggctacgtaggcgatggactgcagtgtctggaggagtcggaaccacctgtggaccgctgcttgggccagccaccgccctgccactcagatgccatgtgcactgacctgcacttccaggagaaacgggctggcgttttccacctccaggccaccagcggcccttatggtctgaacttttcggaggctgaggcggcatgcgaagcacagggagccgtccttgcttcattccctcagctctctgctgcccagcagctgggcttccacctgtgcctcatgggctggctggccaatggctccactgcccaccctgtggttttccctgtggcggactgtggcaatggtcgggtgggcgtagtcagcctgggtgcccgcaagaacctctcagaacgctgggatgcctactgcttccgtgtgcaagatgtggcctgccgatgccgaaatggctttgtgggtgacgggatcagcacgtgcaatgggaagctgctggatgtgctggctgccactgccaacttctccaccttctatgggatgctattgggctatgccaatgccacccagcggggtctcgacttcctggacttcctggatgatgagctcacgtataagacactcttcgtccctgtcaatgaaggctttgtggacaacatgacgctgagtggcccagacttggagctgcatgcctccaacgccaccctcctaagtgccaacgccagccaggggaagttgcttccggcccactcaggcctcagcctcatcatcagtgacgcaggccctgacaacagttcctgggcccctgtggccccagggacagttgtggttagccgtatcattgtgtgggacatcatggccttcaatggcatcatccatgctctggccagccccctcctggcacccccacagcccgcagtgctggcgcctgaagccccacctgtggcggcaggcgtgggggctgtgcttgccgctggagcactgcttggcttggtggccggagctctctacctccgtgcccgaggcaagcccatgggctttggcttctctgccttccaggcggaagatgatgctgatgacgacttctcaccgtggcaagaagggaccaaccccaccctggtctctgtccccaaccctgtctttggcagcgacaccttttgtgaacccttcgatgactcactgctggaggaggacttccctgacacccagaggatcctcacagtcaagtgacgaggctggggctgaaagcagaagcatgcacagggaggagaccacttttattgcttgtctgggtggatggggcaggaggggctgagggcctgtcccagacaataaaggtgccctcagcggatgtgggccatgtcaccaaggaagggggtcttcatgcagccggtgcagagctggtccatccagaggggtgcctcgtgctgcagcggcgtacggcgtgggtagaaggtgaagtccacgcggtagttgagcaggcagctgagggaggccatgtagaggtcagagaagcgcacgaggcgccttgagaagtaggtggggttgtggaaggtgcggaagatgctgccgaactgcgcattgaacagggccttggtgatgcacctcagctcctgccgctctttcatccaggcagccagcaccggctgcatgaagacccccttccttggtgacatggcccacatccgctgagggcacctttattgtctgggacaggccctcagcccctcctgccccatccacccagacaagcaataaaagtggtctcctccctgtgcatgcttctgctttcagccccagcctcgtcacttgactgtgaggatcctctgggtgtcagggaagtcctcctccagcagtgagtcatcgaagggttcacaaaaggtgtcgctgccaaagacagggttggggacagagaccagggtggggttggtcccttcttgccacggtgagaagtcgtcgtcagcatcatcttccgcctggaaggcagagaagccaaagcccgtgggcttgcctcgggcacggaggtagagagctccggccaccaagccaagcagtgctccagcggcaagcacagcccccacgcctgccgccacaggtggggcttcaggcgccagcactgcctggggctgtgggggtgccaggagggggctggccagagcatggatgatgccattgaaggccatgatgtcccacacaatgatacggctaaccacaactgtccctggggccacaggggcccaggaactgttgtcagggcctgcgtcactgatgatgaggctgaggcctgagtgggccggaagcaacttcccctggctggcgttggcacttaggagggtggcgttggaggcatgcagctccaagtctgggccactcagcgtcatgttgtccacaaagccttcattgacagggacgaagagtgtcttatacgtgacccacgcgtccg

SEQ ID NO: 63765 - DNA, 1155 bp, Homo sapiens
cccacgcgtccgggacagactcccatccactggggtcagggaccggaaaggcgacaaaccctggaaggagtcaggtggcagcgtggaggcccccaggatggggttcacccacccgccgggccacctctctgggtgccagagcagcctggccagtggtgagacggggacaggctctgctgacccgccagggggaccccgccccgggctgacccgaagggccccggtaaaagacacacctggacgagcccccgctgctgacgcagctccagcaggcccctccagctgcctgggctgaggtgtctggtgcctggaacagacttccctgtggaggattcctgccagaccctgcccggctcctccctgaccggtccttgtgccctcaccagacaccctgttggccatgactcaacaaaccagtgttgggagccgtctgcctccccagctcagtgcctttctgcaccccttctctcctggggagctgtctgcatccgccaccccctccaaccactgccctcagcccccgaccttatttattaccctcccctcccacacccccaatctacctggtgatgattttaagtttgcgcgtgtcttgggttgggctggggggtttcccacatgcagtgtcagaggggccgcccggtggggctatctccgttgctatattaatggcaagactaaatgaaacctagggcacggcctccgaagctgcgtgtggccccttagaggtgagcatcagagccagagcagtgagggggagactcacccaccctctccctctcccttcagctctgggaggcaggcgcagtgcccccctcccgtgggctggcccaggaccgcgggtgaaacctgggtctgtttagtttctttggtttttgtatgtttgtttgtttttgacacagtctcgctttgttgcccaggctggggtgcagtggcacgatcgcggctcactgcaacctccacctcccgggctcaagcgattctctcacctcagcctcctgagtaggtgggattacagatgcccgccaccacacccagttaatttttgtatttttagaagagatggggtttctccatgttggccaggctggtcttgaactcctggtctcaagtgatccgcccgcctcggcctcccaaagtgctgggattacaggg

SEQ ID NO: 63766 - DNA, 6179 bp, Homo sapiens
ctcaagtatgtgttaattagcaaaccaactgaatggtcagatgagctgaggcagaagttcctagaagggtttgatgcctttttggaattactaaaatgtatgcagggaatggatccaattacacgtcaagtaggacaacatattgaaatggaaccagagtgggaagcagccttcacactacaaatgaaattaacacatgtcatttcaatgatgcaggactggtgtgcttcagatgaaaaagtgttaatcgaagcttacaagaaatgtctcgctgtactgatgcagtgtcatggtggttatactgatggtgaacagccaatcacactaagcatttgtggacattcagtggaaactatcagatactgtgtttcccaagaaaaagttagcattcacctcccagtttctcgcttacttgcaggtttacatgtattattaagcaaaagtgaagtggcatataaatttccagagctcctacctctaagtgaacttagcccacccatgttgatagaacaccctcttagatgtcttgttctgtgtgcccaagtacatgccggaatgtggagaagaaatgggttctctctagtaaaccagatttattactaccataatgtgaaatgcagacgtgagatgtttgacaaggatgtagtaatgcttcagacaggtgtctccatgatggatccaaatcatttcctgatgatcatgctcagccgctttgaactttatcagattttcagtactccagactatggaaaaagatttagttctgagattacccataaggatgttgttcagcagaacaatactctaatagaagaaatgctatacctcattataatgcttgttggagagagatttagtcctggagttggacaggtaaatgctacagatgaaatcaagcgagagattatccatcagttgagtatcaagcctatggctcatagtgaattggtaaagtctttacctgaagatgagaacaaggagactggcatggagagtgtaatcgaagcagttgcccatttcaagaaacctggattaacaggacgaggcatgtatgaactgaaaccagaatgtgccaaagagttcaacttgtatttctatcacttttcaagggcagaacagtccaaggcagaagaagcgcaacggaaattgaaaagacaaaatagagaagatacagcactcccacctccggtgttgcctccattctgccctctgtttgcaagcctggttaacattttgcagtcagatgtcatgttgtgcatcatgggaacaattctgcaatgggctgtggaacataatggatatgcctggtcagagtccatgctgcaaagggtgttacatttaattggcatggcactacaagaagaaaaacaacatttagagaatgtcacggaagagcatgtagtaacatttaccttcactcagaagatatcaaaacctggtgaagcgccaaaaaattctcctagcatactagctatgctggaaacactacaaaatgctccctacctagaagtccacaaagacatgattcggtggatattgaagacttttaatgctgttaaaaagatgagggagagttcacctaccagtcccgtggcagagacagaaggaaccataatggaagagagttcaagggacaaagacaaagctgagaggaagagaaaagcagagattgccagactgcgcagagaaaagatcatggctcagatgtctgaaatgcagcggcattttattgatgaaaacaaagaactctttcagcagacattagaactggatgcctcaacctctgctgttcttgatcatagccctgtggcttcagatatgacacttacagcactgggccccgcacaaactcaggttcctgaacaaagacaattcgttacatgtatattgtgtcaagaggagcaagaagttaaagtggaaagcagggcaatggtcttggcagcatttgttcagagatcaactgtattatcaaaaaacagaagtaaatttattcaagatccagaaaaatatgatccattattcatgcaccctgatctgtcttgtggaacacacactagtagctgtgggcacattatgcatgcccattgttggcaaaggtattttgattccgttcaagctaaagaacagcgaaggcaacagagattacgcttacatacgagctatgatgtagaaaacggagaattcctttgccccctttgtgaatgcttgagtaatactgttattcctctgctgcttcctccaagaaatatttttaacaacaggttaaatttttcagaccaaccaaatctgactcagtggattagaacaatatctcagcaaataaaagcattacagtttcttaggaaagaagaaagtactcctaataatgcctctacaaagaattcagaaaatgtggatgaattacagctccctgaagggttcaggcctgattttcgtcctaagatcccttattctgagagcataaaagaaatgctaacgacatttggaactgctacctacaaggtgggactaaaggttcatcccaatgaagaggatcctcgtgttcccataatgtgttggggtagctgcgcgtacaccatccaaagcatagaaagaattttgagtgatgaagataaaccattgtttggtcctttaccttgcagactggatgactgtcttaggtcattgacgagatttgccgcagcacactggacagtggcatcagtttcagtggtgcaaggacatttttgtaaaccttttgcatcactggtgcctaatgacagccatgaggaacttccatgcatattagatattgacatgtttcatttattggtgggcttggtgcttgcatttcctgcgttgcagtgtcaggatttttcagggatcagccttggcactggagaccttcacattttccatctggttactatggcacacatcatacagatcttacttacctcatgtacagaagagaatggcatggatcaagaaaatcccccttgtgaagaagaatcagcagttcttgctttgtataaaacacttcaccagtatacgggaagtgccttgaaagaaataccatccggctggcatctgtggaggagtgtcagagctggaatcatgcctttcctgaagtgttctgctttattttttcattacttaaatggagttccttccccacccgacattcaagttcctggaacaagccattttgaacatttatgtagctatctttccctaccaaacaacctcatttgcctttttcaagaaaatagtgagataatgaattcactgattgaaagttggtgccgtaacagtgaagttaaaagatatctagaaggtgaaagagatgctataagatatccaagagaatctaacaaattaataaaccttccagaggattacagcagcctcattaatcaagcatccaatttctcgtgcccgaaatcaggtggtgataagagcagagccccaactctgtgccttgtgtgcggatctctgctgtgctcccagagttactgctgccagactgaactggaaggggaggatgtaggagcctgcacagctcacacctactcctgtggctctggagtgggcatcttcctgagagtacgggaatgtcaggtgctatttttagctggcaaaaccaaaggctgtttttattctcctccttaccttgatgactatggggagaccgaccagggactcagacggggaaatcctttacatttatgcaaagagcgattcaagaagattcagaagctctggcaccaacacagtgtcacagaggaaattggacatgcacaggaagccaatcagacactggttggcattgactggcaacatttataattattgcaccaccaaaaaacacaaacttggatttttttaacccagttggctttttaagaaagaaagaagttctgctgaatttggaaataaattctttatttacaactttccttcccagttttatagtttctggttctgaggactgatgaaaatcattttccatcagcaaatttttttgccctgtttgctgtgccccttcaaatataatgtcttgggttttaagatcgagcaaggagcttctcttcctagattggatcccagcccctttgtgggggtctgactgcatagtcccagccattatgtgatatttcacgttattgatgatagtgaaccgtgggtccgaagctgactcaacggaggcagggaacaaagtctctgtggtctgttgggtcatacttcctggttccactgagtggcccaacactgggactgggttggtgtcccctctgctgacaggaccctactcctaggagcaaagtggttgattttgaaggcagtgttcccttctctccattgactatgagagagttgggggacacacatgcagaagaagcccgtggggagaaggtggattcctggtgtgctgggttggtttttcagggctgttagaggttttttttttcttttttttttttatggcaagacttttggctttgagaaaactcacttagagggctttccaaaaacttaggatggtctaaaaaattaggatattcttttagaattaggaagaaaaattaggatattctaaaagaatatggattaaaaatttaggatattcttttagatatcctaatatctagatgagaggccttccttcataagatctggttgtttgggctgtggttggcataagtgatatttattttggcctctgtcacatccagtttcttgagcttttaaggtaagcttcttttggctttttttcagatgttcaccaagcttaagtttaaaataataggtattctaaaagagtatcctaattttcttatctgtattcttttacaataccctaatgtttcagacagtgatattctcttgttatttctaaggctaaattggcagagtatatcatctaaagccaaacactgaagaaggtgagaacccgctcccacccagccagcatttcctggaacagacaagctgctgcttccttgctggctcacttagtgcattcctgggatggtctggcacccaggctttttattctttttgatcattgttcttactgaggtgccttcctagaacaagagccacttacaaaatagcttataattattatgtaccacacaactactattgtttgatgtatgactgctgagagcttgaatacatgcagagagtgactgaagacttagtagaggaataaattctgagcctgtctaaggtggggctaaggaacagatgagtaataagaggctcttggatttttttaaccaatgcaactgaccctttcaatcagttttctttgaattacatctacaagttttgttccactcagctaccagtcaactaggcatgctccacagtatcacaggaagaaggtcagaaatctggaactgaagctaaaagaagtgaggatgtagaagccacattcctctccaaggtagtgtgtgaaagaaccgccccctcttgacaggaggatgaccgtcgccattcttgcgtgggactgactcacccagctgagaggaggaccaatagaaagaaaattcacatttgagtccacctctctccccctttttctgaccttcattcataagatctggttgtttgggctgtaggtggcataattcatgtttattttggcctctgtcacatccagtttctttagcttttaaggtaagcttcttttggctttttttcatatgttcaccaagctaaaatttaaaataataagaccaggtttctctctctacaagtggattataaacattttcaccaaatcataacaatactccagctttccggtccgacttcctaggagcctggagttagcaaaggttgtctctggatttcattctctgagaatatcacagagcctgggagaagatgaatttaccatgaaattggcaacatacacaccctttttattttctggtgttaagcctagttgtcctttccctaccttacaaatccatgttagttttatgatttgttcccgcatgttttatgtttattgtaggaaatgtttatataacatacgctttccatatcaggggaaaatccatatctgtttaattaaattggccataactttaatatctgtggacaacttgtaaaatttggaatgtatcatatgtaaaaagtttaaagatatcccaaataaatgcttttaggtgttggcattaaaa

SEQ ID NO: 63767 - DNA, 1369 bp, Homo sapiens
agttggcatcagtcgcagccctgttctccctccttacccaggggctccgcctatgccaacatcatctcccagtttgcacagaccggcttcctccttctctacattgggctgaagaagctgcacctggagacgtgggcagggctgctcagtgtggtggatctctctgcccaggctgtcatctacgaggtggccactgtgacctacatgattcccttggggctcagcatcggggtctgtgtccgagtggggatggctctgggggctgcggatactgtgcaggccaagcgctcggccgtctcgggcgtgctcagcatagttggcatttccctggtcctgggcaccctgataagcatcctgaaaaatcagctggggcatatttttaccaatgatgaagatgtcattgccctggtgagccaggtcttgccggtttatagtgtctttcacgtgtttgaggccatctgttgtgtctatggcggagttctgagaggaactgggaagcaggcctttggtgccgctgtgaatgccatcacatattacatcatcggcctaccactgggcatccttctgacctttgtggtcagaatgagaatcatgggcctctggctgggcatgctggcctgtgtcttcctggcaactgctgcctttgttgcttatactgcccggctggactggaagcttgctgcagaggaggctaagaaacattcaggccggcagcagcagcagagagcagagagcactgcaaccagacctgggcctgagaaagcagtcctatcttcagtggctacaggcagttcccctggcattaccttgacaacgtattcaaggtctgagtgccacgtggacttcttcaggactccagaggaggcccacgccctttcagctcctaccagcagactatcagtgaaacagctggtcatccgccgtggggctgctctgggggcggcgtcagccacactgatggtggggctcacggtcaggatcctagccaccaggcactagcaaagaagcttggaaatagaaagccaggagtggctgtccccagtatgcaaacacaccacggtctgccctgcaaaaacaccaatggggtctagtgcaggtggacactttgaaccactcctcaaaaaaagaactttggctgattccttgtggtgacactcagaggggtctgaacagacttgacaattctgttctggtcaagctggagttttcttctgtgacttggactgctctacagaagacatcagccaactgcacgagtcagagtccagggattgtcactattattaataatgtaaatggcttcaaatgggacacctgcagataaaatcacaaaaaccactgttatattaaagattacacatttcctggg

SEQ ID NO: 63768 - DNA, 1108 bp, Homo sapiens
  misc_feature (1)...(1108): n = a,t,c or g
acgacatcgaggccttcgtgctgcatctggaaggtaggaaactctggcgtgtataccgaccccgagccccaaccgaggaactggctctgacatccagccccaacttcagtcaggacgacctcggtgagccggtgctgcagaccgtgctggaacctggagatttgctgtattttcctcggggcttcattcaccaagctgaatgccaggatggagtccactctctgcacctcaccttgtccacgtaccagcgcaatacctggggtgacttcttagaggccatactgcctctggcagtgcaggctgcaatggaagaaaatgtggagtttcggaggggtctgccccgagacttcatggattacatgggggcccaccattcaaattctaaggatccgcgaagaaccgctttcatggagaaggtgcgggtcttggttgcccgcctgggacactttgctcctgttgatgctgtggccgaccagcgagccaaagacttcattcacgattctctgccccctgttttgactgatagggagagggcactaagtgtttacgggcttccaattcgctgggaggctggagaacctgtaaacgtgggggcccagttgacaacagaaacagaagtccatatgcttcaggatgggatagctcggctggtgggtgaggggggccatttgtttctctattacacagtggaaaactcccgtgtgtatcatctggaagaacccaagtgcttggaaatatacccccagcaagctgatgccatggaactgttgcttggttcttatccagagtttgtgagagtgggggacctgccctgtgacagtgtggaggaccagctgtccttggcaaccacgttgtatgataaggggctgctgctcactaagatgcctctagccctaaattagtttcttgttgattgctggaaacaaggcagtagtgattctccgctgccactgctaccnnnnnnnnnnnnnnnnnnccttaaaccccccgtttttccttggaaaacaaaaggggggcccaatttacctttttacttggtttgggggcccaaaccctggaagggtttttaagaaaaacccttctttttttggccccagggggaagggga

SEQ ID NO: 63769 - DNA, 1297 bp, Homo sapiens
ggcaccaatccaatgtcagtatctgcaggctgaagtacagacagttacactgaaattgcgtatgctctgaggaatgacactaaattcgcttccaggaaaattactcaattttgtaagtaattttcagttttttttctcagggatatttttcaactttcactttaattttctttagttgcttagttgtacattttgagaaggcaaatccattggaacttggggaggcttagaacataaatcagtattagaagtaaagggaacacacagctaaaagttttactttaatcacaaattcacaactagagatatcatttgcatatcttagaacgctaaagacctgttaaaattttttaaccaatcagcaaaaatatgtgccccacagatttctaatgttcataatttagaatttatcacatataatatttattaatagtttatttgcaaaattattattcttaaaacacttctttccaacacatttacaatgttcatgtgttttaaagaaaaaaaccaccctcatttaaaaatgtactactgactttaatgtgtggttataccagtgccaccaaattagaaaagaaaaagaaacatacagctgtattggatatgtagttactactacaaataatgacaacacacgtcctatacaaagatcatattcacgcttttctaccacttctcagtcattgtcagaaccatttggaggtaagaaaaccaatgcatcattgaaaatatggcccaaatgccctaaggcggtataccccatacatcatcacatgcatctgatttggagtcagtccattaaaagtaacagccatatctgaacaacagccttctactacctggttggggtgataagtcattgcctctttaatagaaagcccaacagatttggtattaaatacatcttttccatcagcatcttctgcattttctgcaaatactccagcatatttcaggcaaactgctagctgtttatcttcagatatcttccaaatcatccctccctgttcaggacacttttctgggatattgagaaggctgttaagtcttttcattgattctacacttaagacaattcctccttccatacccacatattcaaggtctccagattttatagtgtggcctagatagaaaggctgtgatggatccttttttaacaaaaaatactttaggttttcaatgatagcaaacgtagtggggcgtgcaaggaagaaccagttgtattggtctctatacttacaaatacgcctttgataagtatagagaccaatacaactggttcttccttgca

SEQ ID NO: 63770 - DNA, 2856 bp, Homo sapiens
ggactacgtggtcaacatcgccgacagcaacggcaacacagccctgcactactccgtgtctcatgccaacttccccgtggtgcagcagctgctcgacagcggtgtctgcaaggtggacaaacagaaccgtgctggctacagccctattatgctcaccgccctggccaccctgaagacccaggacgacatcgagactgtccttcagctcttccggcttggcaacatcaatgccaaagccagccaggcaggacagacggccctgatgctggccgtcagccacgggcgggtggacgttgtcaaagccctgctggcctgtgaggcagatgtcaacgtgcaagatgatgacggctccacggccctcatgtgcgcctgtgagcacggccacaaggagatcgcggggctgctgctggccgtgcccagctgtgacatctcactcacagatcgcgatgggagcacagctctgatggtggccttggacgcagggcagagtgagattgcgtccatgctgtattcccgcatgaacatcaagtgctcgtttgccccaatgtcagatgacgagagccctacatcatcctcggcagaagagtagctgtgagggaggcggggaccagccagaccgggagcaaaccgtcccttgtccccgtctcctccctgttcccgttcctccctggcccaccccactcacactccccaaggcccacggctcaaaggcaagcgagctctccctctgcttccctgggggagccccgacggccacaggactccagctccaagtgggttttcttggctcccctgttcaaagtggccacagcgcagaccgaagcaaaattcttgtatacattggcgccagggctgatgctggggtgtgggttttatgaagaacattgagaacaatcagctggtaattatggatggaggaagagggagaggaaaaaaatattgtatttttgaatcattgttgcaggagggggtgggaatcttaggatttgttgccagatttgaaagtcactggaacttgcatattttcattttaatcctaagtgttattacgcaccagttggggttcacccttcatccctcacatttaattgtctgatatagaatagtgttgtgtccactgccccgctagacggctttcttaggggaattttcttctggttgtttcacaagacagattctgtccttgtcacccgggacagaaaactcagtcttttcaccctcattcagatgaagggactcaggacaggctctgtgacttacagggacccaatcaattcacaatgagaaattaccggccaggcgtggtgactcacgtctgtaatcccagcactttgggagggcaaggcaagagcttgagcttgagcctagacgttaaagaccagcctgggcaacacagcaagacccatctctacaagaaatttaaaaactagccaggcgtggtggtgcgcgcctgtagtcccagctacttgggaggctgagccctggaggtcgaggctacagtgagctatgatcacaccattgcacttcagcctgggcgacacagcgagaccctgtctcaagaaagaaaagaaaaagagacaaattacccagaaacccctcccttccccacatggaggccttggcaaatgttaattttcctagaaaatccttcagacctgaagacgcaggaaaagaatctggctctcagggtggcttctgcgtccccgccgccaggccccagactatggtcacagggccgtcctgttcctccccgggactccagaatttctctcctcaaaggaaagaaaacagggcatgcgcttgttggcaaaacgcagggccggctcccaaaaaccccatgtgtgtacgattaaaagttggccgtccccaggcctcccagcgcaaacttaaagagacagggctttgctgaaaaccaaacatgggccagctgggctttttaacaacctagagactttccggagctgcctggaacagagcctgcgggaaacggggcttgccagagacactcacagtttccttcatggcctgttttggtcccctaagaatctccacatcattgtctttcttgtgccttttccttggtgagcaacagaaagggaagggttccaagcctctaaaaatgtgctttgtgatcaggagtgcgctccaaaccaaatacgcgcgctgccctttcgaggccagtgagctcagcctccaaggctttaaagccacatttcagcaagagaaagcgctgagagctcgcaggttcattaaagaaggcaaagcactggtttctctccttagaaaagtaggtttcttggcttgatgtagactggcttgctttgatttttagtgaagggaatgtacgtaaaaacaaaatagggcttggctggtcaaaggagacaagcaggatggatggatggatggatgaatagatagatggtgtttgcatgtaaattgcagagaaaacaaaaccaaagctgattggaaacaattaattgtgggtgtctgagggggaaggtcgcagctttgggcagctttgagaagcggtacaagagctctgtgcctgtgtgtccagccctggagccagccagtgcatttattttaagctcttagaagcaactccttggcccaggaatgcgtgacccctgagatgggtccacgcatctctctacacgtccttctctccgtgggatactggactcgtgcctctgcgcccattctcttctcacgcatatccatgagctttaatttcactttctgatcacggtacgtccataaagccagtattacacttaaatgaagtattcttttttgtaatcgttttttttagaaggtaaacaaatttaataaagctaccaataatgaaaaaaaaaa

SEQ ID NO: 63771 - DNA, 2490 bp, Homo sapiens
  misc_feature (1)...(2490): n = a,t,c or g
cgacccacgcgtccgagcgggtctggctggcggcagcggcgggagggagccgagagacccgagtgcacgtgtggagaagcggcggcacaagcgcggcggcgggagacactcccgcccccaccagactcaagccctcactcgactctcgcggccttcgttgctcgcacagctccctgcccaggctaggaggccggcttgcggggttgagtggcccgagctaagggtgcggagacccaagggcggcgactacgacggcgttgatatcggtggtaacgacggcctcagcaggcggggaagatgaaaggtagccggatcgagctgggagatgtgacaccacacaatattaaacagttgaaaagattgaatcaggtcatctttccagtcagctacaatgacaagttctacaaggatgtgctggaggttggcgagctagcaaaacttgcctatttcaatgatattgctgtaggtgcagtatgctgtagggtggatcattcacagaatcagaagagactttacatcatgacactaggatgtctggcaccttaccgaaggctaggaataggaactaaaatgttaaatcatgtcttaaacatctgtgaaaaagatggtacttttgacaacatttatctgcatgtccagatcagcaatgagtcggcaattgacttctacaggaagtttggctttgagattattgagacaaagaagaactactataagaggatagagcccgcagatgctcatgtgctgcagaaaaacctcaaagttccttctggtcagaatgcagatgtgcaaaagacagacaactgaacaaattacaaatgaactttcttgcacttgcttgtcgccaaataaaagagaggcccattgattcctcccccaccccaacacttttcttttaaagcttttctccctccttgttcttgtttttctttcttcctttccttttctctgagagttttaatactttcaaggactttaaaaaaataatcatgtttgaattgttttctcttatttttgtgaggtggtttgaaggaaggacaaggtagatctgtttagttttgcagttgaagttagatggtcctaaacatttaattgtcaaataatttcaaatttaatgtcctgctttcacattgaagggcagagcctacaaaacattgtatatttcaaaagacaaaaagaagcagcagcagtatcttgttctctaattcatagacaagttgagtgtgtttgtggtactttgggtttttaaacactttgggatactaatccctagacattgccttcactccacctttagtccttctgagcactctctcgggagttggaacattgttatccttgtaagaaatactaagcttatgttgatttttaagtaattatatcttctcttcttgctggtgggtggggcagtttggtttagtgttatactttggtctaagtatttgagttaaactgcttttttgctaatgagtgggctggttgttagcaggtttgtttttcctgctgttgattgttactagtggcattaacttttagaatttgggctggtgagattaattttttttaatatcccagctagagatatggcctttaactgacctaaagaggtgtgttgtgatttaattttttcccgttcctttttcttcagtaaacccaacaatagtctaaccttaaaaattgagttgatgtccttataggtcactacccctaaataaacctgaagcaggtgttttctcttggacatactaaaaaatacctaaaaggaagcttagatgggctgtgacacaaaaaattcaattactgtcatctaatgccagctgttaaaagtgtggccactgagcatttgattttataggaaaaaatagtatttttgagaataacatagctgtgctattgcacatctgttggaggacatcccagatttgcttatactcagtgcctgtgatattgagtttaaggatttgaggcaggggtaattattaaacatattgcttctattcttggaaaaatagaagtgtaaaatgttaataatacaaatgtcactgtgacctcctccactgagaggactggtttatgccagatcattttccggcacacacggagtggctttgacagattgataactttgtaagatgggagacatctgaaatattcatgttttccttttgtagtcccatctccactatttagaaatgttctcagactttaaaataatgcacagggcttgagctttctgtcatttgactttaaaaggaagtttcattcatatttatcctcttatgtaaaattgcggtataaagtctcatttccaaatatgttaaatgacaaaattattttataaaatgtttatgcacactttataaccttaagtttttatttgagaatgtgaaagtacaaagtgccagtaggacttcaacaatcttgagtgcccaaggaataatacngggaaaagaagacagttgatgaatgagtttatagggttctaatctt

SEQ ID NO: 63772 - DNA, 2238 bp, Homo sapiens
ctgggcagctgttgtcgcgtggcgggcggccgggcggcggcgctgcggggaccgggtgcgggaggccccgccgcgcggccccggctgggcggtgacggtggcggccggcggcacctggggcaggggcagccgcgcagacgtctggcgggctgtggcagccgcgcggacggcggcttccgcccctcccgggtggtggtggtggccaaaaccacccggtacgagttcgagcagcagcggtaccgttacgcggagctctcggaggaggacctgaagcagctgcttgcattgaaaggctctagttacagtggacttcttgaacgacatcatattcacaccaaaaatgtagaacatattatagatagtttacggaatgagggaattgaggttcgtctagtaaagaggagagaatatgatgaagagactgttcgatgggcagatgctgtcatagctgcaggaggtgatggcacaatgctgctggcagcgagtaaagtcttggacagacttaaaccagttataggggtaaacactgatccagaacggtctgagggtcatttatgcctgcccgttcgatatacacattcctttccagaagccttacagaagttctatcgtggtgagttcaggtggttgtggaggcagagaatcaggttataccttgaagggactggcataaaccctgtacctgtggaccttcacgagcagcagctaagcttgaatcagcacaatagagcccttaacattgaaagagctcatgatgaaaggtctgaggcttcaggaccccaacttctgccagtgagagcactaaatgaagtcttcattggggagagtctgtcatccagggcttcctactatgagatttcagttgatgatggtccatgggaaaaacagaagagttcagggctcaatttgtgtactggaacaggatcaaaggcctggtcattcaatattaacagggttgcaactcaggctgtagaagatgttttaaatattgcaaaacgacaaggaaatttgagtcttccattgaacagagaattggtagagaaagtaacaaatgaatataatgaatcactgctctacagtccggaagaaccaaaaatacttttcagtattcgagaaccaatagcaaatagagttttctcaagcagtcgtcagcgttgtttctcctcaaaggtttgtgttcgttctcgttgttgggatgcctgtatggttgtggatggaggaacttcttttgagtttaatgatggtgcaattgcttcgatgatgatcaataaagaagatgagcttcgaactgtgcttcttgaacagtgaaggatttcctcatgacaaattttgattactggcgagaatatttttacttcagaaacagactaccagtcgtaaagtgacattttttggttattgttgagactgcttgcccgtgggctcagaagtgagatttgcattattcttctgttggattctgatagaaaaaaagacattcactgtataagaaaatggatggactgaaccaattagaattgataccagtgaaatttttatattgcttacaattggtaaccaagagtgctgatacctttttaaatttagaggggcaggcttaaataaaggactaaatatttaggatttgaaacttaactgtataagtgtgttttccttccctttcctcctaattgggggattgtcagaactgaacacatatcatttgattagtgcatattttttatagtacctgaaaaccaagattttgaaaaaattttcaagacagagaattttgataaatcctgacattgacctaattgacataggtaaatatgtttgtatatgtgctaataattttctaatttcggaacacgatgatgttatgactattgatttaaaaatttcaaataataatttttgaaattatagatgaatgctttcatttgagtttcattctgtaattcagcagttctgggtgaaatacagatagcaaaacaaatcatgatgctgttacaaatgtattagttatccaataagtgttttaagtcaatttttttaaaatgatatgagtcttacaggtttcttccatctttaaaatgctcaaacatggattcagggactaaaaggatgaactgattagacattttctattaggagtttggtaaaatattgtacaactatcttcacctgtgttaggcagtattatcaggacaggaatgggattctttaataaatatgtaaaacccagtaaaaaaaaaa

SEQ ID NO: 63773 - DNA, 1014 bp, Homo sapiens
ttttttttcaggggtaatgtttcatgaaatctttaatgaaatttggggagaggggcacaaacagaagggaggggcactggggacaggcttgggggcaagggaggtggacacgggggcagggcatgggcagggggctctcctcttcccctgaacaaaccctcccccagtcatcccactgacggggggagggaggtggggaggtggagccataaatacgtccagagtttcaaagaggtgaggggcgaagagctggccagggctctcagagagggggcaggggcaggcccgggccacccttgtctgggggccctggctccttgggcggccgtgggggccctggggggtcccctggcttgcgaccgtgcttgcggaagtagcggtagcgctggacgtaggcccgcaccaggttgctcaccttcactgggttgatttccccacttttgctgtggcagatcttgtggacggccttcctcaggatgtccttgtactcctccttggtgatgtccttcttctgatagtatggcttgatggccagcttcacctcctccaccgcccgctcctgcgtgtgcagcttcttcagatacttatctgtgtccccacggccctcagagctgctgctgccctctctcttgtcagacgtggcagccagcccggtgggggtggggggggtcgaaccgcagccccccagagggaggctgccaggaagcaggtagctggaggggccagggggcagacccaaagaggtgggcacaggagctggggtcatccccagacttgagggtggctttctgtggctgaggatctggttggtggcctggatcagctcctgggccttcgctcggctcgccaggttggcttcttccatcttgaagagaagtgcagtcaaggccaggacgccgctggtggtgcagtccacaccagctggcagattccagggcatgggcgggggcagcgtgggcagctgggagacacgggaagctggcccgtcctccgccccggagtcaccggctgtgg

SEQ ID NO: 63774 - DNA, 1187 bp, Homo sapiens
gcaaaatgacaacatttaatgggatgataaggaaataagacttgtcaagaaaccatagcccactgcagactgttcacgatgtcagatggttcatgatttttttccaggtttgatacagaagaatcagtttgttaaaagaaatgcttctccatcagagacttttcttttcttcaactattgtccctatccttattcaggttttcattttcttactagatgtgttttcaatggtttatgacgtaataaaatttctttacttcttccagtaattgcttttgtctcactcggaaactggaactactgtccgatgttggtaaaaagctagggcatattcttctttttcgtagtaatcgtagaccatgcctggggctggctgaatgttgaacacaaggttgctctgctcaacagaaaaagtgaaactgtctgctcgaccaaaaacattttccaagtagaaaagaacatggtcattcttgacttcagtcttcatcacttggcccttgttttcaagctcttcaatggatgacatggttggagtaaatcctgatagcatttttacatctataaccaccatactggatttattgcgaattccagtgtatttgagggtcactgtgaggtcaaaagcagtcgaagagtagttctttactatttccaaggaaagagaaaatccagatgccttcttaggtaggagaacattgtacttaagggtggcctggataaatgtacaaccgtgtccttccacatctactgtgtattgtccaggtgcctgtgttacttctgaacgttggaccagtaggcggttatgaccgttaacctggaaaatctcactggatccttcactgctggaggactgtgggttttaggtgtccaagaagaaagctcagatctgccgacggcaggtgccttacttgggatttactatccgacaggggtctggaggactgtgggttttaggtgtccaagaagaaagctcagatcttccagcagaaggtaccttacttgggatttactatccgacaggggtctggaggactgtgggtattaggtgtccaagaagaaagctcagatctgccgacggcaggtaccttacttgggattttctatacgacaggggtccgaacgcagcccgggatcagaaagaaagcaggtcgtttgcaatctaccaggacctaagggcagaacggcag

SEQ ID NO: 63775 - DNA, 1117 bp, Homo sapiens
cctggtcgacctacgcgtccgaagggaggaggcagacggcaacaagatggaggaagaggaggagcccgcccagggcaaaggtgacagcattgaggagattttagctgactcagaggacgaggaggacaatgaggaggaggaaagaagccgaggcaaggagcagcggaagctggcacgacagaggagccgggcatggctgaaagagggcggtggggacgagcccctcaacttcctggatcccaaggtggcccaacgagtcctggccacgcagccagggccaggccggggcaggaagaaggaccacagcttcaaggtgagcgccgatggccggctgatcataagggaggaggcagacggcaacaagatggaggaagaggaaggtgccaaaggcgaagatgaagagatggctgacccaatggaagatgtgatcatcaggaataaaaagcaccagaagctcaagcaccagaaagaggctgaggaggaggagctggagataccccctcagtaccaagctggaggctctggcattcatcgccctgtggccaagaaggctatgcctggggctgaatacaaggccaagaaagcaaaaggtgatgtgaagaagaaaggccggccggatccctatgcctacatccccctcaacagaagcaagctcaaccgcaggaagaagatgaagctgcagggacagttcaaaggcctggtgaaggctgcccagcgaggttcccaggtgggacacaaaaaccgcagaaaggatcgtcgaccctgaggcccagggcccctgggctgccctgtggtccagtctgaggccctttcagcccccaggctgccttgccaccagctccaggtgctcaagattctggcagagcctggactcaggatgacttggaactagggcttggctctcagaagtcctggattttggaaactccaaatggaatcacccttcagagacatccctggtgcctggagatgggaatgtggcctcagtgcctctgagtaggtgccatgaggcacctttgctttctgcccagagtggccatgagcaccagaacagatgatctccatttccgccagctgcctgtagccacgtggcatcctgcctgtggtctgggtgaaa

SEQ ID NO: 63776 - DNA, 1162 bp, Homo sapiens
tcagatgtgaccttcctggtggaaggaaagctgttttatgcacataaagtcctgctggtgacagcttctaacaggtaggcagcctcagataacaaactcccagcccaggggcacagaagcaccttgtttcagattccaggtgacagagagtgactcgctggggctgtaccctgcagcctctgcccctcagactgcagtcacattgcagcagagccccactcgccccacagcgggatgagacggggtggacccagggcagcaggaaaggggggctctgaggtggtgttctttctggcctagttattgcttttattattagaaaacataaatatcctggaatgaagagtcagcattctggccacaggcgtcaggtcgcttgtagggtgggtggtggggacagaattgggctcagctcagatgtcttcctaagatggtgtaaaatggcacttgctgaaaattattttaggagcacagcagtaatttttaaaatgttccgtcttgtggtagccggtcaggtgacagatggtgccatcgccacacagtggtgaagtaaaaggttcaaaacccaccttgctttgtctcctttgctccaggttcaagacactaatgaccaataaatcagaacaggatggggacagcagcaagaccatcgagatcagcgacatgaagtaccacatttttcagatgatgatgcagtatctgtactacggaggaacagaatccatggagatccccaccactgacatcctggaggtgagactcgggagagggggagggggcctgggccagggtgcccagcggctcggtctcccattcacccccttcagagggaaggtggctcttcctctccatctgacaggaagagcagttcccagaaagaggaactgtgcacaccactgagcccagcctcagtgcgtgtcccagcggggatggttaggcccaggagtatcagaaggtagtggggcctgagggtggaggcagcagggcacacggcactcgggagctttctgttcggtgctgtctgggccactggtctggccatgggtccccaagacctgctctgcctccctaccagctgctgtcagctgccagcctgttccagctggatgccctgcagaggcactgcgagatcctgtgctcccagaccctcagcatggagagt

SEQ ID NO: 63777 - DNA, 1805 bp, Homo sapiens
ttttttttttttttctgtctgtgggagaaaaactatctccatttattttgtttcatatacatccatagttgaattttaatacaaaagaaaaaaattagaatctgacaaatgtttacaaacaagataccttcaaatagattttactcactttagcctggtgcagagtaattgacaaattgtactgttatattcaaggcaacagagtctgtagtccaggaccacttagcccaacctttatgcaagcttaattttaatctaccatgaacaataaactcattgttgattcccagttgtgtgtgtgtgcacatgtgtacatagcagctcctttcatagaaagaaaagacatctagaggtcgtcttgtacttttacctacaggaatcatgataagatacagatgattatatgtaaccggggctggattttataagaaaaaatacttagctgacaaatgagggcagcaataaaaaagcgtcttttttgcaacaataaataaatacagtcaaaagttttctgtgagactctaaaccagcttcttcactgaagagcagacgtggcatttccatggagttacacttgaccccatagtatctttttttcttgctttctttttctttttttttcaataaacaaagttttctcgcttctgccacaatagtaaaaccatctgatcttgacaagataatggtgtcgttgactttgcttttttcttgtccgttggacaaaattggccaagaatataattggactgttatgaccaataaaaacgaagtttaggtcaagtcttgtcaggatagcctgactaaaaacatctggctccttaatttaaaatagttcagacaaccagattcttgctgtgttttatgttaggttaacacgctgaactttaagaagctgtagactgcagtttgttgttatgagacctgctagctttgaagcctttcaatttctgtacaaagaatgattcgagaacttctgcacactggtaaaatggggagtcacttggattgtagtaacgacagttatcaaaaattttggtcatatctgccacaaattccgtcagcttttcataatatcgtctttgtactctttcttccatggtggcaaggtccataggttccttaataacaccataataatctggtgcatcattagggtctactggttcaaggaaaggccaggccatcttatgggcctgtaaggaacggagcaccctcttcaacccctcataatccttctctgttagtggcgtgagcactgtcatggcatcctctgttgactggcactgtggacagacatactcatcaatgagctctgcctcactttgcaagatgccaacgcagcgcccatggtaccaattctgacaccgatcacagccaatataaaatttagattcatcataaggcgttttacagatacagtaaagctttgtgtccttcttagtttcctttgaggtagtagagatcattttctttttcttggactttgagctggagtctttttcctcttcccgcttcctcttctgggaagcagcaggtaaggtgggcgtggacagaaggcctgtgtgttgcacagcaggtggagttgatggacgtattcgagtctgtgatggactttggacacgaacaggagactgtccttggacattactttgaggctgagactgtgctgcaacttggggcttggatgactgtgcgtgggtgggttgtgcttcagaagggacatgggatgaaacagttgtttgggtctgaacttcaggctgagtctgaacttcaggctgagctggggactggggctgggctcgtgc

SEQ ID NO: 63778 - DNA, 732 bp, Homo sapiens
  misc_feature (1)...(732): n = a,t,c or g
aggattcaagcgcaggcctgcccaggctttttgtgttctcctggctgcgaggaggcatccagggaccaggtgccacccttctgagacacctgaaatcccaggcccgagaggatgaaggcgggattacctggagcgtgtctgaatgctggaggaagaagggcacctgggagatgaagctgtcaggatgggccgcatcccatttcctgcctcgtttcagttcaactttccaacagacctccctggctcgtcttgctcttctctaatggacaaacaaacaggctcaaagagggggggtgacttgcccaaggtcactcagcttggatgctatggaacagggacgtccactgtcccagtctgtttatgggaagccgctctgcaactgtcctgacccaccacatgccccaccgctgtttctctttngcctgaccccttgttccctggaccagggtggcacagctccaggctcttgggcccttcccgagggcaggcacctgtgactgtgtccccaaagacctgagtggctgagggggccccacagagcttggacttcctggaggacaaggaggggtcttgcagtcacccccatcacgcccgccccagggctcccctggagcttccatgccagctggactcaggacccctgtgatcacactggcccccccaccggatgacccaggataatccatctccctgattgaaggacggcttgatatcaaaccttatttccatctg

SEQ ID NO: 63779 - DNA, 1452 bp, Homo sapiens
ttttttttttttccttaaatgaggagatttaatgtctttacattatacatttcaaaggaacaaaacaccctttatgaattttctcatggagatagcatttacatcacagagctgttgtgaaaataaaataagaatgtacagcacacctggaatataaaaaacatcccaataacttacttggagccccgcagccatccatccctcacatataaatacaatgaaccagatgaagatccgtgtccgtgtccatgacagcaatccattcagaagatcaaagataaatagtctaatacaccaatttctgacatttgcttagcactgcaggactcatgaagagctgccactcatattatctcatttaatccctacaacaaaaaccaaggctcaaggaggtgagtccttgcagaaagaacagttaacagactccacaggtttgcaaaacagccatatgacagagggctgaggaagcctatgatagtaggctgaggaagcacagctgaactgcagctatgagactgttctagcagcacgactgtggcctgaaggcacattcttcctccaggtaaggcaagggagctctcatggtgactgggcccctcctgggcaatggcaatgccactggagaaacagctggaaaccatatgctacagggatgtcttttatttgtatattgatatttcttcacagaaaattaagcaagtggctattctgtcctggattaatccatttggacttggtcccattggtgtccgtggcagcttctgctttgtctgtaggcactggggccttatcttgtgatggttatcacttgagggtcttgctaaggttggagaaaccaatgccaacacaggtcatcagcactttatccccacccttgagttcttcaccacatggcttggtttcaattttaaacataatctggaaaaagctcttcaaatgccgcaaaaattctatcgtgtagggagagagagggcctagcaggactttggaaacatcctgctgtccaagggtcatgagtagtagcgccaggctttggttggtcgagtatacgcatccacccctgtagatttcctccagcagcagccgggcacagttcctgccaaggtcctctggaagtactgctgctccctggccctgggggttggaggccagttcagcactgaggaaggtgccactggtggtctcagcaaccagtgacaacccaaagcccggagacttcccagagttgactcctttcatgtgatctgtgtaaatatagatatcaggtatgaacttgttgaggatgctccttgcagaatccacaatccggttcgccatctgaggtgacacacgtacagagtacctgcagcctggagttaaggatgtcattctgcatacatctctcttcacatatgcacattttgttcttgctcttcaatgagaccacacactctataagggcaagggctttac

SEQ ID NO: 63780 - DNA, 957 bp, Homo sapiens
atggcggccgcctggccgtctggtccgtctgctccggaggccgtgacggccagactcgttggtgtcctgtggttcgtctcagtcactacaggaccctggggggctgttgccacctccgccgggggcgaggagtcgcttaagtgcgaggacctcaaagtgggacaatatatttgtaaagatccaaaaataaatgacgctacgcaagaaccagttaactgtacaaactacacagctcatgtttcctgttttccagcacccaacataacttgtaaggattccagtggcaatgaaacacattttactgggaacgaagttggttttttcaagcccatatcttgccgaaatgtaaatggctattcctacaaagtggcagtcgcattgtctctttttcttggatggttgggagcagatcgattttaccttggataccctgctttgggtttgttaaagttttgcactgtagggttttgtggaattgggagcctaattgatttcattcttatttcaatgcagattgttggaccttcagatggaagtagttacattatagattactatggaaccagacttacaagactgagtattactaatgaaacatttagaaaaacgcaattatatccataaatattttttaaaagaaacagatttgagcctccttgattttaatagagaacttctagtgtatggatttaaagatttctctttttcattcatataccattttatgagttctgtataattttttgtggtttttgttttgttgagttaaagtatattattgtgagatttatttaataggacttcctttgaaagctgtataatagtgtttctcgggcttctgtctctatgagagatagcttattactctgatactctttaatcttttacaaaggcaagttgccacttgtcatttttgtttctgaaaaataaaagtataacttattcacaaaaaaaaaa

SEQ ID NO: 63781 - DNA, 938 bp, Homo sapiens
ctcatccttcaaagaaacagctgtggcttcaagttgttggtcggtgctgaaacagaaaagacaacagatgaagatcccagatggattttttgcccatttttatgccatttgtgaacacatcagtcctgtcctagcctggggctttttgggtcctagaaattctctgtatgatttatgttgcttttttaagaatcaagttcttttatttctcaaagacatttttgactttgagaaggtgcgctattcaagtacagagactttagctgaagacctcatgcagttactcattcgccgcactgagcttttaatggcctatcttgaagcagatgccctgaggcatacaagtagttgtctaagcagtcatggtcatgttatgtccactgggctactggaagccaaagtacaataagtaccataagaatcatacaatttgagtgtgctatgaaatattttaaggtaactattgattttgtaacatatattacaaagttaacagaattgatgcatgtggattcagggaggaaaaaaaaatctactaaaaaatgagcaactgtactgtatttatacagaagttctgtcattgaattcctgtgtagtgtagtcatagtggctttttgcattcattaggtaataattgaagtcatgaaatgtatattttacagaaatatcgcttgaattgaagccaatatttgggagttaattggtttgtcttcttgaagctgtcattctcaaaagctctgtttttatgctttgcacctttaaaatgtacactttagccaaggtctttgtggcccacacatgcaagaatatattacttctaatgtcaatatatttaactttgcctagaaacatatttttaattataaagatattcatttgtttaatcaagtttaggcagtaatgatgtttaatatgtactgcatacattattgcttgtg

SEQ ID NO: 63782 - DNA, 555 bp, Homo sapiens
  misc_feature (1)...(555): n = a,t,c or g
ttttagtcatatcacagaagcatttcatcaccagcctgagtggggaaatcccaatcgtgacagagggtcctgggcacagcctgttgatactggagtttcagaagcgagcctaggtgatggtgagccccacatcccatctctgctgtctatgtctacaaggaaccacatggatatcaccattccacccttacctccagtagctccagaagtcttgagagttgctgaacacagacaccggaggggtcttatgtacccatatatctaccatgtcctcactaagggtgaaattaagatccccgtatgtattgaggatgagtgtaacatggagctgcctccagctgctctcttattccggtcagctcgtcaatatgtatatggagttctntttagtctggcagagacacagaggaaaatggaacgcttggccatgcgacggcggctgcctgtggaaggtaagtgtagttctagctatgacaattctctcagcacttgatacagcagatatgtctgtccaggcacattgggtacctatggctatggagtagtctttaagaa

SEQ ID NO: 63783 - DNA, 830 bp, Homo sapiens
ttttttttttttaaatatttgatatttttattggaaatgtttttgttagtttgaggggaagggtatgaagacagatctcaaggtaaagtcagagagggctgtcatcagtatgctggggagtttagggacaggaggcattggtaggggattagatgtagcagcagtcaggctgggatcaagatgcctggggggacatcttgatcttggcctttcagggcaagtgggaggctagaaaggtggcctaggaaaagaaacaacaatccttcaggtaaagggtaatagacttgggatgtgaaggcgttatgctgaaaggttctgtcacgaggggatcagaggacagtggggaaattgggtgggttatctagcctgtactgtctgcaggtcctgaaatttgatgctgtcatagtctttgcagtgggtcggttggaatgattctgggggcagaagctcagagccccttagtaggaatggaggcggcccttctgctgccactgctcagccccctccactgcatgacgaagggtggaggaaattcccagcaacatatggcccaggccttgcagcagtgtggaggtccaacgaaggagctccctgaatggcagagacaagaggaaatcagatgatttggaaaacttgggaggaagccatcaagctgggagatgaggactttccacaagcaagagctaactaggggtaggtgggtgcaagaggacgaattatggggactatccaactgtaggggatggggcagtatgacatgttgatttctgacctgagtactttctttgggccaagtccttgaaagtcacaactcatagagtagagcccgt

SEQ ID NO: 63784 - DNA, 2223 bp, Homo sapiens
ctgacctcatggcgtagagcctagcaacagcgcaggctcccagccgagtccgttatggccgctgccgtcccgaagaggatgagggggccagcacaagcgaaactgctgcccgggtcggccatccaagcccttgtggggttggcgcggccgctggtcttggcgctcctgcttgtgtccgccgctctatccagtgttgtatcacggactgattcaccgagcccaaccgtactcaactcacatatttctaccccaaatgtgaatgctttaacacatgaaaaccaaaccaaaccttctatttcccaaatcagcaccaccctccctcccacgacgagtaccaagaaaagtggaggagcatctgtggtccctcatccctcgcctactcctctgtctcaagaggaagctgataacaatgaagatcctagtatagaggaggaggatcttctcatgctgaacagttctccatccacagccaaagacactctagacaatggcgattatggagaaccagactatgactggaccacgggccccagggacgacgacgagtctgatgacaccttggaagaaaacaggggttacatggaaattgaacagtcagtgaaatcttttaagatgccatcctcaaatatagaagaggaagacagccatttcttttttcatcttattatttttgctttttgcattgctgttgtttacattacatatcacaacaaaaggaagatttttcttctggttcaaagcaggaaatggcgtgatggcctttgttccaaaacagtggaataccatcgcctagatcagaatgttaatgaggcaatgccttctttgaagattaccaatgattatattttttaaagcactgtgatttgaatttgcttatgtaattttatttgcttgactttttatatgatattgtgcaaatgtttgccataggcaattggtacttaaatgagaggtgagtctctcttttgccttggtgctttggaaattaaatgtcacaaacgagtatataattttttatctgtacttttagagctgagtttaatcaggtgtccaaaatgtgagttaaacattaccttatatttacactgttagtttttattgttttagatttattatgcttcttctggaagtattagtgatgctacttttaaaagatcccaaacttgtaactaaattctgacatatctgttactgctgactcacattcattctccgccattcaaatactattttttatccacatttttttttgttcccaaactgtaatgtacaaggatatgtgtgataatgctttggatttgagtaatatttttttttcttccaagaaaactgctttggatatttttagataatttaaacataatttaggataatgatattgctcaatctgaccacaattttaggtaaaacattaaatgtgtcaagaaatcttggcaacagagactctgcagcttgcagtggacatagataaaatgttacagagatactatttttttggttggaattactatattaaatttagaagcagaaactggtaaaatgttaaatacatgtacaattgcttttagttagcaattgattgtagcatgggttcctccaaggtttcaagcaatgggcagagtttaaaattatatcagattcgtttacttcgtttattattttacagtaaatttgaataaatcttaggggtcattatcacttaaataatactgtacctaggtctttcaaattaaaattatacctgaatgaagttgtttgtgtacataaaggatatttgtgtacaattaccttttttcccccacacttgttttctttgtttttgttttttatggcaactggaaagtatttactatgggattcatttatgtctgtctttctatcataaagaattgatcaatatgtaaatatgtgatttgaaccatggttgacttacaagtgtcactacagctttttagaaaacatagccctaatatatgttaagcaggacccgggtgagccagtgggcttgcgctttatgtagagctggaagaaggccgtccatcctgtctcttgggcggacagtgtactttcctaatagggaagggaagcacaatgcgaaatacccctgaaccgttttattgcagttaatttttttcatatctgaaactattatttaatattttgactacgacttttacaaaataaatgccacagcatatacaatctatgatttcaaaaaaaaaa

SEQ ID NO: 63785 - DNA, 925 bp, Homo sapiens
tccattaagaaatattttattgatgtaagtgaacctggacatggagcaaaagaccctccaatactttcccagccctcagaaagttttccataattttgaatcagcctttactactgtcgtcatttgtgattgtcttgaggcagagttggagctcacagtaactgccagttgaatccaaataacatctgattagtctcttggctcctagcaatctcttctataatgcagtgttgttgccagaccaaatggagcttccgataccgctcacgagataaatgaagggggttgcccctcttcaggccagggtctgtttctccatattcatccaagtaaggagctggataggcacagcctctggctttaccttcaaccaggaccactcggcattctctgatttttaggaaaatgcagactccggctccacagtgaagtgcgtgaaaaatgcaagctccaacctcttccccgttcacaatttcctggcagcaaatgttctgagaacatagtatagccccacagaaaaggcagaggacaggatgctttcgctcatcatctgcagaccgtgggcacctgaaatgagaagcttgattcaggaggcagctatagtcatcaggaagctctatcaaactatttctttttctagggtacctgaccacggtgtttttttgcttcaaacagtttagtaaggcaggatctgcacaccacctctggagcaagggccttacagtatcccaatattcctggaagagcaggaacaaatttgtaggtaaagatagatagctacagagtgcactgtactctccttctgcagaattggtatgcagttcctcaggcggagttaccccaagtaaatagtggaaaaacaatgcagcacagcgaagataaggggtgatgccattcttcagtgagacccacaaataccagccag

SEQ ID NO: 63786 - DNA, 777 bp, Homo sapiens
ttttttttttttctgaagaagcatttattagcatgcagggcccatgctagaggctccttatttccagggcaaggccagcgagacagagcccattgctcaggacgcagcccagattgcaaagagaggacagcccatggtagcggaagaaattctggcggagagcactgtacttggggtccttctctcgcagctggcggtagggatcgggaccctggtggctgcctggtacctccccacccaggcctcgctccttctccacggtttgcagggcccacatggcagctgtggtgcggggttccagccagcgggcgttgacagtggccagcgtaaggctcaggaacagcaggtaaagctggctggcctcccagaatgtgagctgagcccaagcatgctgtgaagccaagatgcagaggttgatgaaggcacagcccatggagatgtggaagtagaaggggaagagtttgctctgcactagtccgaaggtatgtcggggaaggcttcggaaaagcaggaagcctgagacgaaggtcacccacatttgcatgccccaggcacctgacaagaccagtagatggaccatcttaatcaggcctcctaggttcccgccttcctccatcttgcagtccgttaggaaccgggacctcaatccgcagcacccggattccgagaacagaggcgtcggggccaaatgggctgaatctggtacctcactcccacgcccccgggtggacagcgaccctcctcggccgcgtcccctcgtgggtttcccctcgtgcc

SEQ ID NO: 63787 - DNA, 1635 bp, Homo sapiens
ttctgccttctgggacgaggcgctcgtcaccatcctagccgtgtgcatctatggcatcgcgcctgtgggcttctcgcagcatgagacggtggactcggtgctgcggaaccgcggggtctacgagaacgtcaagtacgtgcagcaggagaacttctggatcgggcccagctcggaggccctcatccacctgggcgccaagttttcgccctgcatgcgccaggacccgcaggtgcacagcttcattcgctcggcgcgcgagcgcgagaagcactccgcctgctgcgtgcgcaacgacaggtcgggctgtgtgcagacctcggaggaggagtgctcgtccacgctggcagtgtgggtgaagtggcccatccatcccagcgccccagagcttgcgggccacaagagacagtttggctctgtctgccaccaggatcccagggtgtgtgatgagccctcctccgaagaccctcatgagtggccagaagacatcaccaagtggccgatctgcaccaaaaacagcgctgggaaccacaccaaccatccccacatggactgtgtcatcacaggacggccctgctgcattggcaccaagggcaggtgtgagatcacctcccgggagtactgtgacttcatgaggggctacttccatgaggaggccacgctctgctctcaggtgcactgcatggatgatgtgtgtgggctcctgccttttctcaaccccgaggtgcctgaccagttctaccgcctgtggctatccctcttcctgcacgccgggatcttgcactgcctggtgtccatctgcttccagatgactgtcctgcgggacctggagaagctggcaggctggcaccgcatagccatcatctacctgctgagtggtgtcaccggcaacctggccagtgccatcttcctgccataccgagcagaggtgggtcctgctggctcccagttcggcatcctggcctgcctcttcgtggagctcttccagagctggcagatcctggcgcggccctggcgtgccttcttcaagctgctggctgtggtgctcttcctcttcacctttgggctgctgccgtggattgacaactttgcccacatctcggggttcatcagtggcctcttcctctccttcgccttcttgccctacatcagctttggcaagttcgacctgtaccggaaacgctgccagatcatcatctttcaggtggtcttcctgggcctcctggctggcctggtggtcctcttctacgtctatcctgtccgctgtgagtggtgtgagttcctcacctgcatccccttcactgacaagttctgtgagaagtacgaactggacgctcagctccactgagctggctgcgggctccagcggccgtgtgctccagcaggccagagccagacacgacctccctgagcctcacaggcttacaggagtcacctgctccatgtggggactggcctgtttcctgaacacagacctctttcttgtgccttgttcacttctgttgaacccctcgtactgccgggcatttattatactacttcctgtcataaccttctaacttgtttcttgacgaccacctcatgtggccaataaatggactgggagcgttttagctgccattaacttgaaaaaaaaaa

SEQ ID NO: 63788 - DNA, 6018 bp, Homo sapiens
gcagcccgtccagcagcagcagcggctctctggccctgggcagcgctgctattcgtggccaggccgaggtcacccaggaccctgccccgctcctgagaggcttccggaagccagccacaggtcaaatgaagcgcaacagaggggaagaaatagattttgagacacctgggtccattcttgtcaacaccaacctccgtgccctgatcaactctcggaccttccatgccttaccatcacacttccagcagcagctcctcttcctcctgcctgaagtagacagacaggtggggacggatggcctgttgcgtctcagcagcagtgcactaaataacgagttttttacccatgcggctcagagctggcgggagcgcctggctgatggtgaatttactcatgagatgcaagtcaggatacgacaggaaatggagaaggaaaagaaggtggaacaatggaaagaaaagttctttgaagactactatggacagaagctgggtttgaccaaagaagagtcattgcagcagaacgtgggccaggaggaggctgaaatcaaaagtggcttgtgtgtcccaggagaatcagtgcgtatacagcgtggtccagccacccgacagcgagatgggcattttaagaaacgctctcggccagatctccgaaccagagccagaaggaatctgtacaaaaaacaggagtcagaacaagcaggggttgctaaggatgcaaaatctgtggcctcagatgttcccctctacaaggatggggaggctaagactgacccagcagggctgagcagtccccatctgccaggcacatcctctgcagcacccgacctggagggtcccgaattcccagttgagtctgtggcttctcggatccaggctgagccagacaacttggcacgtgcctctgcatctccagacagaattcctagcctgcctcaggaaactgtggatcaggaacccaaggatcagaagaggaaatcctttgagcaggcggcctctgcatcctttcccgaaaagaagccccggcttgaagatcgtcagtcctttcgtaacacaattgaaagtgttcacaccgaaaagccacagcccactaaagaggagcccaaagtcccgcccatccggattcaactttcacgtatcaaaccaccctgggtggttaaaggtcagcccacttaccagatatgcccccggatcatccccaccacggagtcctcctgccggggttggactggcgccaggaccctcgcagacattaaagcccgtgctctgcaggtccgaggggcgagaggtcaccactgccatagagaggcggccaccactgccatcggaggggggggtggcccgggtggaggtggcggcggggccaccgatgagggaggtggcagaggcagcagcagtggtgatggtggtgaggcctgtggccaccctgagcccaggggaggcccgagcacccctggaaagtgtacgtcagatctacagcgaacacaactactgccgccttatcctctaaatggggagcatacccaggccggaactgccatgtccagagctaggagagaggacctgccttctctgagaaaggaggaaagctgcctactacagagggctacagttggactcacagatgggctaggagatgcctcccaactccccgttgctcccactggggaccagccatgccaggccttgcccctactgtcctcccaaacctcagtagctgagagattagtggagcagcctcagttgcatccggatgttagaactgaatgtgagtctggcaccacttcctgggaaagtgatgatgaggagcaaggacccaccgttcctgcagacaatggtcccattccgtctctagtgggagatgatacattagagaaaggaactggccaagctcttgacagtcatcccactatgaaggatcctgtaaatgtgacccccagttccacacctgaatcctcaccgactgattgcctgcagaacagagcatttgatgacgaattagggcttggtggctcatgccctcctatgagggaaagtgatactagacaagaaaacttgaaaaccaaggctctcgtttctaacagttctttgcattggatacccatcccatcgaatgatgaggtagtgaaacagcccaaaccagaatccagagaacacataccatctgttgagccccaggttggagaggagtgggagaaagctgctcccacccctcctgcattgcctggggatttgacagctgaggagggtctagatcctcttgacagccttacttcactctggactgtgccatctcgaggaggcagtgacagcaatggcagttactgtcaacaggtggacattgaaaagctgaaaatcaacggagactctgaagcactgagtcctcacggtgagtccacggatacagcctctgactttgaaggtcacctcacggaggacagcagtgaggctgacactagagaagctgcagtgacaaagggatcttcggtggacaaggatgagaaacccaattggaaccaatctgccccactgtccaaggtgaatggtgacatgcgtctggttacaaggacagatgggatggttgctcctcagagctgggtgtctcgagtatgtgcggtccgccaaaagatcccagattccctactgctggccagtactgagtaccagccaagagccgtgtgcctgtccatgcctgggtcctcagtggaggccactaacccacttgtgatgcagttgctgcagggtagcttgcccctagagaaggttcttccaccagcccacgatgacagcatgtcagaatccccacaagtaccacttacaaaagaccagagccatggctcgctacgcatgggatctttacatggtcttggaaaaaacagtggcatggttgatggaagcagccccagttctttaagggctttgaaggagcctcttctgccagatagctgtgaaacaggcactggtcttgccaggattgaggccacccaggctcctggagcaccccaaaagaattgcaaggcagtcccaagttttgactccctccatccagtgacaaatcccattacatcctctaggaaactggaagaaatggattccaaagagcagttctcttcctttagttgtgaagatcagaaggaagtccgtgctatgtcacaggacagtaattcaaatgctgctccaggaaagagcccaggagatcttactacctcgagaacacctcgtttctcatctccaaatgtgatctcctttggtccagagcagacaggtcgggccctgggtgatcagagcaatgttacaggccaagggaagaagctttttggctctgggaatgtggctgcaacccttcagcgccccaggcctgcggacccgatgcctcttcctgctgagatccctccagtttttcccagtgggaagttgggaccaagcacaaactccatgtctggtggggtacagactccaagggaagactgggctccaaagccacatgcctttgttggcagcgtcaagaatgagaagacttttgtggggggtcctcttaaggcaaatgccgagaacaggaaagctactgggcatagtcccctggaactggtgggtcacttggaagggatgccctttgtcatggacttgcccttctggaaattaccccgagagccagggaaggggctcagtgagcctctggagccttcttctctcccctcccaactcagcatcaagcaggcattttatgggaagctttctaaactccaactgagttccaccagctttaattattcctctagctctcccacctttcccaaaggccttgctggaagtgtggtgcagctgagccacaaagcaaactttggtgcgagccacagtgcatcactttccttgcaaatgttcactgacagcagcacggtggaaagcatctcgctccagtgtgcgtgcagcctgaaagccatgatcatgtgccaaggctgcggtgcgttctgtcacgatgactgtattggaccctcaaagctctgtgtattgtgccttgtggtgagataataaattatggccatgggaaacattgtatatttagtgtgtgtattttgataatgattgatcttaaatctgtatacagaatatcattgatataatactctttaggcaggagcactcttgccttcccccaaaatttacactgctaaagccctctgtcacttggcgacccttctggtcttgctggaggggtttcctgggtataacccattgggctgcccaaggccagccagcctgagctctcctgcaagacagagcctgatgtggcacggagtggggttgcagggggtggggggactgcctgactcccagagggacttgaaactgaagcaagaaggttgcattctccaccaagggagttaacctacctgaactaagtagaaatgccagtcttccactaccccctccctgccatcttttcttctgctactttggggagttgatggccaggaaagaagccagcacagggttaaagtaactcctggcattgcccaccagggggctggtgcacctgctgacctcagggtcacagttgagtcatttgccagttgacggagcaagtttgaccttggttctgttgctgaagcaaatttggaacttttctgtctcagtgtgatccactaacccacaggatcatttggaaccttgaatagctctgcttggacaatggggttggggaatagggttgtctttcctatgaaaatgccatctgtagaccttgtgagtcagccgtccagatgtttgcaggtgaattcctctgcttgacatcctccctgtcactttggaccctatgggagtgggcatctccacgcacctgtgtatgtgaaagtcattttacatttcaaagcagtgtgtgtttcttatttttatatttttaactctttattcttggatgtataaagtgaactttttggcttctgtaagtatgctctatgcacctctaatgttttatcatgtatttatatgttgtacacagtactggctgattctgtaaatggatgtattgtacagagaacatgaacgtctcttcctaattttacatcttcagcatcattgcattaaagtggtgtaatctccttctctacatctgttgtcagagccactgagtgctgtgctgctcgacgtgagggtgaaatgattgacttgtgacctgccaggttgcccgatgccctgttgggtcaccggctggacctgctgcagcctgcagagccacagtcagcctgcccacatgccaccgagcaaacgcatcttgcttttcacatctctcctcctacagccttaatggctgcttgctgccatatgtgacaaatcaccaccaccagtgttaagtgcttctggattcatgggtgagttccctgggcagcccccaggaaggccttccagatctggctccagggtcaccacctgtcacagcaatacctgggaccatgctctcctgggactgtgaggctccttttgacgtacttttgacatcaggcaggtttgggaagaaacaaagccatgcctgctcctgcctctctcccaacatgtttccagcaagtagatgcccctgtgtgtgttttcccttgccttgtttcctgccttatatcttgtatttcgacttattacagagttgagggttcttgcttaatttagatcaagtataaaatttgtatgacttcaagtctcattttatctgaaaggtttttttctcatttaatctgatgtggcattttcgtcatctgaagcatgagtgacaagttgggaatgatgtggtgatttagaatgcagtattggccaagtccaagttgtcaacttaagcgtctgtttaccaaagaccgggaacaggggcccaaacatgtccagtcctcttcttccctctgctggaacctttggggacactcaagggtacagtttgacactgatctggtccatgaggctgcccagagaaagcactgcttctgtatgtctcttgtggtattggaacaataaacccgtacaacctgcaaaaaaaaaa

SEQ ID NO: 63789 - DNA, 840 bp, Homo sapiens
ttttttttttttaaagatcctaacaaaacatagcgtaacaatattggtcttccaggtgttactcatttcaattatgtgtagtataccaggacagacctattttcatgtcttatttctttaaagagctgcttcattggccgggcgccatggctcacgtctgtaatcccagcactttgggaggccgaggcgggtgggttacttgaggtcaggagttcgagaccagcctggcaaacatggcgaaaccccatcttaactaaaaatacaaaaaaattagccgggtgtggtgtcacgcgcctgtaatcccagctacttggggggctcaggcaggagaattgcctgaacccaggaggcggaggttgcagtgagctgagattgggccactgcactccaccctgggcgacagagtgagactcggtctcagaaaaaaaaaaaaaagagctgcttcacatataaatgtctatagctagtagcctggccctttaatgttaaatttgaatagatatatctgttttccgggaattatcttgaaaagttttaaacagaatgaccctcatagtttttaataaagaatattatttacctaaaatgtgctagtagcatcttgcccagcccataaagcaataaacttctcaataatcttaattttgatatttgaataaataatggaaactttctgtattaagggcatgtatcccatcaattggaatcagtaccttaacagaaaaaggcagctcttcaatggaattaaccgtgatataaaatgtttgatataggcagtacttttataaaaaaagataagctgggaaattgctccgtgtaattttttaaataaaaagtcaa

SEQ ID NO: 63790 - DNA, 2602 bp, Homo sapiens
ggggaaactatgttcaagaaagcgaaaacaaaagctaaaaagaagccacgtaaacgttcagatagttctggaggttataacctttcagatattattcagagtccatcatctacaggattattaaagtctggtaagaccaattctgtggaatctcttccagaactgttgacatcagactctgaaggaagctatgcaggagtgggtagtcctagagatttacagtcccctgatttcacaacaggatttcattcagataagattgaggcgaaagtcaaaccgtatgttaatggtacatctcctgtgtattctagggaagatttaaaaccatgggaaaagtcaccaatacttaaaatatctgctccacagcctattcccagtaacagaattgatactaccagctctgccagttgggttgctggttctttcagtcctgtcagccctcctgttgtggatctcagaactatcatggaaatagaagaaagtagacaaaaatgtggagctacaccaaagtcacatttaggcaaaacagtttctcatggagttaaactttctcagaagcaacgaaaaatgattgcattgactaccaaggaaaacaattcaggaatgaatagcatggaaacagttttattcactccttcaaaagcccccaaaccagtgaatgcatgggcatcttctctgcattcagtttcatccaagtcattccgggatttcttactagaagaaaaaaagtctgttactagccatagttcaggcgatcatgtcaaaaaagtttcttttaaaggaattgaaaattctcaggcaccaaaaattgtcagatgctctacccatggtaccccaggaccagaaggcaaccatatttcagatttaccacttctagacagtcccaatccctggctatcttcttcagtgactgctccatccatggtagccccagtcacttttgcatctattgtagaagaagaactacaacaagaagcagctcttattagaagtcgagaaaaaccgttggctctgattcagattgaggagcatgccatacaagatttattggttttctatgaggcatttggcaaccctgaagagtttgtcattgttgaaaggacaccgcagggaccactggcagtacctatgtggaataagcatggatgctagttcactgtggagttgagatgcattttacataattatgagtttgttcatataaagaaaagctgtggaaaagagtcttagagattttgtaatatcattctaaatagattaagaaaagatataatttctttactgcagttaaatcatataatgtttgtatgattaaaaataaatttctcagaattgtgattttagtaactttatataaaatgtgtgagacaaaaacttattaaggttaaatagaattgtttcttctgaataatctaacaaaggaaaatataagtgattgaatcataagatataaggggggtaaagtattaaaaataacttttttgtttgataacttgagaatttagaagattttgccaagtatgtgttgttgcttgacttcttaaatatggcattgatgaatttaaagtaggagcatcagttattacttctgattcattaatggccagaattttgtgtttggtgtaatagttgtgtcaccattcttgttgctttttaaaaatcaggctaatcatgtggtccatgtctcttcaaagcttgacctgcacaaatgccatatttctatttggaccacatattctccattttgcattgagcagtagagtacagtggaaagggaataagaatactgattattctgaacagtttagtcccaagagaatagcgttttaaaaaagaaaaacaagatttggagtcattgtgggttatttttggtgggatggaggatcttaaaaatgcctaattgtgagagaatcaattgctgaaagtgttaaaatttctgaaaataaatgcttaattacatatacaggaattaaatagtttggaagagggttggattatcattacctttacaatactgtataatcagaagttctctgaacctcaattgtatatctagacataaaaattgttttctgtataggatgttgtttggtttgtttctgagtgtttaaattttgcaaaaacaaatgttaaatttgtgcttcagtacctagataaattggaaaggttaatgttctagtttctggaaggtaagcctgggagacacataagcaattcactgctataatttagttgatgtaaaatgacggaaactgactcaatatgtcaggtttaactctgcccaaaagcagcagacatgtaagcagatgtgcaataaaaaatgatcttgatccatttcactaatgtgtgcttgacattttttactatattgacatttattatggaaagagttaataattattttttctgatgtgctacactagtggccagtatatggttaagttgatgttgtatttattctaagacggatttaaaaaggcagttttctaaatatgaacttgtgaatttttgtatgtgtgtttgagtaaattgagaaatgaattttataaatgttctattgatgttgcagtaaagaagccttttgaagtaaaaaaaaaaaaaa

SEQ ID NO: 63791 - DNA, 2402 bp, Homo sapiens
tgggcaattaaccaagccatagccaatgaatatgaagtccggagaaagctgctaataaaacgtttggatgtcactgtacaatcctttggctggtctgacagagctaagagccagacagaaaaattagccaaggtttaccagccgaaacgttcagtcttatcccctaaaactactatttctgttgcccatcttttggctgcaaggcaggacttgtcaaagattttaaggacaagcagcggctctataagagaaaagactgcctgtgccatcaataaggtgttgatgggcagggtgcctgacagaggtggtagacccaatgaaatcgaacctccacccccagagatgccaccgtggcagaagaggcaagatggcccccagcagcaaacaggaggccgaggaggagggagaggtggctatgaacattcctcatacggaggacgaggaggtcatgaacaaggaggcgggagaggtggacgtggtggctatgaccatggtggccgagggggaggaagaggaaataagcatcaaggaggctggacagatggagggagtggtggaggaggtggctaccaagatggtggttatcgagattcaggtttccagccaggtggctatcatggtggccacagcagtggtggctatcaaggcggaggttatggtggcttccaaacatcttcttcatatacaggaagtggataccagggtggtggctaccagcaggacaatagataccaagatggcgggcaccatggtgatcgtggtggtggtcgtggtgggcgaggtggtcgtggaggccgaggtggtcgtgcaggccagggaggaggctggggaggaagagggagccagaattatcaccaagggggtcaatttgaacagcatttccagcatggaggttatcagtataatcattctggatttggacagggaagacattacactagttgaggctaccgaaccttacattttgctagagctcaagtaatagaaacttagtttcagaatcctgaattcagcacctattttgaattaatgtgagaccacaggtggcaggcagattcctgcttggcataagcatttgtaggtcttcattcaattctgttagatttttttattggacttacataatgccgtttatttgagaaacacataacatctctcctttctatgaaaaattttttaaaaggtggttaaaattgcctttaattgcccagtagactaattccacagtcagaacatgcaaacttttttgaagaaattacttgaataagtagttttcatgttttcaatatgcagttttgaaaatgaggattcacctagacttttttagatttactactaggaaaccttcctcatatgaataaccatttatatgtgttttgcttaaagtattccaatgcctattttccaagcacagttctgccccccggttgacttttatgccacgtgtgcttcatgatggaacttttaggtcagttcctattaaatgagctcttctgcagatagcacattcagtagccttattttgttgatggaatactgtatcatatgctcaactctgaaaaccttgaacacggccaaaatccataaagattataaaagcaaactaagttgtgaagctatagtacatgtaggcatttagttaagtatagcaattcaaactgacctgcatccatccaaaacaaattcctccttcaaccttatttttacttgaaatttgctagaagaaatagcaaaccgaaatttgttttatgcatgagttaataccactggctcagcaaatacaagttagtttgctttaagcaggtaactttttttgtaatggaagaaatgcactacaaagttaagacagatttttgctaagtgcaggaggccctttattattgctgcagaaaacaaaagcctggctgagttgatgttttacattctcccttactgaaatctacatgacatgatgcttcttgctgggtttttgtacatgtaaacattgtcaagctgtgaaagaaaatggctggaggtgtgctttgtgtgaaaggtgagcaataaagtatctgttaagttcaaaaaaaaaagcaaaaaccaaaactaataaattttttgggggtggggcccgggggttcccccctttaaccccccctttttaggggggggggggggggggcaccccggggggcggggtttccaaacccccccccccccctggggaaaaccccgtctttccggaaaccaaaaaaaaattacccgggggggggggcccctccctgtatccccccttttttggggggctggggcgggaaaatctttttacccagggggccccgggggttgcattgcccccaaaaaacccctttgccctctttcttgggcaaaaagagtaaacccccctctcaaaaaaaaaatttttt

SEQ ID NO: 63792 - DNA, 1418 bp, Homo sapiens
ttttttttttttacagtttaactgctttgaatagcatttttaatagcaaaaatgtgtttatactataatagcttacaaccatcttttcaaccatctttttcaatacaaaataaacatattcattttcatattttacatttctcacctctataacatatacaataaaaatcccagacattgttggctggctgattcttgcaaagagatgcataagtaaactagtcaagtacatcttaaccattttgggtgtcatttagtcagtcagtcatgaaacagtaatatggagacataattttgaaaattaagcaaatgaatctgttctctagaaatgccttttctcgagttatagtattatatttataactattaaaatttatacaaatcagtaggttttatttccacaccttcacaatcccatctctagaagcagttacgatgaagccctgtgtggtctggaatgtggcgacatcagtgatgatgtcatgatgtcccacgggcagggactctgggccccttcgaggggtgtcatcacttggtcctactttctgcttattctgaatttcctggacaacttcagtgccttcaattattttcctgtagtaggacacagatggggaactagtacttcctgcaacaacataggacctttctgggtaagccaagtcccaaaaccttattttcatatctgagccagctgttagtaggataggatttccatctgcaggactacagtagataccatggacgctatgaggagaaggctgtaattcagaaagtggtggtgcactgctggcccagagagtaaatcttctgtcaccagtctccatgtcccacatggacacttcgttgttgccctgaacagctgcaatcacccaggactgatacagagggtgcattgagaggcgtctgattcgagccctggaaggatgacagtgacttgaaattggcaactggaacctcatgtcccaacaagccatggtaccactgcttgtaccaatgcagagccagcattggtggatgtccacagcaaaggaagtgatgaggcccgactttaaatcatgctttaaagtccacgcattgcttgaagacctaaggtcccagccaaccagagagccattcacagtggcataggcaagaacagactgtgctccagagttgaagtgatgcatatccacaacacaaccgtcctccttctgatctagaattctgctttgtagaggatggattttaggagacttgggcagcttagaagcctcaattccaagaagctggacagcaccattatcagatgctatggctaaatagtgggagccttggcagaatgtgagcgtcttgactcgtcctccaattcggctgtatgtaagaatagatctggtagtggtggtcttcccctccatcttttgactgttccagatttt

SEQ ID NO: 63793 - DNA, 466 bp, Homo sapiens
aagaagggtgttgtgttacccactctatcgccatttcaagctggtgatgaaggcctacagggacactataaagatattgcaactgggtaaaagtgcagttttaaagtgtctcctggatattcacaaaatttttcaggaaaatgacccagcgtacatactgaatgatctctacatctcagactactgtgtgtggattcagaaagtcaaatccaaaaagttggcagctcttgcagaagccttaaaggaagtctcccttacaaaggcccagctggggttagaactggaagaactagaagcagcagcactgcttgtccaggaggaagaaactgcattaaaagcagcccattcagtttctgggcagcagacactttgctccagctctgaggcaagtgattcggaggactcagacagcagcgtgtcatctggaaacgaagactcaggctcagattcagaacaagatgaactc

SEQ ID NO: 63794 - DNA, 717 bp, Homo sapiens
cgacccacgcgtccgcccacgcgtccgtaccgtaggaggacttatgaattgacattggggacatcactgcgaggaaggctctcaggaaacagctgcagtgcaagaccttccggtggtacctggtcagcgtgtacccagagatgaggatgtactccgacatcattgcctatggagtgctgcagaattctctgaagactgatttgtgtcttgaccaggggccagatacagagaatgtccccatcatgtacatttgccatgggatgacgcctcagaacgtgtactacacgagcagtcagcagatccatgtgggcattctgagccccaccgtggatgatgatgacaaccgatgcctggtggacgtcaacagccggccccggctcatcgaatgcagctacgccaaagccaagaggatgaagcttcactggcagttctctcagggaggacccatccagaaccgcaagtctaagcgctgtctggagctgcaggagaatagcgacctggagttcggcttccagctggtgttgcagaagtgctcgggccagcactggagcatcaccaacgtcctgaggagcctcgcgtcctgacccaccggggccacttccggctgcctctttgctactgtgtagcacctgctgcaacgttgcctgctgtccacgtggggttgtttggagtctggggaaccaggttagtgggcccccaagaagagctttttatttc

SEQ ID NO: 63795 - DNA, 1382 bp, Homo sapiens
ggtgtctcaccactacgtctccacattcctgtccggagtgatgctgacctggcctaatggacccatttatcagaagtttcgcaaccagttcttagcattttccatttttcagagctgcgtccagttcctgcaatattattaccagaggggctgcctctaccggctgcgggccctgggggagaggaaccacctggatctcacagtggaagggttccagtcctggatgtggcggggcctcacctttctcctgcccttcctcttctgtggccatttctggcagctctacaatgccgtcacgctgtttgagctctccagccacgaggaatgcagagaatggcaggtgttcgtactggcgttcaccttcctcatcctcttcctcggcaacttcctgaccacgctcaaagtcgtgcatgccaagctccagaagaacagaggcaagacaaagcagccgtgagcctcgggctcctgtgccctcggcccggacttcagactgcagggggctcccgggctccttcccagcagccctctcaggcccgtggcatcgctgggagagggcccaggccctggtcccccagtggaccccagtggtctagaggaatgtgagccccgcctgtccgcacagtgtccgcccacctatttatgacatatttaatgctgggtccccaatcgtccctggaacccgaggcctcactcctgtgcttgaaggtggctgaggccgggccagtcttcctggggatggggcctgaagcctcagggagcccctctgttcccactcctgtcatttgaacccctctgggtggggtttggatgtgcctcgcggggttggatttatgctgacctgctacttaccaggcccaggctggggtggtgtgaaccctcagtgtcctgtggcgcccccaccccggggccactctgcttctgctgtgagccccctcctcgcccaccccgccacgtggtgagggttattttaagttctcagagacccaccgcgtctgcctcgtgctcttcttgcccctggagcgctgggggcatcctgagtcaggctgtgagaagattcgccaccagagggcgccccgggccctgggtcgtccaaggggacaaggacgttcccgtctgtgcttcggggttccctgacccccccatcctgcagcccaccttcctgcagtgtcgtggcagagcgctgagagccaccttggcggcctcccggaagacgtcctccacattctcccgaaacttggcggaacattccaggcctgtcttgaagcctgatgagcaccatggggattcccagggccaaacctgtacacctcaggaaccactgcgcgacgattgagcggtcactctgtggctatcgttccgctctctaggccgcttcgtagtgc

SEQ ID NO: 63796 - DNA, 903 bp, Homo sapiens
cggacgcgtgggattccaaactccaagaaaatcctgaaagttgcctatcaattgttcgggaaaaactctacaagggcatatcttgggtagaagtagaagctaaagtgcaaaccagaaattggatgcagtgtaaaagtaagtggacagaaattctaaccaagaggatgactaatggtcggcgtatatactatggcatgaatgccctgcgggccaaggtcagccttattgaaaggttgtatgaaataaatgtggaagatactaatgaaatagactgggaagatcttgctagtgccataggtgatgttcctccatcttacgttcaaactaaattttctaggctgaaagctgtctatgttccattttggcagaaaaagacttttccagagatcatcgactacctttatgagacgactctacctttgctgaaggaaaagttagaaaaaatgatggagaaaaaaggcactaaaatccagactcctgcagcacccaagcaagttttcccatttcgagacatcttttattatgaagacgatagtgaaggaggaggacatagaaaaagaaagcgaaggccacggcgccatgcatggttcacgcctgtaattccagtactttgggaggccaaggcgggttggatcatctgaggtcaggagttccgagaccggccttgaccaacatggtgaagacctgtcactattaaaaatgcgaaaatttagccgggtgtggtagttgcacacctggtaattttcaactacttgggaggcttgaggcaggagaattgccttgaacccaggaagttggaggtttgcagtgagcccagatcgcaccacccgcatgagagagagagattaccaatttccttgtccccttttcccagttttgattataatttatatacatatggtc

SEQ ID NO: 63797 - DNA, 2204 bp, Homo sapiens
ttttttttttttgagacggagtctcaactctgtcacccaggctggagtgcagtggcgcgatcttggctcactgcaagctccgcctcccgggttcacgccattctcctgcctcagcctcccgagtagctgggactacaggcgcctgccaccacgcccggctaattttgtttttgtatttttagtagagacggggtttcaccgtgttagccaggatggtctcgatctcctgacctcgtgatccgcccgcctcagccaataatctttctgtttaggtaaatttgaaaaatatacatcattactaccacattcatcctagttagaatctaatttatatttattccactctgtttatgatttggtaactaatttgaaaggcattatattatcaaaagtgtatcagattagctccctcaactcactatatctgttaacagttctgaagaaataggcactggctttgaatatggcctgttccagtttgtgaaccgttgtaggcaagtaaagttgttgggcacagaggtgacctgtaggatgactgaaggtaaactgtcactactgtatacaaagaagaaaaataagatgtaggaagagatctgttataataacatatgacatattctatctaagtttttcatatatttcagaattgtaaaaacaaaactatgtaattttttctaagatgtataaatgacttacttttaataataaatatttcttgatttataatgtaaatacaattaaacaaatatgggttactcgaattaaaaaaatggcacatgtaaatgagcattttagtacaaataattaaaatgtatttatattatatagaaatctacacaatggaagatactactaaaatgttgctctacagcacatcaccctagacaaaatagaattctagaattctctttaaaaaaaaaaatcactgagaattagatgatgactgtgaaataggttctcccattacaatactacttctgtcattcaaagttctgaccacggttgtagctggcgactgaagcacttttcgagaaagcctcattcttccatcggctgggtcacgtccaaagtatttcacctgaatttcttggccaacttctaatcctagggcagtaggatgtttaatctttcgttgatcaagttgtgtgttatgaagcagtaccgcagtcatatttggatataattttaccattacaccagtatctctgatttcagttattgtggcggtatatactgctccaaattctaattgctgctcctgatcatccttgcagatttcagtaatgaagtctcttgcctcatgcatagcactgggtgttggtgcaaatacagaaaacgtttcttcatccacctgactaatagttacacctgtttcagcctgaagtttttttaagttatagccaccaggtccaacaaattttgctcgttttgataatggaacctgaacagtttctacaacaggtccattttcttttctagatgctcgaggttttgaaatagttttgttcatgatctgtaatatctccttttttgccactgaagcttgttgaatagcctccatcacaatttttattggtattccaggtaatttaatatcagcctgtaatgcagttattcctttattagtgccagctattttgaagtccatgtcaccattgtaatcttcaattcccaaaatatctgtcagcaaacgataatcttctatttcacccttctcaggatcggttttggtgaccaatcctattgctacgcctgcaacagcagatgaaattggaacccctgaatccattaatgctaaacttccgccacatgcagatgccatagaagatgacccatttgactctaggacttcagatgtaactcttatggtgaaaggaaaatctctgggaataacaggatacaaagctttctcagcaagagcaccatgcccaagttctcttctatttaaaccagtgactttgccaatttcattagttgcataaggaggaaactcgtagtgcagcatgaaatttttatcttttatcccatttatagctgttataacttgatctgacttaataccagattctaatgaatcaaatgtagcggtacaaagcacctgtgtttgtcctctttgaaataatgctgatccatgaagggttttaaacatatctacctcacaacttacattcctaagtgaagcggacgcgtgggtcgacccagga

SEQ ID NO: 63798 - DNA, 971 bp, Homo sapiens
caagcatttttggaaagggttatgggggctatattgcatcaatgatcttaaaatcagatgaaaagctttttaaatgtggatccgtggttgcacctatcacagacttgaaattgtatgcctcagctttctctgaaagataccttgggatgccatctaaggaagaaagcacttaccaggcagccagggtgctacataatgttcatggcttgaaagaagaaaatatattaataattcatggaactgctgacacaaaagttcatttccaacactcagcagaattaatcaagcacctaataaaagctggagtgaattatactatgcaggtctacccagatgaaggtcataacgtatctgagaagagcaagtatcatctctacagcacaatcctcaaattcttcagtgattgtttgaaggaagaaatatctgtgctaccacaggaaccagaagaagatgaataatggaccgtatttatacagaactgaagggaatattgaggctcaatgaaacctgacaaagagactgtaatattgtagttgctccagaatgtcaagggcagcttacggagatgtcactggagcagcacgctcagagacagtgaactagcatttgaatacacaagtccaagtctactgtgttgcttaggggtgcagaacccgtttctttgtatgagagaggtcaaagggttggtttcctgggagaaattagttttgcattaaagtaggagtagtgcatgttttcttctgttatccccctgtttgttctgtaactagttgctctcattttaatttcactggccaccatcatctttgcatataatgcacaatctatcatctgtcctacagtccctgatctttcatggctgagctgcaatctaacactttactgtacctttataataagtgcaattctttcattgtctattattatgcttaagaaaatattcagttaataaaaaacagagtattttatgt

SEQ ID NO: 63799 - DNA, 1975 bp, Homo sapiens
agaaatcagctttcttcacagaagtcagtgccgtgggtacccattttaaaatccctgccactttgggctatcgtagttgcacacttttcttacaactggactttttatactttattgacattattgcctacttatatgaaggagatcctaaggttcaatgttcaagagaatgggtttttatcttcattgccttatttaggctcttggttatgtatgatcctgtctggtcaagctgctgacaatttaagggcaaaatggaatttttcaactttatgtgttcgcagaatttttagccttataggaatgattggacctgcagtattcctggtagctgctggcttcattggctgtgattattctttggccgttgctttcctaactatatcaacaacactgggaggcttttgctcttctggatttagcatcaaccatctggatattgctccttcgtatgctggtatcctcctgggcatcacaaatacatttgccactattccaggaatggttgggcccgtcattgctaaaagtctgacccctgatatggggatctcgctccatcgcccaggctggagtgcagtggcgtgatcttggttcactgcaacttccatctcccaggttcaagtgattctcctacctcagcctcctgagtatctgggattacaggcgcccgtcaccacgcccagctaattttttgtatttttagtagagatggggtttcaccatgctggccaggctggtctcgaactcctgatctcatgattcgcccacctcagccccccaaagtgctgggattacaggcatgagccaccgtgcccggccgcttcgcatttttcttttgcaggttgcatgccagccaatattcctctgtgctgggaagggaaagtttgaggatgtatcaagaccatagcagtggatctcactgctcttgcctactcagggctttatctacacattgatagcccctcagaggaaaggcaccagccgaagagtcgacactggctctgggcttggatgctgcctctgataaacgctgggcactctgaccctgaagccagggagggagtgcttggcagctgcctgggcacactcccctcagtccagttgccaggcgaaattatacagtggatggcagctccacagagatgctaaagtttgaggtctaagtgtcagagagagctgacaatttttatgaggaaagtgaacaacaacaggtgtttatcagtacctgagaattatcatctagtttaattaagcaaaggtatcaggaggtctgtttcagctcattccctttagtatggccctaaaaaatcaacagaactgtcctacttcatgttgcccgactagcaggcaggtatgtgaacctaaagtagaagtcctagcttacatattattcataattaaacacagttcattttattattctggcaactagtgatatttcatgattataggccttaaaaatctaatacaagtacaattaaaaaaagacatagaatgcttacacaatacagaaggcactttgaggttacatgataaataaaaatacattaatagaggcaggattatttattggttccttcagtgtctgtgtccatggtgatcattgagagcccagttttgtacttcacctttggcgaaatagtgttaaagaaaatggcaccaaaaacattaatagcagcagcaatatagaacacggtttgccattctccaacagtgttatcaggggtcagacttttagcaatgacgggcccaaccattcctggaatagtggcaaatgtatttgtgatgcccaggaggataccagcatacgaaggagcaatatccagatggttgatgctaaatccagaagagcaaaagcctcccagtgttgttgatatagttaggaaagcaacggccaaagaataatcacagccaatgaagccagcagctaccaggaatactgcaggtccaatcattcctataaggctaaaaattc

SEQ ID NO: 63800 - DNA, 1919 bp, Homo sapiens
ttttttttttttaaaatatgaaccattttattgaagaacagttatacagtgtagctacagatactgactagatactaaatatttctgcctgatttttcattgtcttcacaagttagggaatagaaatcaaaaaaccaaaaatctcaaatgatttagctgtccagaacatatttgacaggtggataaatttataacagctctgacatataaatttctaattagagaatcctttcattttgaaaaaattgagatgatattaccctaatgaagtttttacctgaagttaacaaagtcctggatttgatatattactttgaatgcattaattctgaaaatttatatttagttctactttataacatttcttctcttaaggatgggatatgaggtacacatgagctggtttctacagtatgaatgtatgtacatatataaagtatggttgtaaaggagtgggtgatttgcaaataaagcacattatacacaaaatataaataacttcccttttaaaagttactgagaataaagaatatagaacatggttataggcacttacattgctatcaaatgcaggaattcacttcaataagaagtgctttctttgtaagcatggttcatggcaatagaagctccaactttggagaggatgctttccgtgacaaaaataataaccacaaaaaaaatggtggttgaaggaaaacagtccaaatttacagatgctttaaacttcttttggccttggcatcagctttcatgttaaaaaataaagctggtggggaagctatctcacttgcaaagtaaatggcttgtatgagattggcgaatcttggtcagatattgcatttttaaagcacaaaaccaccggccaccaatatcttcctgtgcatgcatataaattattttcttctaattcaaatggcagcagaggaatcccggcgtgcatgtgcatggagacacacacacatcactaaggacacaggacaaactatcataaaataagcagtatcccaaacacatcatcatctataggctgttttacaaaggtagaatacaaacgaactgaatgtctcaggtaaaaggcaaagtctatttctccatctctgctgcgctcatttatcttcttaaggctttcaacagaaagcaccgttttatgaaacaggcaattcagtacccagagcttgactggagacactaatcaggattgaagtcttgatgcagttcataaaaacccacttaaaaaaaggcatcaaaaaccacatttaaaataaagctgtccatatataaagaatgaagtgtttagaagttcccagcttgtatcctaataagagtactgaaaggtttaatattagcagcctgtgaacacgtagtgaagaaagagtctgagaaccaagttaacatccttattccactctaattccacccatgccatgggtaaaaacagttcttgcagtctagagtttctcctccgatggtttaaccatcagatttttacatcttgggattcaaccatcttggcaagcgtcttcttaattctcaatgctgtgagtctggaggctggattgtgggcccagcattctgacattagcttcaaaactgctcgtagacattcatcactgttccaccgattagacacaattggccgcaaacgtttgacacacacaacctcacgcatatcttcgtatgacggatcactcggtaccatgttgtaatatggcaattggtattcttccccgatccctataagggaatgagaaaacatgggcacaaaaatggttgctggacaagatataccaatctagtaagcatcttttgctaaactatggaactaaaacggattcttacacaagaaaaaatatagaccctatgattccctcttaatagtagaagtatgtttttctcttatttatgtccaactattt

SEQ ID NO: 63801 - DNA, 716 bp, Homo sapiens
actgatagccctcgaaaccgttgaggaccctccgggacgacccacgcgtccgcacacagtgggcatccaggatctccccgaggtagcctgagccgccaccccagctcccagctggcaggtcctggggtggaggggggtgaaggcacccagaaacctcgggactacatcatccttgccatcctgtcctgcttctgccccatgtggcctgtcaacatcgtggccttcgcttatgctgtcatgtcccggaacagcctgcagcagggggacgtggacggggcccagcgtctgggccgggtagccaagctcttaagcatcgtggcgctggtggggggagtcctcatcatcatcgcctcctgcgtcatcaacttaggcgtgtataagtgaggggctctgccccgcatcccaagacttttcttcctgttgggagctgccttgggcccattccctcccctggggggagcccaactgatggccctggccccacccctaaggaccaagggagcctgagcggccttgtttacagcttctgtcctgctcctgcatctttgccagggtccttttgccaactgtaagggccttgcctcattccctggcaatggttccaacctccctgcactaatgcctgcatcccctccggcctcttggccccctatccctgcacttctgggaaacctccctggcactctgggaaacctccctggaacaacttcccaaat

SEQ ID NO: 63802 - DNA, 1411 bp, Homo sapiens
ttttttttttttagtgtaaacattcacatatttaatagtacctttaaaataagcattactacatttaaaatggttccaaaatgaatctataaatggtaatataaattaaaaaatacgaacttaaagtgaataaatttttaaccttagctatggtataaataatggtaaatgtatagtgtacctttgagtcattaaaatgtcttaaaagataacagcttgttaccagaacattagaaaccatagccatgattctcaagcgttaacaatctacatttgatattttcttggccactgcattcttcaatgaataataatttccagaattccattccatgttgttttccaatagatcttttcacactcgatgttgaatacatggctctttgcagatgaataaaacaagtgcattcagtttagagatccattttgcgaaggctcattcgactgaaggaatctctgtggcaggtgacaggcaatactgccttgtataactgagggatctttctgttgatcagtggctgtagggcctctttaaggcgatgatagtttctctccagttccctttgatactccttttgatccggcccaattaagctcttattttttcttaaggcatcttcacaccttttagtaaaatctttaaagcagagtcgcagtttattatgatgtctgaagagctttgggtcactaggtatttcagacagaaaaacctgggcaacttccaaaggcccctgattcactgtggtgcctacagatccctggagtaccatctgaagcattttggggtctgcgggatcctgatgtgttgcaaatgccaactcctgtgtctttttctgcatgtcctcaatagcaacttcaattggtgttaagatgatctcttctttatgagtgacattgacccttgttttaatataaggaaaggcatgagacgtagtcagaatggtcttccttttgaattgttcatgaagttccccatgggcacggccatctaaagtaaagggtgtacagtacatgaatcgacgaagattgtaatttttgtcgaaataggtgattctgtccttcatctcatatgtgtcaaagtatggctccacataggtaatctgaatatatgccttgttaggatctaatttacacttgtctacaggattagagtctttgattacttcaaccacatcctctccaaatctttctccgtaaaatccctccaatctgtgagatatctctgcaagtttggttattgcaggctccttgtaaacaaattcttgttcatccaaatccccgaacttggttccataaaaaccaacacgaaaataggtgccaaacatccgctcccagccagtactctgatgaacaattttgctgaatgcttcttgaagtttaccatgaattgtggatagtttctttgatcccg

SEQ ID NO: 63803 - DNA, 1870 bp, Homo sapiens
cggataaggacaaaaaacgccagaagaaaagaggcattttccccaaagtagcaacaaatatcatgagagcatggctcttccagcatctcacacatccgtacccttccgaagagcagaagaaacagttagcgcaagacacaggacttacaattctccaagtaaacaactggtttattaatgccagaagaataatagtacagcccatgattgaccagtcaaatcgagcagtgagccaaggagcagcatatagtccagagggtcagcccatggggagctttgtgttggatggtcagcaacacatggggatccggcctgcaggacctatgagtggaatgggcatgaatatgggcatggatgggcaatggcactacatgtaaccttcatcatgtaaagcaatcgcaaagcaagggggaagtttgcagagcatgccaggggactacgtttctcagggtggtcctatgggaatgagtatggcacagccaagttacactcctccccagatgaccccacaccctactcaattaagacatggacccccaatgcattcatatttgccaagccatccccaccacccagccatgatgatgcacggaggaccccctacccaccctggaatgactatgtcagcacagagccccacaatgttaaattctgtagatcccaatgttggcggacaggttatggacattcatgcccaatagtataagggaactcaagggaaaaggaaacacacgcaaaaactattttaagactttctgaactttgaccagatgttgacacttaatatgaaattccagacagctgtgattattttttacttttgtcatttttcatcaagcaacagaggaccaatgcaacaagaacacaaatgtgaaatcatgggctgactgagacaattctgtccatgtaaagatcctctggaaaaagactccgagagttataactactgtagtataaatataggaactaagttaaacttgtacatttctgttgatcacgccgttatgttgcctcaaatagttttagaagagaaaaaaaaatatatccttgttttccacactatgtgtgttgttcccaaaagaatgactgttttggttcatcagtgaattcaccatccaggagagactgtggtatatattttaaacctgttgggccaatgagaaaagaaccacactggagatcatgatgaacttttggctgaacctcatcactcgaactccagcttcaagaatgtgttttcatgcccggcctttgttccccccataaatgtggcctttagtttcaaacagatcctttatagttccgtgcttccataagccaattcttattattatttttgggggactcttcttcaaagagcttgccaatgaagatttaaagacagagcaggagcttcttccaggagttctgagccttggttgtggacaaaacaatcttaagttgggcagctttcctcaacacaaaaaaaagttattaatggtcattgaaccataactaggactttatcagaaactcaaagcttggggggataaaaaggagcaaagagaatactgtaacaaagttcgtaccagagttcggtctattaattgtttcatgttagatattcctatgtgtttaccctcaattgaaaaaaaaaagaatgtttttgcctagtatcagatctgcctgtggaattggtattgtatgtcccatgaattcttcttttctcagcaacgtgttcctcactagaagaaaatgctgttacctttaagctttgtcaaatttacattaaaatacttgtatgaggactgtgacgttatgttaaaaaaaaaaaggtgttaagtcacaaaaagcggtaataaatatttcatttttgatttttaaaaaaaaa

SEQ ID NO: 63804 - DNA, 3086 bp, Homo sapiens
atggaaaaaattctccaaatggctgaaggtattgatattggggagatgccttcatatgatctggtgctgtccaaaccttccaaaggtcaaaaacgccacctctcaacatgtgatggtcaaaatcctcctaaaaagcaagccggttccaaattccatgcgagacctcgttttgagcctgtacattttgtagctagtagttcaaaagatgaaggacaggaagatccttatggccctcaaacaaaagaggtaaatgaacaaacacattttgccagcatgccaagagacatctaccaagattatactcaagactctttcagtatacaagatgggaattctcagtattgtgattcatcaggattcattctcacaaaagaccagcctgtaacagccaacatgtattttgacagtgggaaccctgccccaagcaccacatcacagcaggcaaactctcagtcaactcctgagccttcaccatcacagacatttcccgagtctgtggtagccgagaagcagtattttattgaaaaattaacggcgacaatctggaagaacctttctaatccagaaatgacttctggatctgataaaattaattatacatatatgttaactcgttgtattcaggcgtgtaagacaaatcctgagtatatatatgctcctttaaaggaaattcctcctgccgacatccccaaaaataaaaaacttctaactgatggctatgcttgtgaagttagatgccaaaatatctacttaactacaggttatgctggcagcaagaatgggtccagggatcgagctacagagctagctgtaaaactcttgcagaaacgtattgaagttagagttgtccggcggaaattcaagcatacatttggagaggacctcgtggtgtgtcagattggcatgtcctcctatgaatttcctccagctctgaagccaccagaagacctggtggtgctgggtaaagatgcttccgggcagccaatttttaatgcttctgccaaacactggaccaattttgtcattacagaaaatgcaaatgatgcaattggtatccttaacaattctgcctcattcaacaagatgtcaattgaatacaaatatgagatgatgccaaatcgcacatggcgttcgtcgagtgtttttacaagatcactgcttagctgaaggttatggaaccaagaaaacaagtaaacatgcagctgccgacgaggctttgaaaattcttcaaaaaacacagcccacttatccatctgtcaaaagttcacaatgccatacaggctcttcacccagaggatctggaaagaagaaagatataaaggatcttgtagtttatgagaattcttcaaatcccgtgtgcacgctgaacgacacagctcagtttaaccgaatgacagttgagtatgtctatgaaaggatgacaggcctccgctggaaatgcaaagtgattctagagagtgaagtaattgcagaagcagttggggtgaagaaaactgtcaaatatgaagctgctggggaagctgtgaaaaccctcaaaaagacccagccaactgtcattaacaacttgaagaaaggagctgttgaagatgtgatttcaagaaatgaaattcagggccgctcagcagaggaggcttacaaacagcaaatcaaagaagataatattggaaatcagctgctgagaaagatgggttggactggtggtggtttaggtaaatctggtgagggcatacgggagcctatctcagtgaaagagcagcataagcgggaagggcttggtctggatgtagagagggtgaataaaattgccaagagagatattgaacagatcatcagaaactacgcccgctccgagagccacacagatttgactttctctagagagctgactaatgatgaacggaagcaaatacatcagattgcccagaagtatggtcttaagagtaagtctcatggggtgggccatgataggtacctagtggtaggtagaaaaagacggaaggaagacctactagatcagctcaaacaggaaggccaagtgggccattacgagcttgttatgcctcaagcaaattgagatcttactaatttattttgtaaatgcctaatgaggcagatttttgaattaaagaaatgctacatgttccggttgcagagtatattcataagatgtctcaccttgttcatttcacatagtggtttattagatattggaacctaaagaattctgtccacttgtattagcttaatccagcagatgatattgtgcagttactgtttgtgtctttgatattgctgtgtccctcagattttagtagtttgacaagcaagaacacatatccaaatggaattttaccctgagaaattatcattttaaagggcatagcacagcaatctgcaacaatatgtaaagttgatattgactacaataaaaatccagtcttaattccagatttactgaaaatgtcagatcattttgtattaatctattttcatctttgtgtgaagccagttatagaatgtttgacaataaattgtgctgtacacgtaaatgtccttaccaactaaatgatgtaaaactttcttaaagtaattttagtgtttatttatttataacttctaccatgtgatttccagactattggaagtgatttactgtatcttgtgatatatgggttttaacaaattctagtcttcacgctgagagagcacctacttgagagagcagttgaaagtttccaaaaactttggttcaatctgaagaaaggaagcttgaactgtttgttcttggtgccttgcagagagactcacagcaactctccattatagctttcacaccggtttggatgtgcagcacatccaaggcaaccacagctgtggtagagcttggtaaaagactgaagatacattggtgctttgatgaaaaggtcagttggctggtccctctctcaaaaagcttattaagcctgaaaagccaactttgtaacatatttaaaactgctattttcgcttatttctggaatgtaaaaaaaaaaaaatgtataaaaagaattagtgtttgcttcctgaataaaaaggagccaaagttg

SEQ ID NO: 63805 - DNA, 549 bp, Homo sapiens
aaaccttagaaaaataagtaattcttttatttctacttcaaaatataccatgtacatctggaactctaagggggaaagtaaccaggagaatagtccatcaaaaaaataagataaataataattgcccatttcagatccatctttaatccagctgaaaagggtatgagctgccagttgtcttgctgtcaggggccacccctctgtcagtggccttgcggctgcctcccaaggactctgagtctaagagttcctggagcgtcttgaggacgtgctttggctggctggcggcaaagtccagcaggcgggagcccatgtgctcctggaggctcctggacagccggcacaccaccccgcggatgttcccgctgggtccaggcagggtgccattcctggtggcggtgttcaggaagtgccagaggatgggaaggacatgccgctcaacagcttgaggcttccgggggtaaactgaggccaccagcactgccaggcgatttgtgacatccagcaccgcacggccactcaggaaacgcactcgcccagcaagcgctg

SEQ ID NO: 63806 - DNA, 2431 bp, Homo sapiens
gacagtctcaaaaatgaggcattttcttccctaatattcaggtcatgtaaatataaaaatgatgcctcaggctttccctctcccctacccctgccttccagtgaaatgggggttattggaagctgcttcctctttattttttaaatgtatttttacatttttagagatagggcctcactccattgcccaggctggagtgcagtggcgtgatcatggcttactgcagcctcaaattcctgggttcgagcgaccctcccacctcagcctcctgagtagctgggactacagctgtgttctactatgcctggctaattatgtagaaatagggtctccccatcttgcccagcctggtcttggactcctgggctcgagcgatcctcctggctcagcctccaaaagtgctgggattacaggtgtgagccattgcgtccgactatgcttgattgtccaaggatctgatttctaggatttgtggggccagtctctctccattgcctccgtcctgctgtctcttgcttctacagggatctggacaactctcctctgtccccaccttcaccaaggaccaaaagcagaacgcatactcgggcactcaagaagttaagtgaggtgaacaagcgcctccaggatctccgttcctgtctgagccccaagccacctcagggtcaagagcaacagggccaagaggatgaagtggtcttggtggaagggcccaccctcccagagaccccccgactcttcccactcaaaatccgttgccgggctgacctggtcagattgcccctcaggatgtcggagcccctgcagagtgtggtggaccacatggccacccaccttggggtgtccccaagcaggatccttttgctttttggagagacagagctatcacctactgccactcccaggaccctaaagctcggagtggctgacatcattgactgtgtggtactaacaagttctccagaggccacagagacgtcccaacagctccagctccgggtgcagggaaaggagaaacaccagacactggaagtctcactgtctcgagattcccctctaaagaccctcatgtcccactatgaggaggccatgggactgtcgggacggaagctctccttcttctttgatgggacaaagctttcaggcagggagctgccagctgacctgggcatggaatctggggacctcattgaggtctggggctgacaccccactccctgtttgacggcccagcctggacttggggagaatgactttcccttttttgccccataagggctagcataagctgaggtagaacttatctttaagctgcagcaaaatcaaggagtgacttttgtcccctctcctgttgaccctggtttagagccgttaaccacttggtgagttatgtgggtgttgttgccctgggtggcctgtggctccgtccacaagtcatgctgagttttgcagcctctgtgacttggagatgtcccttcacccctcccctttcaccaccatcctcttttcctcatggaaatgtctgctttatgaaactatgcacatattgaaagtgagttgaaacaaatgagggttgggtaggagcttccaggcctgggatttacaccacgcctagcccagcagaggccttagtcccatttggggcttgggagtgacatttgcttgaggcttatacactggtgtggttgcctggcttgcaggaaatgaccaagctcacacatgctggctgaagcgtaagcagacaactgaggtactcttttgaaggatgaaggtggtggattctcagccctgggggtcttcctcacctgaggacccttcagagccaccctttctagtttgcatttcctggtgcacacatttaaggcataacagcacattcatccctttggtttgggatctcaggaatacagtcccatgcaaagattctctggttttatggcttttttccctttctttacaccatcctctcccataagcacccatgtctttgaatatgaatgtatttgtaaaataccacgtttcatgtgtgaatatgtgcttttactgtacatagtgctattgtgcaataggtcttatgctgttttcactcaatgtgtgctaagatctagccccattgactcttctagaaatgcagtattgctttgacctgccatgtggcactccacaatgtcaattgcagtttacacacattgcctaaagtgggggacacctgggtgcccctgaccccttggcaccggatacaggccacgataaacatcctttcgtgtgttcccttctgtgcttgtgtggcatgtgtacccaggatgggcctataggtcacagaggtcagtttctctttggttttccagattttctttagaacggtgactgaccctcctacttgaggccgcccttttctccttatccttgccagcacttgtattgccagact

SEQ ID NO: 63807 - DNA, 2447 bp, Homo sapiens
ggaagagattgacagagagtttcataataaacttaaattaaaagaagataaacttgagaaacaggagaagcctgtaaatggtgaagataaaggagactcaggagttgatacccaaaacagtgaaggaaatgccgatgaagaagatccacttggacctaattgctattatgacaaaactaaatccttctttgataatatttcttgtgatgacaatagagaacggagaccaacctgggctgaagaaagaagattaaatgctgaaacatttggaatcccacttcgtccaaaccgtggccgtgggggatacagaggcagaggaggtcttggtttccgtggtggcagagggcgtggtggtggcagaggtggtaccttcactgcccctcgaggatttcgcggtggattcagaggaggtcgtgggggccgggagtttgcggattttgaatataggaaaaccacagcttttggaccctaaaaggtctggattgatcgtactgctttctgaaagaaagacaacaaagttgctgcatagtctacaaacaagtctctgaaaataggtgaatttctagctcttcatggtcctgaacattgatttcagtctttgcaaagaatgaagaagtgaattcgctgtacatttgtcaccagcactgggtttttgttttttgtttgtttttccgcttaatttcaaagataaaatgcagttacttttgggggtggaaggctcatcttaaaacatgagcattaaatatatttggaatagcagaaggttaagtaatttcttatgtatagttaaactaaagcagtacttcagtgggacttaacaagtatttttttcatcactgaaaggttttttttttttatcactaaattgtatttggcaattgcaagttgcctgcaaatagggccgtgataactgtgttttgagcccacagaagggttgtgtgtgtgtgtgtgtgtgtgtgtgtgtgtgtgtgtgtgtgtgtgtgtgtgtgtgtgtgtctttttcctcctttcttttggggaatccctgtaatatgaggtagcttatttcgtcaattaattagggtgctggatggtagagaattttgtcagtcaactatgtacacacagtaaatactgtttcttaggcaaaggtaacttttttatatagttgtaaaattccattatattccattgccaaagaaacattaagaactttgtatagctgtataaaaagcaactaattttttaaagaataaacattttaaagtcagcaaacatactgtgtccttgcagaagttgatgtgctgagcagcagccttatgggtgggtctttttttcttagttttccaggcttaacatttttgattttgttttttaatgtttggaacataaatgaagatttgatacattatttcattatctaaaaaggattaattattcatgctcattgtaagaacttcattttgtagcaaatggcatatcacaggatctgtccagataatcgatattttcagtatacaaatgtaaataatcacagatgagaatgtacttagctgtattttcaaataagtaatcttccccccttttgtaggactttaaaactaggcatcaatgaacctgtttttcctattatgcctggaatttagtcatgataccttgactcattccatcatatttcaagaggattcagagtgctagaaattattttggtagcctgtaacacacggcaacactggtccttgggcctatgatgacccacagatgactcagtatagagttcattgctaattataaattactagtgaatctttttgatattttaagctctagtgggaaaaatctggccacttttgtgtttttatgaaggccatggaataaaaggatccaaagatttaaatatttttatctaatattttgattgttttcttaactttcctccttaaaaccattcagtagtgataaagatatagaaactgcactgtagggagaattgggaatatttaaggctggttgacattttttattttcattttatatcttttgtatagctctacaaaggcagtgttttgtaatttggtttcattatgaagatccagtacttggcagccatagtttagacaatattgttcagtgctgtttgcttgcatgttaacaacaaaaccttttagaggacccacaaatcatgatattgaacacagttccgaggcattcagagcatcagagcaaagtaccatgccaatacatgtgtagactgttggagatgtcccgggccaatttcaagaaagaaaactgtaaatactagttctacttgctctgaaattatgagtttatgcgttttcccagccctccgaatcactgactggggcgttttgtgccccagcaataactggcagcatggcatacctgcagtaccccttacaatattaaagcaaagtttttattctaaaacagaataaaactgttcaata

SEQ ID NO: 63808 - DNA, 1785 bp, Homo sapiens
  misc_feature (1)...(1785): n = a,t,c or g
ttttttttttttttgacattttttgctttattaaacatcattcactgaaaatttccaaagcactgtgtggttgcctagacctgtgtaccagcgctctgggggtcgggagaagtctaaggcacgggccctgccctggcgcacggctccttctcccttgggaaggcagctccactggtgaaaggccactgaccaagtccagaccctgaggacgacgaaggcctcggggcagaagcctgagagaatcatgccccactggcagtgggagggcggtgcaggctgggagccctgcccaggccccaggctgagctgtggggaaagctatgacccagtttgctgagagctgcaatgacgaacattggctctgtgcccagaggcccaagaaggccatggactgggctggcctttcctgggaaagggggaaggaggaagaactggggcctagcagggccgtctataccctggagaggcagggcctgacttctccctttagagcttgcatcaagaggaggctcaggagagagagacttgcatcagaacactccagacagccgatctcccactcagtattcctctcctgggagacccacccagaccctgcaggcccctggcagccacgaggagcagagaccctggagtaatttggcttggggacgtccccaccccaggcccaggccagtcagtcacccaggctacagcttagggtaggggaaggggaggatcccggtcactccttcttactatgcgaacagaggcagaggagggatagaggcccagccccagtttgggtctgtgctggggctggcagaacccgtgggcatgaagcttccctgccccatgtgacacctcgctacggccccacatgtcttgcttcatccttggggctgggcatctagttggcaaggcatccccacaccctccctccccttcatgtccacggggaataagacacattgggctctggctcctagggtgagagccgctcccgcagcccgcaggcttctactttggccccacagccccggagaaaatggaaccatgcagttctgggtgctgtgacccaggcttctgcctggcctcccctgggggtggggaggttctgaccttgcagggcccagtcccttcccttcacaccgatgtccccacagacaggcctgctgggccaggggccagcatggaagggtcagaagaggctggggtcggcctgggctggtgtatcgtggtcctggatgtactgcaagatgtccatctcgtccatggcttggatctgctcctgcggcttntgctgcccagccacagcttcagccgggcccgctttggggggaacagctggttttctgggtatcaccggcttagctgccactggtggcttgggcttaagctggggcttgggtttgggctcagctcccaggttcagaatctggtccaagtcctcttcaactctgaacagttccttggaggcgtccctgtggctgaggctgggtgtgggccctccactctcacaggcggccggcagcaggagggagtcacccagggggatggccccgccgaggtcaggatcatcaaatagcttcagggggtccacggatgacacgtcctccgaggggtcctgtggagacagcttcctgcccgggccaaagagcccttcatcagggtccacctcctcgtcaaagatggtgagccggggcgagggcttggctttcacggccactttgggatgtttcttcggacgcgtggtcgaccggganttcggncgggtntcgcagactctaanaggttcaaggcgcg

SEQ ID NO: 63809 - DNA, 2186 bp, Homo sapiens
ttttttttttttaataaactagcagctttattgcccttcaggggccatgtcttcacttgagatgtcgaattgcttgagggaggaaaacctgtaagaaatgatggagatcagggaacaggccttggggatcctggagcggggtcacagtgagcattcggtcagccggggagacagacgccacaaagctcagcaggggctcagtttctggcctctcttcgccaccactcagtcctttcagctcctgggtgacctgagcctcagtcgccagccaccctgctcttgtgccagcgccacctccagctccctccttggtttgctgctgcaagcgtctacgggctcgccgccgcccttgccacactcggtgccacaaggcacagcgccagctcgctgaggagggcagggatgcccccttccctgcctcaccctgagaccattcttgggctgcctcatgtcccttgggcccccgctctgccagggctgcgtggctgggctgcccctcttctccaggggctccatgctttccagtggtcaggggcaggtcccctggctgcccagggctctgcatggcccagtcctgcaccatctctccaacctctataaccatctcttctaccctgtcttccccaccgtcccctgcacatccctgctgctcctctttcccctcctcacagcagtttttctgtccatctactttgagtcttttgcttgtccctccctgagaggactccccagttccacctccttctgaccgcgttctcttggttgcctgttctatatggcaccccagtgcttccctgaatacctgcaccagggcagcagtgagctgggtgaagggtgcaaggggtaaagggatcggcgtagcagagagcagggagctgggggagctgggctgcagaagagggagcagcccccagtcccgaccccgggaggaacggcgctggtactggaggcttcggcagtaattggctgctgctcggcagcagttctgtaggcgcccagccacccggctggtcacattggctgcgacattgtgactcaggtcaaaagggtcctggagattcagggggccaaggcgcagaccctcccagagattagaaggcaggccccctgccacaggcagtgcctgaccctcccgcagggacagcagggagccacgaagatcccaacaagatacacaggagaagaactgggctagcagggaactgaggggctccacatttatgctgggctccagtcttgaggcatccctggggaaactgcagtcccagccatcgacttccacctgttccccctctcctgctttctgggtgagctgggacacagtgggcaacacaggagggtccctggtctgaagaaaatagatcaccagcaaggtcagggcgtagttactgagaagggggccactccctgacagcccccgaccctgagcccagcagcggagggtgtacacgaggggccggactcgaccatccagctcagagcagagactcaggaaacgggagttatgcagggccagccggttactgagggagacatcaccgtggagacctgaaggccgatgacagaacttgaccacagggcgccgggcagagggcacagtttggactcgatacaccccagggacacagccccggagaatggatcccaccagctccagcattgctgccccctctgctttctcctcctttggggtctctgctagttccgaggccttccccaggtccccctcttccctgtcctctagcagtggtgaagctggaggcagagactggggagaagcaagggtctcggaggccaaggcagagtccggagtttggggcgccagggaggaggaaggggtttcaaagtccagggcttcagaatcctggggagaagcaggaggttgtgaatctggaggggaagctggggtgcaggccagggcttgagggtccagtggggaagccagggccgagtccagcgatggagattctggagcctttgggactggctgtggacagaaatgaactgagtgaaatgtttctgctgttccctaagcagggatctctcaagataatattacttccagcttattcagctctattctaaggtctttatacatattaactcatttaatcttcacaggaaccctttttttttttaaagataaccttttaattctataaaataaaaggtctacctctgcaaaa

SEQ ID NO: 63810 - DNA, 5286 bp, Homo sapiens
ttttttttttttgccatgtcagaagggctttatttctacttcatcacggtctcatacagacccagaggcatcatcatgtgtttccatttggtatccttgtgactttttgtagtgttttcccttaagaagggctttgagtaaactctgtacattgccagttaatcttttcacaataatttaaaaatgggtgttgctgttgggatcatcgatgcaaagaagaccaacataaaaagttcagtacaagggaaatttcacaacatattacagtggaacagactgaggtcacatttagggtgatgggcgagggacacagtaggcgggtatatacatggcacccgaaggacgtgcaagccaagtaggataatataaggatcatacagtggaattttcttaagcccactgaggactttggtacccttttcaaaatcatcctggtatccccctccaggcatacagaatatctggtcttgtctactggcttcatggctttttcactacaaaaagttcactgaatcagacagtctgaagcattaaaaaattcataaaaaacagtaacactgacaaaataaaattaacttaatccactctaattcaacatggaaataaactgaaccaaaatgtaacagtgcaaatttaacagaggcagtcaggtattgacagcgagggtgttcagaatctcttaaaatgtacattttttaaaacttttattttttaaatctatttataccttatttacgttttcgtttaatatactgtgtgtaaaaaagatggagacaaaaatagttttctgagctatgaaaaaaattaagttattacaggcacatttactgtttcattctagaaacatctcagtttcacaggttgaacattcagcagctttgtgtttttaaaaaacattctttgaccttgagaaaactagatctctcctgttgggcagagttttgttcatggtgatggtgtggttatgcaaattacagtgaattatactgtgataatccatgcaagcttgcatctcggtgtggctgctcctcgggcggctcctcgccaccatgctcctccaaggacgtcgggtctccgggtgactgaggctgtgaggcagtgggggaatgtggggcccaacgggacggagggcgacggtttgctggtctctcgggcctggagaagcagggctctagggatggagctagtgcagaacaaggtagttcagcgtgaggcaggcagggctagagtccccagggggcagttagcaagacagtttggttctccatgggccctggctcggctgtgtcccccagcgagtggctgtcactgtggagacccgggggcccgtgggcagcctgcctcctctcctcctttaaggcatgttccagcagcttcttgttgaggatccgggccacgttctcagtgagggtgtagccagggggagcagataagtcctgcttcactggcgtgccctctcccccttcctccctgcacatctctgaccccaccccaatggggctaggcgaccttcctcgggaattggtgcctgtttcctggcctgggcccagctctggtcggggctctgctgagcgagaccgactgccggcccgcagccccttctggaaggggtcctgcaccacggggctgtggtcaatgatgttgaagaggctggagaggccatcattaatggtggtgtgcacggggctctcccttgtggtggtggagcgggcccaggctgactcactgtaccctttctgggccatccctggtgacgtcctgttatttggctggtcggctttggggaggggcttcctctgcagcttgggagaaccatacttgggggagcagcatgtgcgttcaaacttggcctgcaccttctcgatggcaggggccacctgtctgctcctaaggctccgggaaggagacgacacgggtgtagcaccgcccccagcctttggagtgagacacttgtgggggctgctggtgacaccgctgccacgcagggcttcagtctgcaagcccacactgatggtctgaacagtctgggtccccatcgtccgggacccattggtctggcaggccatgtccttgacttgcagctcgccagggccggagcagatggcattcctgacagagaaggccacctccttcatgtcatcactcaagttcttggacatctccaggctgtgcagtggggaggcaaaccccagggaggtacagaggggactatcaagggggcgccgtgccccctccacatagtcccgggagtgcctgggggaggtgcaaggccacctgctgagcatgggttctggagggccccccttggtgtctcccgggctccctctggctctgcttgtgggaaagggaccctcaccacctgccgccgtgatgctgtcgaccctgcgcacggcaggcgggctgtgtaacacgcgcaaccccgactgctcggtgaggacgtggctccgcagtggctgcttctggcagtgctctgggctggtcatggtgtccgtggtcatggtgacacttgtggttaggtaccaggaggagtcggggaaaggctctgtgctgtcctcgtgccctgcccgccccacctcggtcctgtcggcccaaaggtccggccccccaccattgtggcccctgttgggtgtgtagtcccagctcttgttgaactcctcgatgtacttgaggtcgtctggagacaggggtggggtgacatcctccttgctgctggtggacggcaggcccttctcaggcaggaagggggagatgtccattagacgctggaactcagacatggaggacacggacaccgccctttgaagatttcctttgtgattttcttcttcctcagggaggcggttcctgaactccctctcgggcctgtgggctggtggctcttctggctcgtcatccagggacaaggcatccaggtagagattctcactggccgagcacctgtccgactccttcagcttggacagcggccggtcttcaaacgggatggagtcagcatctgcacaaggccacatggccactggacggggcatgcggaggcttccctggtggggaaaggggcgaacgttgccgtctttttgatcacagaggaaactgccacctctccggggactgttctctttctgcaactgctctatcctccacaagaattccttcttctgccgctcccactcctgccgatctctgtccaggcggtcgagaagttccaccttctcccggttccagttcttctcgctgtgatggatctgccagcgcaggtccatgaccaggctgtgactgtctgccaggagcttctggtgcacctctctctccttcttcaaggcccccttgctctcagcggaggagcctagttctcccaacttgttctcagtcttctcttccagctgttccagacggcacttgagcacggcccactccacgtcccaggccgccttgtcgctggcatattgctgctgcagccgtagtcgggcacgctcatcctcccgcagctccgcacggaagtcctccagcaaggccttgaaggcgctgaacagctgctggttttccaccacctgtttgtggggctgtcccctgtccgcggtctgcagccgcaagctgtgatctccaatctgcacccgggagtgtggggagtgctcccccactggaaagccacagcctcggtcactgtcgtggtctgggccatccgcctggtgacccccctggactccaagctccccgagcctggagagggtctctggatgttcaccctcagtgaactcctctccttcctcctccatctgcttcccttgccgccagtgtttcagcagccacctgagtttgacgtagaagaggaaaatgttctgcttcaaggaccggagctcctgctgcatcagattcttctcatcactccaggttcgctcatggagggtgttttgcaaagccaggctgtgcatttccagttctttccacctcaaggcatagaggtgctcctcctccatctccaggctgaagcaggtctggcctcccagcccgtggctcccggtgtccccgtctgcgcggcggtgcagctcccgcgcggctcggaggcgcaggctctcccgctcgtcccctcgggccggcccgagctgccactccagctgctctttcagtctggactgcaagtctgggcccagctccttccccaggttcccgatgggggagtcccgggacacggaagtcacagtggagaggaagctagaggactctgtgaggtggggcaagggggataggccatccccaatgcggttcacctgctccaggaaggcctgcagctctttcttgaaagccttcatcttggcgttgatggtccccagcagctggggctcctgctggtccccctcaccctgctcctcttcgccctggaggccaggccccggtaagggcgcaccaccccgcagccccgcatcatggaggaagctgtcggtgtccgtgatgaggcgctccaccgtccgctctagccgctgggcctcgtgttttagggtcactaggtactcagagtcctcccgggccttcaggagctccgtggggcatggctcgctggcctccgatggcttcccgctcccgaagcccgacgtcttctcaaacatctcctccgagtcactctccccgccaacaggcccttcccgcttgggctggggcaggcggctctcctccccatcactctccttcttgcccgcatcactctcggcatcgctgtcccggggactgggggcacgcagccccaggtgggctgccaggtcgcagcgctggatgttggacagcagcgcgtggttctcgtgctgcagtttgagcaccttgccgctgagctcgctgatctgcagcctggctgacttcagctcctcctgcaggggggccccacccccggcaccaggacttgcaccctctcctagccagcccggctcccggggaggctcaaacttaaacttgctgagctcgtgggtcagttgccggttgtggtcttcgatctcggagatggacctccggagcaactccgcttcctcttctacaaactgcaggtggcggcggagctcagtggaggactccagggagtcaccgaagggtgaggtaggaatgctgggtgcgtggtcccgacccgggccctcccgctcctgctggccccgcgtgtcctccatctctgccttgaggccacggttctccacctccagctccacgatcttccggcccaagatgttggcttcctcctccaccagctttagccgcagcttcagctcggcctcccgggtgctggggggcccgcctgcttcccccgtg

SEQ ID NO: 63811 - DNA, 2216 bp, Homo sapiens
tttttttttttggcgttttgctctgttactttataaccctttcatactagttgaacttttttttttataatgtacatgtactactttataattaaacaaaaaactttaaaatgattttttaaaaaagaaaagaattaatcacagtggaacatgaaatggaatgtcaactttggggacgggtcatccagaggagtccaagagccccaacatggtcgcgtgtctctggtcctcaggtcatcacccagcctcacccacagggcacccgccacggccgtggcccaccgtgcaagcttccacttggtgcctgcgtgggaacgcaccacctgccgtggaacttcctcctgcggggcagaggaggggtccagaagccacaggagtcaagtcagcaaaattaagttaatttacaaagttatagtaaaaaccacaatagtgacccagtccctcccacgcagtgtgagccctgtgaggtgccagcacgggccacctcacagggcaaaggtggtgaagaagatgtgcatcttggccaggaaggtggtgacggagccctgcctccagagcttcatctccacgtccagggcaaagtcccggggctccagcacggcccgctgcaggtagaccacacccgtgtaggcattgagcctgcgcgtgccaaagtagccctcctcattgcccttgatgatgttcagggcgatggtgtcccccgtgaaggctggcgcggggccaatgcggaagatatgcgcaggcaccaggaggcccgtctggaagttgagctggtagtgcgtgatgcgcgctggcgagttctggcactccaggaagtcatggcacgtggtgcgctcgcacttcgttttggagacttggacatagttgggaggacactcgaagcgcaggcagcggaagctaccctggatgttgtggcaggtctcagcctcggaacagttgtgggtacccagtgcacactcatccacgtccttgcaggacctcccgttggccgtcatggtgtagccctgctcagggcatgcacactggtagctccctggcacgttgagacagcggaaggtgcagaggatgccggcgccttgagcacactcgtcgatgtctgtgcaggtgtgcccatcctcagccagctggtagccctggcggcagtagcactggtaggagccatagatgttggcacactcctggctgcagcgctgggcctcacactcattcacgtcttcacagcgcttgccgtccgctgctagcaggaacccggaggcgcaggaacagcggtaggagccgagtgtgttctcacacgtgtgctggcacaggcggcctggcgaggcccagcactcattcacgtcgatgcagccccggccaaaggcatcccgctgaaagccggctttgcagtcacagcggtaggagccagggaggttgtggcacacttggccctcaccgcagcggtgcacacctgtctcacactcattcacgtccacacacttggtcccatcatcgctggcgtggtagccgcgcgcgcagatcagcgggttcctctggcatgtgtaggagcccaccgtgttgatgcagctgaagcctggccgacatggctcggacagtgacgtgcactcgttgatgtccacacagttgccttcaggatcctgcaggaagccatccatgcagcgctgcctggcctggcagtagaaggagcccttggtgttctggcacaagaagcccggctggcaggtgtgcgtgcccatcgcacactcatccacgtcttcgcactcgccatccttgagggcatagcctggctcacaggtgagtgccttgtagcagtggaaggagcccagtgtgttcacacagtgctcgccccggctgcacgtgtgcaggtccgtcacacactcgttgatgtccacgcacttcctgtgcgcattgaggatatagccatcggcacagagcactgtgtggttgacacagtagaaggatcccagggtgttcacacagaactgtcgccggctacaatcgtgagcacccatcaggcactcgtcttggtcttcacaggacacgccatccgccatgatggcatagccgggaaaacaggagcatatggctgagcccccaacagtgctgcacacctgcttgcagggtccattgtctttgcaggtattgggctgcggcagtggcagcgggatggtgttagaggccacctgggaaaattctgacttcagtgcaggctcctgtgg

SEQ ID NO: 63812 - DNA, 660 bp, Homo sapiens
aacagtggaagtaggaggcccaggcaatctgtctcctccactcccacctgctcctccccctccaactcctctggaggagtcaactccagtcctgctttcaaagggcagcccggaaagagaagactcatccaggaaattgaggacagatctctacatagaccagctgaagtcccaagacagccctgagatctctagcctctgtcagggagaggaggcaaccccaagacacagtgacaagcaaaattcaaagaatgctgcttctgaggggaaaggctgtggttttccaagcccaaccagggaggttgagatcgtctcacaagaagaggaggatgtaacccattcagtacaggagccttcagactgtgacgaaaatgacactgtgacagacattgcccagcatggcctggagatggtggagccctgggaggaaccccagtgggtgacgagtccccttcactctcccaccctgaaagacgcgcacaaggcccaggtacagggccttcagggtcaccagttggagaagaggctttcccacaggcccagccttcgccagagccattctctagatagcaaacccacggttaaaagccagtggactctcgaggttccctcctccagcagctgtgctaatcttgaaacagagaggaattctgaccctct

SEQ ID NO: 63813 - DNA, 3311 bp, Homo sapiens
ttttggcataagatcacactttagttcagagacacatttgcataaatacttgaaatggatccacccctgcaggtggcagcctgagaacatgtggctctccaaaccctgcgacgctgcggccctttaggtgatggattttaacactgaagacagtcgtggtcattcttgaagacagcttggggtccagctttggagcctgctttgacattcaccattgactccctgccccacgcctctcttgtactaattttttcccctgtgaggtagattatttatcggggaaaccagatagaatttttttttttcatttaagtttgctagtcctttgcaaacagactgacgctgagtgtcctgtctgagtcaataagtgcacttttaccttttaacctatgccctctacttgaacccgagcaaggtccagtccactggacagttgatgatagggtctgccgccccataccctctcctcttcccccttaggaatttgtgcagtactggaggggttgcggcaatgggaggcctgggtgggccgtgctgccttgatatggccaagggactcagtcaccacagtggagacccttgtctgcacctcagtaccgcatgtccaggagcacaagactggcccctgcccccctgaatcacagggggcacagctggctttcgcagggcttggcatcctcgggtttcaaagccttgttgcaggtggcagaggcctggccggaggggtccctgcactctacagttcgcctctgccagccggccccgcaggtgctagagcactcagaccagtcccccagcacccactgtgcgtggagcagcggctggatgatgttggtggttgctctctctttgctgctctgcatgctaaagtccacgtcattaggaacaaagaaggtgtatttgacttttggggggaagacctcgccagggactgtcaggagctgcactgtcagaggctctggcaagggccggaagctctgcaggcgctccagggtggcgatggagccgctgtacttcaggatggtccccttcaccaagatgtcctgctctatggcagagatggccaggttgccgttgagcaggtactgcccatcagccgtcttcagcgccaggtagttcccatcgttctgcacacccgggtggctccgctgcttcacgtcaatattagtggcaccagctgggatggtgacaatgtcattgtagccataattggtgggggtgagggacccggagaccttcctgcaggagttgcctttgcccccacacaccccgcatttgtccagcttccgaggcgagtccaccacatggtcacagccggccttgacacactggccacggacacagatggccagtgtttctggcccacacagggtgccatcaatcaccttggcctcgaacactttgaactcgctcctcccccgggctcggcagaacaacttgcagcggtcccggggggacaccccagcatacttggggacccactgcaggagattcccgtccatgtcagtgtaattgtaggcattatacttctcacactgctgctccctgaagcttttcccgtcaggggggcattcctccgtgtggcatgactggtacttggctctccgacccaggcagtatcttcctccattctgaggctcggggtccttgcactcacggtgtgaaaactgtactcctcctccacaggtccgagaacattctccccagggtccccacggtgcccagcctccatctgccacgggcttgggcctctccacttcctcctcaggtagacagctgccttctgagcagaggtgcccaggcccgcacggcgtgccgtcagcccagggcaggctgccattcttcgtgtggcacaggggctcagccccatcagtgtggcaccaaagctgggcgcagacgtcctgagcagaggtgttggggcagtggcggaaatccggcccaaagatctgcctgcactgctggtccagctggtacagggccatgcggcccgggaggcctgtggggaggggcagggccgcaccaggggcatccaggagacagtctccgtgcccgccgtccagaagctctgtgagatacatggcgctgcagggggaccagggcagcgtctggttcaggtggacgaacagcggtgccatcacgtggtgcttgcccatgggcccgaagagccgtgtgcagggcttggagtcgtcgtggggcatgctgaggacgtgccctagttcatgggccagggtgtgggccgcctggagcccctcatcctcgatcacggagcagcttttgttggggtcacaaatggtcccgatgtctgccacacccagggtgtcacacagcccctcctgcccacagaagttctgtctggtgagcaggatggccgtgtcgtagtgctctgggtggcggtcgctgggctggttgaaacgccgctgccagttgcagaagttacgcagtgtaagccccccattgtcggacacctctgggccccatttttcatcttctacgatcagcacttttaccaccatcaggttgatggaattcttgatgctggggtgcttgtagattcgggctgccacagacattaacgtcaggatgtggttctgcaggtcggccccgtagaaggcagccatggacgcatcggccaccagcagcgtctccacgaagcgcgcctcagacacaaaccgcttggtcctactcgtggcccccaggggcggtggcggctcgctagcgccttctgcctcctcttcttggctctcctcctcgctgtcctcctggtggtctcctctctcctgcctctgaccctctcccgtctccacctcccactcgggtcctcgcgggagggggcgggctccggcgggaccccagcgctgcaggcggtgcggctgagccagggagccccccgcgccctgcggctggatggtgaactcctcgccgtccagcaggaaggagccgctcagcccgcggcacaggctgaccgccgccagcgactcgggctccccattcacggtgccggaaaaaaaacagccgcgcagcccccgctcgcccccggtcgcccggccggagcccccgaggcgctcgatcttgaactcgggcgccaggaagctgtcgtcgggcgccaggcgcaacacgaagcccttgccgaaggcggacaggtggagcgcgagctcgcccgcgctgccgggcaaccgcgtgggcaccaccagctccgaggcctgccccccggctgcgggccgggccggggcgccgcgggccagcggcagcagcagcagcagcagcagcagcaggaacggaagccaccggggggcggcgggggcggggaacat

SEQ ID NO: 63814 - DNA, 551 bp, Homo sapiens
  misc_feature (1)...(551): n = a,t,c or g
agccccgtaatgatgtaaagcaggtcgttgttacattgtaataacaatctgcggtaccgtcttctgggcccgtgctagggaagtggcacacgttttcattcagggagagtgtggcgtttccatgtggactcgccggaaggtctttgaagtaacattaacattaagacaagtttcctcgccctgtctttcttcttagatccccctagctcagtcggaggcgttcctaacggatcttttggagaaagtctgtgagcgaatgaacgactacaagcttgaggaagaccctgtgacgaaggagagaactttcaagagattcgctcctaggaaaggagacaaaatataccaagaatttaaaaaattgtatttttattctgatgcttacagacctttgaaatttgcgtgtgaaactataatagaagagtatgaagatgaaatatcctcacttatcgcccagggagacacactattctagcntgacaagctgttgcagttgaaaaattcagggtactgtgttntgattgttaaccngtggntcggtggntcgcacaccc

SEQ ID NO: 63815 - DNA, 641 bp, Homo sapiens
  misc_feature (1)...(641): n = a,t,c or g
gaccacgcgtccgcccaatacaaaagtgagaacatgtatgcataatcagaaggatgcagtgcagatgcctagtgaaactctgaaagcaaaaatggtacctgagaaagttccccgcagatgtgctactgttgctgcaaataaaataaagataatgagtaatctaaaagaaacgatctcaggaccagaaaatgtctggattaggaagagtagcagaaaactgccccatcgaaatgcttctgctgcggctaaaaaaaaattactgaatgtttataaagaggatgatacaaccataaattctgaaagtgaaaaagagctagaagatattaatagaaaaatgctttttttaagggggttcagatcctggaaagaaaatgcacaatagtgactatgagaatgtagaagtggcatctgaaaacaattggtacacaagtaaactggcagttacattctgctcccagctctaaaattactcccttattggcatctttggaggaattttctaaaagccataatccagtgggttcctcccagtcagctcttgtacagacatgtgctctggggaattctgaggaggaaataaattgcagagtctgtangtggagaggaggaaagaaaagacaaatggtctgctataagactac

SEQ ID NO: 63816 - DNA, 5662 bp, Homo sapiens
gttggctgatagttcaccttcaaatcttcaaattattataaaagaactgctttctatgcatcaccagcctgaccctgctcttaccaaggagtttgattaccttcccccagtggatagcaggtccagttcagggtttgtggggctgagaaatggtggtgcaacttgttatatgaatgcagtcttccagcagctgtatatgcaacctgggctccctgagtcattactttcagtggatgatgacacagacaatccagatgatagcgtgttttaccaagtgcagtctctctttggacatttaatggaaagcaagctgcagtactatgtacctgagaatttttggaagattttcaagatgtggaataaagaactttatgtgagagaacagcaggatgcatatgaattctttactagtctcattgatcagatggatgaatacctcaagaaaatggggagagaccaaatttttaagaatacatttcagggcatctactctgatcagaagatctgtaaagactgtcctcacagatatgagcgtgaagaagctttcatggctctcaatctaggagtgacttcttgtcagagtttggaaatttctttggaccaatttgttagaggagaagttctagaaggaagtaatgcgtactactgtgaaaagtgtaaagaaaagagaataacagtgaaaaggacctgtattaaatctttacctagcgtcttggtaattcacctaatgagatttgggtttgactgggaaagcggacgctccattaaatatgatgaacaaataaggtttccctggatgctaaacatggagccttacacagtttcaggaatggctcgccaagattcttcttctgaagttggggaaaatgggcgaagtgtggatcagggcggtggaggatccccacgaaaaaaggttgccctcacagaaaactatgaacttgtcggtgtcatcgtacacagtgggcaggcacacgcaggccactactattccttcattaaggacaggcgagggtgtggaaaaggaaagtggtataaatttaatgacacagttatagaagaatttgacctaaatgacgagaccctggagtatgaatgctttggaggagaatatagaccaaaagtttatgatcaaacaaacccatacactgatgtgcgccgaagatactggaatgcctatatgcttttctaccaaagggtgtctgatcagaactccccagtattaccaaagaaaagtcgagtcagcgttgtacggcaggaagctgaggatctctctctgtcagctccatcttcaccagaaatttcacctcagtcatcccctcggccccataggccgaacaatgaccggctgtctattcttaccaagctggttaaaaaaggcgagaagaaaggactgtttgtggagaaaatgcctgctcgaatataccagatggtgagagatgagaacctcaagtttatgaagaatagagatgtatacagtagtgattatttcagttttgttttgtctttagcttcattgaatgctactaaattaaagcatccatattatccttgcatggcaaaggtgagcttacagcttgctattcaattcctttttcaaacttatctacggacaaagaagaaactcagggttgatactgaagaatggattgctaccattgaagcattgctttcaaaaagttttgatgcttgtcagtggttagttgaatattttattagttctgaaggacgagaattgataaagattttcttactggagtgcaatgtgagagaagtacgagttgctgtggccaccattctggagaaaaccctagacagtgccttgttttatcaggataagttaaaaagccttcatcagttactggaggtactacttgctctgttggacaaagacgtcccagaaaattgtaaaaactgtgctcagtactttttcctgttcaacacttttgtacaaaagcaaggaattagggctggagatcttcttctgaggcattcagctctgcggcacatgatcagcttcctcctaggggccagtcggcaaaacaatcagatacgtcgatggagttcagcacaagcacgagaatttgggaatcttcacaatacagtggcgttacttgttttgcattcagatgtctcatcccaaaggaatgttgctcctggcatatttaagcaacgaccacccattagcattgctccctcaagccctctgttgcccctccatgaggaggtagaagccttgttgttcatgtctgaagggaaaccttacctgttagaggtaatgtttgctttgcgggagctgacaggctcgctcttggcactcattgagatggtagtgtactgctgtttctgtaatgagcatttttccttcacaatgctgcatttcattaagaaccaactagaaacggctccacctcatgagttaaagaatacgttccaactacttcatgaaatattggttattgaagatcctatacaagcagagcgagtcaaatttgtgtttgagacagaaaatggattactagctttgatgcaccacagtaatcatgtggacagtagtcgctgctaccagtgtgtcaaatttcttgtcactcttgctcaaaagtgtcctgcagctaaggagtactttaaggagaattcccaccactggagctgggctgtgcagtggctacagaagaagatgtcagaacattactggacactacagagtaatgtctctaatgaaacatcaactggaaaaacctttcagcgaaccatttcagctcaggacacgttagcgtatgccacagctttgttgaatgaaaaagagcaatcaggaagcagtaatgggtcggagagtagtcctgccaatgagaacggagacaggcatctacagcagggttcagaatctcccatgatgattggtgagttgagaagtgaccttgatgatgttgatccctagaggaacatgcccagcctgagaggagtcaagacacaatactggatgctcagcaccttcttggaatcagaatctcgaaccctttggaagagcctggagattggactgggaaagctgctgtgacttgggcggatcgtgtatttctcaaggaaagcatttttaagccactagaaggtttgggagctgtttggcagtgggagaactccggcatgtggatcagctgtcccgggagcgtggtctatatgtggattcacatttctgtggagattttcggaaatagagccagtggcagacttttttgttacacgaacatacaagagtgagcataaagctgttgctttctctacgatgctacaaaagaaattcctttggtttttatattttaagaaaaagcaagctgcttttagatatgtgggggcaaatttttaatcttgcagtaatattaaacaggaatatccaatttaaaatgatgtaaagatgtaataaaattcctttttcattgtaaaatagtaattaaagtcaatttacacagacctttgtatttaatatgtctccctatttgtatagaatttcagatgggtctagatgagaaccctatgcataagcttggatcttgatgaaaggttaccaggatcaggatcaaaaattgggaaatactaagctcttgaagatatttttctgatataattagattgaaaagagcaattttgaaaatgctgtgttctccagaagtacagggtgcattatttgacatcaattacttaaagaagttatgagttgttccccaaacagattttaaaaacagcaaaataaaagcactttaagatataattttactgagtttaacttcacagaattatctttttaatgcttggagacatattgaataaactgtagtcttaaatcatgtgatctgcaatcgtttgcttttgcttaaaacataattactgaaacccttggtattggttgtatatgaagttaactatttgagttggtacacactgcttgtgagtttcatagttattgtaatgcagagaaggaatttgagaatttgtttctcctcaacatgactaattaacactgaaaagtcagtcaaggtttaagatttattttcccagaaataaatataaagcaattgaataaccatccatttagtcgtatttccaaagtatagcaccattcactcatttataccagctcccttttatggtgtgggggagaggtttacacccacatatttcatatatattttgtacattttgtattttgaattgctcacattttcggccctgttttgcctttagttacaggtcctgccttattttcatctcaccatgcacagaactagggagccttaggaagtgccaggttttcactgtcagatttgccaagtcacagaggcgcagccagccctgaagtgcctgtctggctgctgtggcattgtgtgggcatgtggccaggcagatggcatctcattactgtgctctcgccatggcccagtcttttcattctctggcagtgagggtttctgtgctgtcagacttcattgttattctgtgacttgctggaggttggcagtggcctttgtcaaacacactgagaagatggaagggccagcacttaagagcagaactgtacccttagagaaacggacagaggcgagtggcaaacttcagacggttccaatggtcttgcagtttgaaatgtgatgttctaccattggttttgagtacgtgaatacttcctgtcctactgtttcccctaccctattctcaccttctctccgcccacatcctcaccaagagattgtgtgggacatgaccttgaaatgctggcgatgatccacactgggatatcatcgctggcgactgcactctcaggagcccaaaatcaggagtgaaattgccacttctagtccccttatttcctatggaaacaacgccttccgcacccctagcacctgccgtcctcactgtaaaggttcatcaggatcgtccaccgtgtatattatacgcttcagatcatgttgcttatattgttgctgcaatgaccatcgttttcactttgctggtaaccacttgattgctgacagctacagtcaatgaacctgctgatgactttttttaatgtagtacaacagtgacagttatgacaggcttaccttggaagagttgtcatttttactgccaattttttggatgaagatgtttttataaacctttcaaaatggtctgcaaacagagcaggaattgcacaattaactcaataatgctgtgtgtttctcaagaagctccccttagtgaaggccgatcctttaagatgggcccgatttctgccccgttgaaagggcacccctgggaaaagaaaacaagcatcccccagcggggccatcctcaccccacgaccttccccccggagtccctcacacgggtcacttgacaacctacagtcagttttaggaacttagagtgcccgtatccatcagacgttaccctgtccctgaccccaccttaccctgcctaacatccgaggtgtgtgcagttaccttcctgagcttggaacaagcagactggaattttcctctgctacctccttggtgtataaaatcttgtttataaaatttcaaaaggaagtagatacacttagggaagaaccttaattctaaatttggttcatgtgtggcaaaggttcttagcttctaaggaggtataaaataaatttttcaaaaac

SEQ ID NO: 63817 - DNA, 1857 bp, Homo sapiens
ttttttttttttccatcccagctgtttattgaaagggaaggtgggatggaaggggtgcaggatgaggagggggcgtgaggcacaaggacagtagggtgtgccctggtgggggccgcctgaggatcccctaggaggcccttcaggctggtggagactgaaggtaagggttagggaggggaggggcgagagccttgagcgctgctctccagctgcatcagagctccctctagtggtacagaagagagatgacgcctccggctggggagggaggggctggcgcctctgagagagcccatttattatcagggtcacggccaagaccgtgggcttggtttctaggtaggtggactttgaggggcaaagacaacccacttttcctgccccctacccccggctcttagagaccatttaaatccatatccaaagtatatccagagccacctgggaccatcaggcctctggctagtctttctgggccaaacctgtcctccaccctgaggaccctcagggaaccaggaaggtgaggggctggctccgccccacctgtagcacaagagctggcccaggaggaggctgaagatgtgtttctagttcctgcatgctgctttgttgtgtgacctcggacatgtcacctccagccttcttcacccacctcacctatcaactagggctagtaattgcctgtggtgggtgggctggggggctctgatgccaaaatgcaggtagaagacacactgtgagaggcaaacgtcttcactcatcctgcagggaaaggccaagtgagcatctgggacccattcgagctgaatgacccccaccccttcatctgtgtctatggagggcagtgcgtgtcctcatcctggcgagaagaggaatctgatccaaagccctcatggcagagaggcaggagctgatggcttgaaagggcaagggtttgcccaaggtcatgcagaggaaggagtggggacgggttgaaggagatgttttctgcccctgagggccttgggaagagggtgtgggtaggaagttttgggaggacttgaggaatgctggtatcttggaagagttggggccccactcctggggagggagcactgggatttgagctccagatttgacctggagttgggctctaaagggaccctgctaaaagggagaagttggggaaacactgagagggggttatggtgagaagggggaaggatccaggacccacatcttaggccatgtgggcagctcaggagtccctcttgggctggatagtctgcacagaagattgcccaaaggggctggcgggtggcgagaaccatgactggccactggcattgcggaaaatgggtgacaactgctgctctggctcatccccgaagacctccacgtggctgtcggcttcggggtccaagggctctgccttggtgtcctggctcagccagcctatcatggcccagaagaggcagatggcgagcagaactccagctgccacacagagcgctgtgcctgccaggcgacaggtgcccagggcctggttgtagtcggctgcccgctgatccaacaccaggaactcaccctcaccgatgccctccagcttggggggcactgcatagccctcatagaagaggtgcaggtaggagcggaccccataccacttgccatcctccacgctggggccgcggctgcagctgcaggaacgattgcagctcggcatcatggacccctgggactgtgggctctggagcctgaccacttggactggagtcgtggacacactgcttcctggaggcgtgaccttagacaagtgcttccacctttctgggtctcagtttccccatctctctgcctgctgtctccgccacgaaa

SEQ ID NO: 63818 - DNA, 1063 bp, Homo sapiens
ttttttttttttaaaaatatattcatttattcatatatatattcactttacaatactgcattttaacatacataaaaatctaaagcgtttttaagaatttttcaaagtcctgtactgatgctttggcaatctcttcacaaaatatttcatcaggaatagatactagtttgtccaaagagatgtagttaggttttgctggatcatactgtgctcttcctaaataggtaagaaacaagtgtctttctttgaccttaaacagccttgtattaaatacctgtgggaacttgacaatgatgtggtggggaatgctcatcacattgtgcacaaaatcaaacgtctcggtaagtttcattttatttgcagttaacatctttgggattctggtgatcatatgttgaatttcgttatgtttaaaaccaagttcaagacgataaaccttcatattttctttcacgggttccagacttccagttagcagccttgggagacgaactaccagatctctagtcttcttcacactaagttcaagttctttctgaaaaaatcccaatctgttatccagtctttccactgaaaagttcagcaaaaatggtgcttttctgaccatctgtgcaacatctgctttactgaaattttttgaatgcagataagccaccctggtcttcagattttcaaggtcttcagagaaaattgcatgattttttgtcaggaatgctcccagttggttatcctctatacccacatctttaagaaacagaagcatttgcttaatgtctttttcaaaatccagtctcagaaggaggtttgctgcttctggatgtttttctatcttggacaaatccacgcctagaagaaccaacttctgcagagtctcagaatgatccacatagtctcgaagtgtgaatgaagctggtggcaatggagggtctgcaataatctgaatagcctcttcctctgaaattggctgcattggagacaatggaggcaattcatccagttcttctagaaacagctcagaatcaaagctggatatattttgtgtcttctgtgactgttcattcat

SEQ ID NO: 63819 - DNA, 5286 bp, Homo sapiens
  misc_feature (1)...(5286): n = a,t,c or g
ggcatcctcacgtggtacattgaggctgtgcacccaggcatgtacgggctgccccggccctggtacttcccactgcagaagtcctactggctgggcagtgggcggacagaagcctgggagtggagctggccgtgggcacgcaccccccgcctcagtgtcatggaggaggaccaggcctgtgccatggagagccggcgctttgaggagacccgtggcatggaggaggagcccacccacctgcctctggttgtctgcgtggacaaactcaccaaggtctacaaggacgacaagaagctggccctgaacaagctgagcctgaacctctacgagaaccaggtggtctccttcttgggccacaacggggcgggcaagaccaccaccatgtccatcctgaccggcctgttccctccaacgtcgggttccgccaccatctacgggcacgacatccgcacggagatggatgagatccgcaagaacctgggcatgtgcccgcagcacaatgtgctctttgaccggctcacggtggaggaacacctctggttctactcacggctcaagagcatggctcaggaggagatccgcagagagatggacaagatgatcgaggacctggagctctccaacaaacggcactcactggtgcagacattgtcgggtggcatgaagcgcaagctgtccgtggccatcgccttcgtgggcggctctcgcgccatcatcctggacgagcccacggcgggcgtggacccctacgcgcgccgcgccatctgggacctcatcctgaagtacaagccaggccgcaccatccttctgtccacccaccacatggatgaggctgacctgcttggggaccgcattgccatcatctcccatgggaagctcaagtgctgcggctccccgctcttcctcaagggcacctatggcgacgggtaccgcctcacgctggtcaagcggcccgccgagccggggggcccccaagagccagggctggcatccagccccccaggtcgggccccgctgagcagctgctccgagctccaggtgtcccagttcatccgcaagcatgtggcctcctgcctgctggtctcagacacaagcacggagctctcctacatcctgcccagcgaggccgccaagaagggggctttcgagcgcctcttccagcacctggagcgcagcctggatgcactgcacctcagcagcttcgggctgatggacacgaccctggaggaagtgttcctcaaggtgtcggaggaggatcagtcgctggagaacagtgaggccgatgtgaaggagtccaggaaggatgtgctccctggggcggagggcccggcgtctggggagggtcacgctggcaatctggcccggtgctcggagctgacccagtcgcaggcatcgctgcagtcggcgtcatctgtgggctctgcccgtggcgacgagggagctggctacaccgacgtctatggcgactaccgccccctctttgataacccacaggacccagacaatgtcagcctgcaagaggtggaggcagaggccctgtcgagggtcggccagggcagccgcaagctggacggcgggtggctgaaggtgcgccagttccacgggctgctggtcaaacgcttccactgcgcccgccgcaactccaaggcactcttctcccagatcttgctgccagccttcttcgtctgcgtggccatgaccgtggccctgtccgtcccggagattggtgatctgcccccgctggtcctgtcaccttcccagtaccacaactacacccagccccgtggcaatttcatcccctacgccaacgaggagcgccgcgagtaccggctgcggctatcgcccgacgccagcccccagcagctcgtgagcacgttccggctgccgtcgggggtgggtgccacctgcgtgctcaagtctcccgccaacggctcgctggggcccacgttgaacctgagcagcggggagtcgcgcctgctggcggctcggttcttcgacagcatgtgtctggagtccttcacacaggggctgccactgtccaatttcgtgccacccccaccctcgcccgccccatctgactcgccagcgtccccggatgaggacctgcaggcctggaacgtctccctgccgcccaccgctgggccagaaatgtggacgtcggcaccctccctgccgcgcctggtacgggagcccgtccgctgcacctgctctgcgcagggcaccggcttctcctgccccagcagtgtgggcgggcacccgccccagatgcgggtggtcacaggcgacatcctgaccgacatcaccggccacaatgtctctgagtacctgctcttcacctccgaccgcttccgactgcaccggtatggggccatcacctttggaaacgtcctgaagtccatcccagcctcatttggcaccagggccccacccatggtgcggaagatcgcggtgcgcagggctgcccaggttttctacaacaacaagggctatcacagcatgcccacctacctcaacagcctcaacaacgccatcctgcgtgccaacctgcccaagagcaagggcaacccggcggcttacggcatcaccgtcaccaaccaccccatgaataagaccagcgccagcctctccctggattacctgctgcagggcacggatgtcgtcatcgccatcttcatcatcgtggccatgtccttcgtgccggccagcttcgttgtcttcctcgtggccgagaagtccaccaaggccaagcatctgcagtttgtcagcggctgcaaccccatcatctactggctggcgaactacgtgtgggacatgctcaactacctggtccccgctacctgctgtgtcatcatcctgtttgtgttcgacctgccggcctacacgtcgcccaccaacttccctgccgtcctctccctcttcctgctctatgggtggtccatcacgcccatcatgtacccggcctccttctggttcgaggtccccagctccgcctacgtgttcctcattgtcatcaatctcttcatcggcatcaccgccaccgtggccaccttcctgctacagctcttcgagcacgacaaggacctgaaggttgtcaacagttacctgaaaagctgcttcctcattttccccaactacaacctgggccacgggctcatggagatggcctacaacgagtacatcaacgagtactacgccaagattggccagtttgacaagatgaagtccccgttcgagtgggacattgtcacccgcggactggtggccatggcggttgagggcgtcgtgggtttcctcctgaccatcatgtgccagtacaacttcctgcggcggccacagcgcatgcctgtgtctaccaagcctgtggaggatgatgtggacgtggccagtgagcggcagcgagtgctccggggagacgccgacaatgacatggtcaagattgagaacctgaccaaggtctacaagtcccggaagattggccgtatcctggccgttgaccgcctgtgcctgggtgtgcgtcctggcgagtgcttcgggctcctgggcgtcaacggtgcgggcaagaccagcaccttcaagatgctgaccggcgacgagagcacgacggggggcgaggccttcgtcaatggacacagcgtgctgaaggagctgctccaggtgcagcagagcctcggctactgcccgcagtgtgacgcgctgttcgacgagctcacggcccgggagcacctgcagctgtacacgcggctgcgtgggatctcctggaaggacgaggcccgggtggtgaagtgggctctggagaagctggagctgaccaagtacgcagacaagccggctggcacctacagcggcggcaacaagcggaagctctccacggccatcgccctcattgggtacccagccttcatcttcctggacgagcccaccacaggcatggaccccaaggcccggcgcttcctctggaacctcatcctcgacctcatcaagacagggcgttcagtggtgctgacatcacacagcatggaggagtgcgaggcgctgtgcacgcggctggccatcatggtgaacggtcgcctgcggtgcctgggcagcatccagcacctgaagaaccggtttggagatggctacatgatcacggtgcggaccaagagcagccagagtgtgaaggacgtggtgcggttcttcaaccgcaacttcccggaagccatgctcaaggagcggcaccacacaaaggtgcagtaccagctcaagtcggagcacatctcgctggcccaggtgttcagcaagatggagcaggtgtctggcgtgctgggcatcgaggactactcggtcagccagaccacactggacaatgtgttcgtgaactttgccaagaagcagagtgacaacctggagcagcaggagacggagccgccatccgcactgcagtcccctctcggctgcttgctcagcctgctccggccccggtctgcccccacggagctccgggcacttgtggcagacgagcccgaggacctggacacggaggacgagggcctcatcagcttcgaggaggagcgggcccagctgtccttcaacacggacacgctctgctgaccacccagagctgggccagggaggacacgctccactgaccacccagagctgggccagggactcaacaatggggacagaagtcccccagtgcctgccagggcctggagtggaggttcaggaccaaggggcttctggtcctccagcccctgtactcggccatgccccgcggtcactgcggttgccgcccctaattgtgccaaaggctgacccggcccgggctgcgtacacccttgccctgctttgccttaaagcctcggggtctgcccggcccctcgcccctgcctggcactgctcaccgcccaaggcgacgccggctggaccaggcactgctggcctttctcctgcccggcctcggaaccagcttttctctcttacgatgaaggctgatgccgagagcgggctgtgggcggagctgggtcagtcccgtatttattttgctttgagaagaggctcctctggccctgctctcctgcagggaggtggctgtcccgcgggaagccatcagcttgggccagctggcaggtggcaggaatggagaagctgaccctgctggccaggcaaggggccagaccccccccaacccccagctgccatcgctctcccacccagcttggccccctgcccgcccacctccctgggagccngggcctgtacatagcgcacagatgtttgttttaaataaataaacaaaatgtc

SEQ ID NO: 63820 - DNA, 1569 bp, Homo sapiens
ttttttttttttgtccttttgtgtttttttttttctttggagaccaacatttttattaataagataaaaggaaagagtggtaaagcaaaggcgatcattggatggaatgattatgtgtcacgagcacttgaggacctagaaagcaaaccggagtgattatgccaatcaaattgcaaggttggagatatgctaaaaggttggaaggaatccaatcctggggctattgcacaggacttggggaaatcaagttgctgcaagcagctatgacttgaggaaggtgtgcagtgggggaccttaaaccatttccaacatctgtgcctttgaaatattttattactgatccagatatcccaagacattttaaatgggaagggaaaatgtactatactagacccaaattctctgggatatttacattccatccctgtctagggatgtggggggaggtgaatctgtcagtggatcagatcagactagaaggttcttgtgattaatggagctgggccatctctaagaaaaaggcagcaaataatttggttccctctatgtagttccacctgttgattttctcattctgcgaatgttctccatcatcaacagctcccagcggaattagcaccacgctcttgtggacgatctcctggaacattttggcaattggaatggtggatccatcccggatcatatctggttctgttccaaacactgttctgatcgctctttttgctgcgagatactgggtgtcatcaatatttgcaatccacgggtgtagtcctagagtcatggaaacaaccatcttgttggaactatttcttttggagaacacatcttcaagatgtcgtgtcacctgtttttccaccgcagacacattcatgtgagggactagacggattgaaaattttcctataactcggccaggtatgactgttttagttccaggctcatcaaacgcgccctcgatcccatgaatagaaagagatgggtacctccagaggtgcattagaatctcctccttagtatcgaacagaaatttctcaacccggctgctattccggtattcttctaggtctagatggatggctttgtatgtatttatttcctcttctgtaagaggaaccacttcatcatagattccagggaccaggatatgaccagacgagtctaccaggctaccgagaagagcaaccagatcagccattggttcatgaaggatgccaccaaaggttcctgagtgaaaatcctggtctctgcatttcacctccaccatgaagtagctgttcccccgggttccgtaagtgattgctggcttcctttggctgatccacaggttatctgaaattacaatgtagtccacaccagagaagaatcggtccttttctttttccacaagttcctccagggcaacagagccagcctcttccatcccctcaatgatgaatttgatattcacaggaagatcttgctccagggctttgaaggcgctcacagcattgatccaagcccagtcaaggtctctcatgcaggtcgctcttagaccgtagagggtataacgtggtctcgggcagtcgc

SEQ ID NO: 63821 - DNA, 2857 bp, Homo sapiens
  misc_feature (1)...(2857): n = a,t,c or g
tgaaggatgtagtgaggatggctttgtagccttaggactgggcagtgatcaacgcagtaaatgaaagctgcgattgccaggtgagggccccggtgctctgtactcattttattgtgcccctatctgaacaggattccgtagaaatgacttagatgcttatctagtatttgacattgagatatttattttgtgaaacaatcgcaagcgattttaaatccccacatactatttgattaagtgcaacatggtacagtcatgtgtaatctctttacacgatagtgcatctagtccttagcctttagttattgcacaacaattataaagaccagtgaccaggacacgtggactctgacaggcagatcggcctacacaacgaaaaatcagaacagtacaccaactggaatggtcaaacaatttaagtcaaatgttttaatggtgcaattaaaataagggttcaaacatgttttcaatatattaatttctttaaagtcatgttcaggcaaggtgctgtttaaaaaaccactattagctttgtccacacatgtaagttatcaaaagttacccaaggtaattttgacgttgaatgcagctttaaacaataaaaaaatggtattaggtttacttctcgaagcaaagagagcccccaaccttgtaaactaaacattctgacacaaatgcacaaaattaagttggcaacattaattttgagatgtagtgtgatgctgagcaaacttttggtcttgactcttgaaataattaaagagagcagttctccgttttggccttcaggaagggaaatctgcccatggaactctcccaatcagattaacaaactgtttcgattcccatataaacctggaggacacaggaaacgccagatggaaaaactggctctggctttctaaccccatcccatctgtatgagaggacccatcctgtcatgtgcagtgtttgatgttttcacatacgctcctgtctcaggaaaacattcaagattagctagcccccaggtggttgtacctcattggtgaaaggcttgggatggtttgatctcatggctttgcctgatgttcacataaatcccactgtccttacccaagctgatagcgtgttgtgtgtgtactatggctacttgcttcccaaatgcacaatttaatgtggaaaataagttgctctgcccatctcttctgtcaccgaaatgaaaaggctcacagaattcctctccccaccctccagacacattgcacactgacattctctggaagtgtggaaggccgcatacaaagtatagaagtgaaaaagtccactgtgcaccggctgcctgaagaaaagctttggaggagtagaggaggcaagttgttcagctttgctcttactgtgctcatttgctgccacaaacatgggtagacttttaaaagccatggtgtgggtcacgtataacttctggatccaccatgattcttccatggtctcctttgccaaatcaaagctttgcagcaggcaatccagacagttgtcactagatgcagggaatgacacctcacagtggaatgggcactggcaggcagagggcagaagcagtcctttaagaaacagtagctgtggcacagaggcccagtgctacagtacagatggcggccaagaaccccacacatccagctcgatgtcacaatatggggaacatctgacatcacccatcatggctgatcagcagcctccacaggtgggtctttcaggaggcaggaagtagagcgagggtccatggctgagtgcattatagtgatataaacatcatccatgtttggcatgacaaaaactttctgaaactcttgctccagtttcttctctatccagtctgtcacatgaactaaagtcacttctctctctccaagttttggccgagctttcagctccacatgtggtggctttcggaaaccataccatactcggtcagtcgggggtggtggaatgttgaccgccaaggttcctctacattcttgtacttcaacagtgagcagcaggggtgtgttggagacttcttcgatcttctttttaataaactctgtctctgttgctttttggaaatattttgacttggtaattttatcaacaaacctcataatcttacttgttcgatgacctccaacgtacccttcagcccctgggaggagctgtttgtctcccccgctgggctctggggcatcgtcttcctcggaggagccagcgctggaggattcctcatcgctgtccgccagacagaatgcccggggcctgcaaccttctttgccaatttctccaaccttcagggcttcaacaagaggctctttacctagtttggtcaaattcattttggtctcgagagtcatcagaaaggacccattgtaggacatttccaaatcaatccagagtccttggtgatcaacgtatggcttgaaggcctggaggatttttggcacagccacgcccatgtcaagttccgtcagagtgagctcattcataaagtaggggagctttattttgctgagtttcatttggatcttcttagacaccagatcagaccagtatttctctcctaagaagtcccaaaatattcttccaagcaaggcattcacccaggcttcctgttcttcctcctcagagggtggaacctctggcaacttcttcccagctgtggggctgctctccgcactctgcagggggctcctctgggggcttcggctttcctgggggacacacctgcccatgtacacgctgtagtcgagaagcatcttctgccgaacgaagcctgccagctccttctgctttggctgtgacatgatcctcgtgccaancttggcgtantcgtcgtacgcctgcg

SEQ ID NO: 63822 - DNA, 1123 bp, Homo sapiens
cgacccacgcgtccgcccacgcgtccggaagaaataaaaaatttgattctaccatatatttctgacatgaactttgtgcaagatttatgtgaagatttttatgaactttttaagactgacaaaggatttgacaaagccacttttgaaagtcagatgtctgtgatgaggggtcagatcttaaaccttactcaggcattgagagacgggaagagtcctttccagctagtacagataccttgtgtgattgtggaacgcagtcaaggtggaagtcagggtcggattgtccacctgagcaattcctttacccagactgtcaattgcaggaagccatttttttcctcctggtagtaaatgtcagagtaagagaaacaaactgtttagaattatcatgtttttaaaacatcatagtaatataaatctgctgttaggagctccagttgctaaaacctcaatttaagtctttaaaaggttgtattttgaatgtaaccaaaagtttacagttttttgtccaaatattaaatttctatttcagggaagaagtgctatatctcctatattgtatttttgtagaaaatttgtattttatgttgttgttagtttaaaaggtaattttacacatgctggaatgactgtaattactctagaattccaagtagaatacaataacttttaatattgagaagaatgttcatgctaattcttcttacattacaaaaggcctttgaggatgcctacgtctgaaattgctcttacgaactttaataaaatagttagctaatagaaaaacaggtaagaataaagcaatgttgccttaatttcaaaagctgctattttagaatttgaataagtactcctaaagtgaccattattagggaccagaaaattatatcttggctaagtaatagaggaccattttggtttttgtacttgagaatatttttggtgaattactttgttgtagtgaggaaaaaacctaagaaatttcccctttttttaaaaaatggaaatattcaattgagacttgaggggaataatagaaaattaaggtagatccccccccaatattttggaataccaaaattgccttaaaaattcccttctgtcgtcttctcgcagccgtata

SEQ ID NO: 63823 - DNA, 2133 bp, Homo sapiens
gaatgtacatggaaaggatggacaaaagagctctgattagtttttgggaatctgtggaacatttaaagaatgctaacaagaatgaaattccacaattagttggtgaaatttatcagaatttctttgtggagagcaaagaaatatctgtggaaaaatcactttacaaagaaattcagcagtgtcttgtaggaaataaaggtattgaagtattctacaaaatccaggaagatgtttatgagaccctaaaggataggtattacccttcatttattgtcagtgacctgtatgagaaattgttgataaaagaggaagaaaaacatgcctcacagatgatttccaacaaggatgagatgggcccaagagatgaggctggtgaggaagccgtggatgatggtaccaatcagatcaatgaacaagccagttttgctgtaaacaaactgcgagaactaaatgagaaacttgaatataaaaggcaagctctaaattctattcaaaatgcaccaaaacctgacaagaagattgtttccaagttgaaggatgaaataatcctaatagagaaagaacgcacagaccttcagctgcacatggcaagaacggattggtggtgtgaaaaccttggcatgtggaaagcctccatcaccagtggagaggttacagaagagaatggtgagcaattgccatgttactttgtcatggtaagcctacaagaagttggaggagttgaaactaagaactggacggtccccaaaaggctcagcgagtttcataatttacaccggaaactcagtgagtgcgttccttctttaaaaaaagaccagttgccttctcttagcaagctgcctttcaaatctatagatcacacgtttatggaaaagtttgagaatcaattaaataagtttttacagaatctgctttcagatgaaagactgtgtcagagtgaagcactttatgccttcttgagcccttctcctgactacctcaaggttatcgacgtgcagggaaaaaaaaattctttttcattatcctcatttttggaaagacttcctcgcgacttcttctcccaccaggaggaggagacagaggaggacagtgacctgtcagattatggtgatgatgtggatgggaggaaagacgccttggctgaaccatgtttcatgttgattggggagatttttgaacttcgaggaatgtttaaatgggtgagaagaacattaattgccctcgttcaggtcacttttggaagaaccatcaacaaacaaatccgggacacagtcagctggattttcagtgagcaaatgttggtttactacatcaatattttccgggatgctttttggccaaatgggaagttggcaccaccgaccacaatcagaagcaaagagcaaagtcaggaaacaaaacagagagcacagcaaaagctgcttgaaaacattccagatatgcttcagagccttgttggacagcaaaatgcccgccacggtataataaaaatattcaatgcactgcaagaaacaagagccaacaagcatctgttatatgcgctgatggaactgctgctaattgaactgtgtcctgagctgagagttcatttagatcaacttaaagctggccaagtttgagactacacaaataaaccaccagaaaaatgtctgtgtaataatagacatgaaacattttcctcttttccacagagggcttaactgagaaccgtattgatttttattttagttacctccctctagttttatgtgaaattagtagaatcagggaggacgggacttatgctgtggtaggcaacagaaaaaaacttctattgattttaatttaatatgaatactttaaagatcaacataccgattgaaatacaaatgttaatatgtgagaacctaggaagtattttaaatatttatgaaaatattttgttttaaaatgaactatgaatattgtacagttaatttcctcactgaggactgtgaacattcttatattatttcatgtatattgaagaacattgttatgcaatgctttgtgtaaagttattgtgaagattttattgtctttatttttaccaaagatttcccatagtttgagcattcaaagcaataaaatataaaaatgaatcacaaaaaaaaa

SEQ ID NO: 63824 - DNA, 595 bp, Homo sapiens
ctttttttcttttttttataaaacatgtcacatcttgatgcagttgatgtcaagtgtgcttaagtcattatgaatcaagagactaacaatagtggctgcagaaacaggtttgttgtctgtacaaagacttcaggtaaattatagtacttccatgttagctgtgcatgtccaccacgctttgtctgtaactcgagtagaaaaagatgttgtgttttaattaatcattccttacaattcaagatgaactccacatatttaagaattcttggctgaaagaaaagtcttcaagatactggatgcctctcaccactttgacaataaacacacaagaaaaccattgtgtaaggcactcaaaaggttcttatcaatcacgagagatcagtcacactgacattcattcccatgccaggactcacgtaagggacagcatgcactgctttgggaaattctggagtcataacacgtccattttctccagtacttcctgtaattgacagccttgccttgttcctcatggcatcattcaaggtcatcttaaatgagagaggagggaaagaaagaaaaagagatcatacgttatggttttcaaatgcat

SEQ ID NO: 63825 - DNA, 2078 bp, Homo sapiens
cggcccattaattgacctttgcaaagggccacatgaaacacacactggaaagattaaaaccatccaaatttttacgaattcctcaacatattgggagggcaatccggaaatggaaacattgcagaggatctatggaatatcctttcctgataacaagatgatgagagactgggaaaagttccaagaggaagcaaagaaccgagatcacaggaagatcgggaaggaacaagaacttttctttttccacgatttgagtcctggaagctgttttttccttcccagaggagccttcatttataatacgcttacagatttcatacgagaggaatatcacaaacgggacttcacggaggtgctctctcccaatatgtacaacagtaaactctgggaagcctcaggccactggcagcattacagcgagaacatgtttacctttgagattgaaaaggacacttttgccctcaaacccatgaattgtccagggcactgtctaatgtttgcccatcgtccacgatcttggagggaaatgcctattagatttgctgattttggagttctgcatagaaatgaactgtcggggactctcagcggcttgaccagagtgaggcgcttccagcaggacgatgctcacattttttgcacagtggagcagattgaagaagaaataaaggggtgtttgcagtttttgcaatctgtttactcaacatttggcttctcctttcaattaaacctgtcaacaaggccggaaaacttcctaggagagattgagatgtggaatgaggctgagaagcaactgcagaacagcttgatggactttggagaaccgtggaaaatgaacccaggagatggagcattttatggccctaaaattgacataaaaatcaaggatgctattggcagataccatcaatgtgctacaattcagctggacttccaactgcctattagatttaatctcacatatgttagtaaggatggggatgataagaagagacctgtgatcattcatcgagccattttgggatcagtggaaagaatgatagccattctttcagaaaactatggcggaaaatggcctttctggctatctcctcgtcaggtgatggtcatccctgtggggccaacttgtgaaaaatatgcacttcaggtatccagtgaattttttgaagaaggatttatggctgacgttgacttggatcacagttgtacactaaataagaaaatacgaaatgcacagctggctcagtataattttattttggtggttggagaaaaggaaaagatagataatgctgtaaacgtgcgaacaagagacaacaaaattcatggagagattttagtaacttctgccattgataaactgaagaatctcaggaagacacggacactcaatgctgaggaggccttttgaagtccttccctgatatttgcttctgtgtaactttgttttgacccttaaaaatgtatttttcttaacatgttagtacttctacgactttggagccactgatgggtccactcatggcctcagctgagaaaggagacgatgaacgtgtagctgacatgcacgaagtttaatttactcatgtccacgggggacgtttagagggcacgtgggaaattttccagcaatcaatgccttgagaaacttaaatggggaaatattattcatcgagaaagtgaaacaaaacactaggaaatgattatgaaatgttagtgattttccaaaagatgggccttcaaataaaagtctgccagagttttttttaaaataggagggaaaatccttattttcctaatatgtcctcaggtatttttatgaccttcctacctaaaattccacacctgaaactttatcttcctaaactggaatccattaccttaattttaactaaccaacaaccacaaaagcgagcagctactgcctaaatattggattactgacaaaggaattcagttttgtggaatctggtgtttgcactataggttaagagttgccatttaaatgtttcttattcataattaggttttgttccgctttagaaaaaaataaattcccaaatgaattgcaaaaaaaa

SEQ ID NO: 63826 - DNA, 417 bp, Homo sapiens
cttcaagatccagaagacgaggctgcagcgagagggctttgacccacgccagacctcagaccggctcttcttcctggacctgaagcagggccactacctgcccttaaatgaggcagtctacactcgcatctgctcgggcgccttcgccctctgaagctgttcctctactggccacaaactctgggcctggtgggagaggccagcttgagccagacagcgctgcccaggggtggccgcctagtacacacccacctggccgagctgtacctggcacggcccatcctggactgagaaactggaacctcagaggaacccgtgcctctctgctgccttggtgcccctgtgtctgcctcctctccctgcttttcagcctctggctccttccatccctgtccctgtctggccttaactcttccc

SEQ ID NO: 63827 - DNA, 2378 bp, Homo sapiens
ttttttttgtggccccttctgttttgtttccagttagacgtgggaaaaaccaattcaattataaagaatacatcttattccctgggcataggcaactgtgatgaaaatagcaacttacctttgggctagatgttttcagattatgcttaaataaccgtggttagaaatttttcaatgcatgctttcctgccccacgcaatctccctgaatttagctaaaataatcaggcacaggacagtctcaaataatgattaaaatatgccatgctaataaacaaggttatctagaatgcaacctcggtgctttaaaaacagatagaataaacctcatcaataagcattttcctaaatctctttgtgttatatcaaccaacataaaaaagggaaaaacataaaagtgtccctttataaatgatattatttccagaagagaaagttgaaacaaaggtttgtaaagtctcctgaactattcagtttaataaccaattatccctcaatattacaaaataaaatgactggatcaatgttgactcttctttgatatcatttataaaatgctttgatattacttactaagttccctgataactcaaacaaggtaaaattaacactttcattttcagttattgctattttagaagaggattaccactttcatttagatgaaactgttttaccaaagcctcctcagatccaacacaaagtaattcttattgcctcacattttaaaacagtattataaatgatctttataaaaaggtttaatccacaaaactggaaggcttttaaaaaatgtctttttactcaaaactgtatcacagtgcccttgattatctaatagataaaagggatttgaatttcctctatgagaacagaacagtggacatatggtgtgctttgtcttcccctcacctttatctttatagcacaccattttgagaccaaaacaatcaagcatctaccatgctccagtccacattaacagaggatttctgatgctgtccagtgcgtagtgtaccgccttgcatattccccacatgaaataaacataatatacaaaatattgctgctgtaaaaagtgtacatttccctcttccccttacaaaaaaatctgtggaaaagtattaaattcccttaccccttcataaacaaaccaaagctgttcacacctttcagtctgtaacagtccatttggaaacacagttccaaaatcattacaaattggttatgtcattgcattttctgtccaatgttgccatctagagtagaaatgtgaaatcaagagtatttttgagctactaaagccttttataactaaaccacaaaggctgcttactgatgaaacagccacttatccacaaggtttttccaaaaactagatggaatggaaggatctcttcacagggaggtgtccacagtgctgaggtgacaatatggctgctaatagatactggctactggaatgtaagtactttttcactgctggtaatttccatactgtccctggtcatatccataaggcctctgctggggtggctgtggtggtccaggctgtgttggtctatatcctccatactgctgaccttgtccctgtgggtagttaggatactgaggacctggaccaccctgtgaaggaccgtagccctgctgctgtcctgggtaaccttgctgccctgggtactgctgctgctggggtggatatccctgttgtggaggtggtccctggtatgcatcttgctgttggccatactgtgaatttcctccttcgtagtaatgttgtgaggaatcctcataaggcctatcgtagccttgttcaggatacgacggttgctgataaccgtaatcattatgaccatcagggtaatattgctggttcatgccttctggaggaccttgtccaccatgactgtattggtccccgtaatagtcttcctggcctgagtactgctgtggtgggccctgttgaggaggtctatagggaggaatctgtctctgacccatcatatgattgccttggttaacttgacccatcattcccataggtggctgctgtccttggtaatgctgtccgcctccctgtggcatattgtattgctgagaaggaggctgctgatgcatcattggaccttggtttggctgcatactcatatttggtctgggaccatagtttcccattggttgtccctgactcattgtcatctgattctgtactggcatgctctgtgatgatggcacagaatggttgtaacctcccatggatccatggctacttgaaggcatattcatggaactgtttgtcatattgagttgattgggtccaggtccctgcataggcatatggttaggcccaggcatctggccgttcatctggtctcgtgc

SEQ ID NO: 63828 - DNA, 1813 bp, Homo sapiens
tttttttttttttgggggaagaataagacccacacacgtttatatatattgggattaagaaaatgaatcacaagccatataaaattgagataaattggaaaactctaaggtaagtaccatgtctattcccagctgcctagaacaaagatccattaaaaatccatggtgtgaatttccaccatgggtcagaaggatgggaagactaaggttttcctggcaactttcccaaccgcctcccaccaggtgcagcgaggtgctcccctgggctgaggaattcaaatacagggtgtgtttctaaacgctgggaacgaggcagatcttgctgccacaccgagtgggagccccggagctagggattcttgaaatccaaacccaggcctgccatcaccaggctgcgtggagaatgaagacagggagtcaggcagacggtttctccgtgcatccatcttaagatgcagccatgggaaggaaactgactgggatgggagttgtgttcctccccaaaactcatttctttggttgcccgatgtcaactcctgccttagacacccatcccaaaccctccttctccttcatttttatcccttcatgttacaatgaagcagtgaatgctgcttcattgtcttaaaactgaaacagaaacggggaggtaggtagcatggatgggggagtgcacgaactctataggtacaggatgaggatgccccgcactagctgctatgaaacctgagtcctctgttcactctgcacacacatcacagagggctgctggccggtggccaaggcatttggtgagggccccatctcatggaccctccagatgccccttcatcctctctgagcttgaacactggggcttgaaaggtggccaaagagctggcgaggacacaaatatggggcattcaaactcctaggaaagatcacaattttgctcccactcccaaggggactaggagtggggtgaaagagcccatcgtactagagcgaatgtgaatccttatccccagaggtagaatcattttacccagtaccggaaacacgagcttccagttcttgtttttacagtaactcctgatagcagaccttgcctcctcccacttccagtaccctctgccccttgcaaaggggccacaaagtgcatgcacggctaaccgtgtggatgctgcccacagccacggccactcacccctcgctcgtgtgcacagcctccccacatatacacgggtacacgtaacgcatggtggccagagagacatttacagtgtgagtgtgaggcccggcttaggcctgcatccttgggcagggtctgcccttggtcccagggtcctaaggctgctctgcagccagccccgtgccttagtgtttgatctcgaggatggagggattgtggtccaggatggcgaggataatcttgtccatgtactgcctcagccggaagttgatctcctcctgctccttcagggcttccattagctcatcgcgcgaggcggtgtctatctccgcagccagagactgggctttagtctgggcagcaaagaggttttttgcttcgtagaggctgaggctcaaaatctgcccattcaagtcgtcgttctgatcccgcagcttataattctcctacagagagaaggacgaaggcgacatcaaccccaagaggcatccacagcccactggaacccacttctccacatccaccatccccgacctgccgccagcgccattcccacagatcctgcacaggaaacccacgtggtgggcccgggcaccctgccccactggacacagagactgctagacccacctgcttgagccg

SEQ ID NO: 63829 - DNA, 3734 bp, Homo sapiens
atgaaaatgaacctgagtccagtggggatggcgcagctgacttcatcctctgtgagcaatgccttgccagtctcaggaagtcacctgggattggctgcctcacccactcacagtgccatccctgccccaggcctcccagtggcaattccaaacctgggtccctccctgagctctctgccttctgctctgtctttaatgctaccaatgggtattggggatcgaggggtgatgtgtgggttacctgaaagaaactacaccctacctccaccaccttaccctcacctggagagcagttatttcagaaccattctacctggcattttatcttatttagctgacagaccacctccacagtacatccaccctaactctataaatgttgatggtaatacagcattatctatcaccaataacccttcagcactagatccctatcagtccaatggaaatgttggattagaaccaggcattgtttcaatagactctcgctctgtgaacacacatggtgcccaaagtcttcatcccagtgatggccatgaggtggccttggacacagcaatcactatggagaacgtttctagggttaccagcccaatttcgacagatggaatggcagaggagcttacgatggacggtgttgcaggcgagcattcccaaatcccaaatggctccagaagtcatgaacctctgtctgtggattctgtgagcaacaaccttgcagcagacgctgtaggacatggtggtgtgatacccatgcatgggaatggcctggagctccctgtggtcatggagacagaccacattgcaagtcgggtcaatggcatgtctgacagtgccctcagtgactccattcacactgtggccatgagcaccaactctgtaagcgtggcactctctacctcacacaaccttgcctccctagaatctgtttccctccatgaagttggcctcagcctagaacctgtggctgtctcctccatcacccaggaggttgctatggggacaggtcatgtagatgtatcttcagacagtctttcttttgtatcaccttcactgcaaatggaagactccaattcaaacaaggagaacatggcaaccttgtttacaatttggtgtactctgtgtgaccgcgcctatccctcggactgtcccgaacatggaccagtgacttttgttcctgacactccaatagagagcagagcaaggctttctctcccaaagcagcttgttctccgtcagtcaattgtgggagcagaagttggtgtatggactggagaaaccattcctgtgcggacttgctttggacctctaattggccagcagagtcactccatggaagtagcagaatggacagacaaggcagttaaccatatctggaagatataccacaatggtgtcctagaattctgcatcattacaactgatgaaaatgaatgtaattggatgatgtttgtgcgcaaagccaggaaccgggaagagcagaatttggtggcttatcctcatgatggaaaaatctttttctgcacctcacaagatatccctcctgaaaatgaactgcttttttattatagccgagattatgctcaacagattggtgttcctgaacacccagatgtgcatctctgtaactgtggcaaggagtgcaattcttacacagagttcaaagcccatctgaccagccacatccataaccatcttcctacccagggacatagcggcagccatgggccaagtcacagcaaagaaaggaagtggaagtgctcaatgtgcccccaagcttttatctctccttccaaacttcatgtccactttatgggtcacatgggtatgaagccccacaagtgtgatttctgtagcaaggcttttagtgatcccagcaacctgcggacccacctcaagatacatacaggtcagaagaactacaggtgtaccttgtgtgacaagtctttcacccagaaggctcacctggagtcccacatggttatccacactggggagaagaatcttaagtgtgattactgtgacaagttgtttatgcggaggcaggacctcaagcagcacgtgctcatccacactcaagaacgccagatcaagtgtcccaagtgtgataagctgttcttgagaacaaatcacttaaagaagcatctcaattctcatgaaggaaaacgggattatgtctgtgaaaaatgtacaaaggcttatctaaccaaataccatctcacccgccacctgaaaacctgcaaagggcccacctccagttcgtcagcaccagaggaggaagaagaggatgactcagaagaggaagatctagcagactctgtggggacagaagactgtaggattaacagtgctgtgtattcagcggatgagtctctttctgcacataaataaaaggaaaagaaacaagcaattttggatgaaaatgcaaatggaaaaatacacataaccagttatctactataatggtttttatataaaatggttcctgatttattttcagccagtaatcaaaacagactgggaatgaataaagcacttacagaagagtatcctaatgaaaacactttaaaacagattgggaaaactgagcatgtgtcctgttttaagtggtggactgggagggaagtgtcaacttctgaggtctttatttacatgataatctgggagatgcatttatgcctgaatcaaagctgccttctgctcaaacaaatcagatttatttcacattcttccattattccattttcctgctggtcctgtgacttggtaacattctaaacggtccttgccccatagccatcctgattgctgatagtgttttatgcagactcttgtgacttatactcaccacagaatggattgggacacagcagcataagtgtgctacttggcagctagtaagtttaaagcaggacctgccttaactgctcctggccacttggaagtttagggtagatcttgttttccaaagtttcggcaggtgcctggagggcaaataaaaaagcagcagtcagtcagtagtcagtgatggagagaacaagaggagagatgcctggcctctgcccaagaaattagctttgatggaagcctgagcaagtcacctgcttattgtaacgtggagatctttgtaggtttagacatggctccctgtctccagtaaacatccagccattcagacaaagggggcctggagatacagagagcccaaataatgcctgctggattgtctcctgatgagtacatgtggactcacctgaggaagggaaggaagggaataatcttttatgtttcatttaccttatgaaaagtgttaaaacattgccaactcaaaataacattatttaatgcatgtgcaaagttaggtcttcccagttgtctcagtgctgaggaacctcatcagagaagcatggaagatgccaaaggatttttggaaggtaaagaaggctgaatagtgaccacatgggcctgttttcagggtcccagcttagttaagtcacccatgcacctggtcattgtgtctcccatgcacatccagcgtttctcagaagcagacccacccttaagttgacaggattgatggaacatgctctcctgctcaaggcacaacctctgggctggagtagaggactctggtgggaaggttttgctgctaatgtatttatggaatgaatgtatttcattcaaatctgtattcctctaggaaggattaaaattaaacttttttaaaatacaaa

SEQ ID NO: 63830 - DNA, 1262 bp, Homo sapiens
cggacgcgtgggctggtccagtctcgctgagtgccaaaattgaaagaaagggatactgtaatggagaagctattccaatctatgcagaaatagaaaattgttcctctcgtctgattgttccaaaggctgctattttccaaacgcagacatatttggctagtggaaaaacaaagaccattcgacacatggtcgccaatgtgcgaggaaaccacatcgcttctgggagcacagacacatggaatgggaaaacgctaaaaatcccacctgttactccatccatcctggattgctgcattatcagagtggactattccttagctgtatacattcacattcctggtgctaaaaaattgatgctcgaactgccattagtgatcggtacaattccatataatggttttggcagcagaaactccagcattgccagccagttcagtatggatatgagctggttgacactgaccctgccagagcagcctgaagcaccaccaaattatgcagatgtggtaccagaggaagaattctctagacacattcctccttaccctcaaccccctaactgtgagggagaagtgtgctgtcctgtgtttgcctgtatacaagaattccggtttcaacccccacctctttattcagaggttgacccacatcctagcgacgtagaagagagccagcctgtttccttcattctctgaacgtatttcagaaatcactgtgttcatcatcaaattagaatgttggttcttttccttctgcctttttgggagagagacaggaaagattcacttgaaaacataaatgaacgtcaagactgaaggcaatagaaattaaagaatgtgagaaagttctggtgggccggcaggattgccgcacaaggtttatatgatggtcgtatatatatccctgttaaaaactgggatgaagatgtgcaaagtcacagaatgtaatggaagtcctgatggttacagagtaagtgaaagggtgcctgcgctgacgtgagagaaaggaatctgtaaacagtggaaacactgtgggagtttcccatggtgaagagtggaacgaaggcgatatgaactgaaggggtgaagacttgattttggagagggcaacaaaacaagggtgtgtgtgcataggagaatggcccactccaaatacgaagtgagatcctgagtctttgggtgcttcatgatttcctaccatattcaggcctaaagacattgaaaaagcatctcaaataaaaggaacattttttttccctcttt

SEQ ID NO: 63831 - DNA, 746 bp, Homo sapiens
atcaggatgtccccgagcagcggagcatggagtaccctaagctgtatgagccgggccagctgaaccttctcttcaacaagcgggagttcttcatctgcatcgcccagggcatctacacctccgtgctcatgttcttcattccctatggggggtttgctgatgccacccgggatgatggcactcagctggctgactaccagtcctttgcagtcactgtggccacatccttggtcattgtggttagcgagcagattgggctcgacacaggctactggacggccatcaaccacttcttcatctggggaagccttgctgtttactttgccatcctctttgccatgcacagcaatgggctcttcgacatgtttcccaaccagttccggtttgtggggaatgcccagaacaccttggcccagcccacggtgtggctgaccattgtgctcaccacagtcgtctgcatcatgcccgtggttgccttccgattcctcaggctcaacctgaagccggatctctccgacacggtccgctacacacagctcgtgaggaagaagcagaaggcccagcaccgctgcatgcggcgggttggccgcactggctcccggcgctccggctatgccttctcccatcaggagggcttcggggagctcatcatgtctggcaagaacatgcggctgagctctctcgcgctctccagcttcaccacccgctccagctccagctggattgagagcctgcgcaggaagaaa

SEQ ID NO: 63832 - DNA, 1774 bp, Homo sapiens
gggagactacctgcaggccagaattcactccctcaagctgcaggctggggctgtgggcagggtggtggattaccagaatgggttttacaaggttttctttactttgctatggccaggcaaagttaaagtatccgtatctctggtccaccccagtgaagggatcagagttcttcagcgcttacaggaagataaaccagacagggtctatttcaagagtctcttccgttcaggaagaatttctgaaactactgagtgcaacgtgtgtcttcctgggaatctgcccctgtgtaactttacagacctctacactggggagccctggttctgcttcaaaccaaagaagctcccttgcagcagcagaattacccatttcaaaggtggatacctgaaaggtctcctaaccgctgcagagagtgctttcttccagagtggtgtcaatatcaaaatgccagtcaactccagtggacctgattgggtaactgtgattcccaggagaataaaagaaactaacagtctagaactatctcaaggctcaggaacttttccttctgggtattattataaagaccagtggaggcccagaaagtttaagatgcgtcagtttaatgaccctgacaacattacagagtgcttacaaagaaaagtggtgcatttatttggtgactcaacaatcaggcaatggtttgaataccttactacatttgttccagatttagtggagtttaacttgggtagtcccaagaatgtgggtcccttccttgcagtggaccagaagcacaacatcctgctcaaataccgctgccatggtccacccatccgcttcacgactgtctttagcaatgagctccattatgtggcgaatgagctgaatggcattgtgggagggaagaacacagtggttgccatagctgtatggtctcacttcagcaccttccctttggaagtgtacatccggcggctcaggaacatccgtcgagcagtggttcggctcctcgatcgaagcccaaagaccgtggtggtcatccggacggccaacgcccaagagctgggacctgaggtgagccttttcaacagcgactggtacaactttcagctggacaccatccttcggaggatgttctcaggggttggagtatatctcgtcgatgcctgggagatgaccctggcccattatctaccgcacaagctgcatccagatgaagttattgtgaagaaccagctggacatgttcttgtcctttgtgtgccccttggaaacctagcctgtcttggaagggactggaggaatcatattcaatgaccttctcaattgacctgagttacagaaagtggccccagtgagagatgactgcccttaataagtataaaatttcaaaaagatctggacttaatatgatgacttataaggagcttaaaaaatgcaggttacatttatatctacctataggattttatccaatgttgacttagccatggtagaactcttaactgcatctacacactatattgctcttgtaaccaaagatgctaatgagtgtatttgaattagcttctcctaggaggggtgactactttgctaaagagtatgaaaaatgttttgatggaagggacaagtttggttggtagtagagtgtttgtagcttatctggtaaaggaaattgagtgcatctgcatgcatagcacaagtaatccatcttctggcggttaactagagaaagcttatagtcagaggctcttgtgaatgcactgaagactgctgtgtctcaggagtttct

SEQ ID NO: 63833 - DNA, 1742 bp, Homo sapiens
ggcacgagcttcccccattgatgttttaatcttgacaacggatggatgttatgctatggttggccaggttcatggcggcttgatgggaattattcagagagctatggtcaaggcttgtcctcatgtctggtttgaacgctcagaaatgaaggatcgacacctggttactaagagactaaaagaacatattgctgataagaagaaactacccatactaatttttcctgaaggaacttgcatcaacaatacttcagtcatgatgtttaaaaaggggagctttgaaattggaggaaccatacatccagttgcaattaagtataaccctcagttcggtgatgcattttggaacagtagtaaatacaacatggtgagctacctgcttcgaatgatgaccagctgggccatcgtctgtgacgtgtggtacatgccccccatgaccagagaggaaggagaagatgcagtccagtttgctaacagggttaagtctgctattgctatacaaggaggcctgactgaacttccctgggatggaggactaaagagagcaaaggtgaaggacatctttaaggaagagcagcagaaaaattacagcaagatgattgtgggcaatggatctctcagctaagaggacggatgacagcctttagatctagaactagcccttagaaatggaatggctttttttgttttgttttgttttattgttttgtttttattattgttaatcttttctacagaatgattgtctctacctctttatgccagaggcagaacctacaggtgccctttttggcttttgttgttgttgtaacattagccccatggattgtaaggtggtttactgagttaaaacagattctgcttttgtaaaatgatggcatcactgtggactgaatgaaatatttgtatagaaaaaagtgcttgaaaagtgtgtttggaactcatcgatagggtaattctccaaaaatgcccaaactctctttctgtaattagccttgccactttcttcagtcacttaaatggtgagattacacatcagtgcaagatgaccattatggttatggtctactgcaaggttgaaaggaaaaatggaggattgtatttaggaaaagggacaactttgtggccacctgctctgaaagtcaaaaggaaatgtaaattagtgtcattagtgtgttggaagagaaatactattcagtaagcttcgccaaagaaaagtgagtcaaagttaatgtgtgtgtgcatttatatgtaggcagctcgtagaccacattttagccagcaactggtaacaaagagcttagttttccttgtttgaatgctgtagatctgtacctagtacccctcccatctactgatttgtttgtttttgtaaccaaacacattttcagatagaaggagccttaaaaaaaaaaaaaatcacattgagtaacttcagtataaatgaatgaaaggggggggagctacccctcatcctccacccctttgggctttttattcccgaattttcccagtcttttaaacaaaaaaaggactgatataattattttttggaaactgagccttaattttttttagagggggaaataagttttccccaactcacacagcataagcaatgtttgacagcaatataatgccgttgtaaactactgagagtattgtatctgttctggtaaccatgtacagaatgtgaaactgtcttatgaatataaataaattctatatttctaaaaaaaaaa

SEQ ID NO: 63834 - DNA, 2049 bp, Homo sapiens
ttttttttttttggtgagtttcaatattttattaaaatagcatatttaaccatggttaaccaagaatatgttaactttgtgccccccaacctgcccccgccccagatacgcagcaaaacacagtagtgatttcaaatatccttgatcatgaccaacaggaatatttcaaagtcaagtttgcaactcaaaagtagaccttggaaaaactttgaattaaaagagaaacataaagctctcacacagaattcttttatctgccctaaaatcaatgccggcgcaccaccacctgacaatactgctaggatttttctttatgcatagtataacgactcatttattaagtacccacttttataaataaaatcggcattttttgtcccgcttaatgttccttttcagcttcacaaagaaaccagtaaataaaactgtcaacgacagtcacaacatatgctctcacagcaagataaaaaaacttgaaaatacgcagagatgcatctacgctattttacataaaaagagagattcaaaaagtgcaaggcaaaatctgcagttttttgaggggagcttttaggcacatccatttcattaaagcaagcttcagaatgaaattccagtttgttcttcatgacacctgttaaagtctttctttaaacgacaacaaaaaaaagccaaaaatacatcccatcaagtgtacaatggtagtcttgtgtcctaaaagtgaggagttcagctgtggcgagtccgtcctttctttattctggcaggctttggtttggggatgtactgattatttgcctggtactcgagttctttacggaagtagtgaattgctttgtttaaaccttcctccagcgggaccacgggctcccaccccagcatcagctttgcttttttgatgtctggttttcttttctgtgggtcatcctgggcttcggagagaaactgaatttcacttccgctaccaacaaggtttttaattaactgagcaaattctaggattgtgtgttcttctgggttccccaggttgaccgggctgctgacgttgctgttcatgagagccacgaggccattcactagatcgctgacgtactggaacgcccttgtctgagacccggatccgtataccgtgagtggctccccctggagcgcctgcaggatgaagttgctgactactcgcccatcgttcatgtgcatgcgtggcccaaaggtgttgaagattctggccactcgcacttccacgccttcctgcttcatgtaggcatagcacatggtctctgcaacacgtttgccttcatcgtagcaggcccgaggtcctattggattcacgtggccccagtaatcctcactttgagggtggacttcaggatctccatacacctccgatgtggaggccaggagcagacgggcaccgactcgttttgccagccccaacatgtttaatgtcccaatcgtattggtctttaatgtcttgataggattatacatgtagtttggaggggaggctggagatgccagatggtatatctggtcaacctcgatgtagaggggctccaccacgtcgtggttaatcaactcgaagttctcatgtccgatccagtgctccacgtttctcttcctgcccgtgaagaaattgtccaccacggtcacctcgtggccgtccatcatgagtttgtcagttagatgggagcccacgaaccctgcgcctcctgttatcaaaattcttttccgatccttttctgataaaaactttactggtgggtatttctgggtaaagcttttttctaaatctctgattttctctcttagtggttcaaccatctcttcaatcttgctttcaatttttagttcaccattttcctggatagacctgttgagtagaaagctcatattaacgaagttgccccaaacagaggcgacgtaggccagcaaggcgatgcccagcagcagcttcatcctcctgcggttgacggcagacacgaggcgcagcagcgccttgctcaccatccccgggagccgcgcgggtccagggccctgccgcgcgggggcccg

SEQ ID NO: 63835 - DNA, 1771 bp, Homo sapiens
gtttgctcacaatcttaaatgaacaggtctccagctatagaggtcctgaaaagagggagaaggcattggaaactaactgtagctctggatttcagtttcagcggatgttctctccagctttcaacagaccttgcactcaactttgctgaatcccattccaaaatgtcggccagcgctctgcaccttactatctcatgacttcttcagaaatgattttctggaagttgtgaatttcttgaaaagtttaacattgaagagtgaagaggagaaaacggaattctttaaatttctgctggacagagtcagctgcttgtcagaggaattgatagcttcaaggttggtgcctcttctgcttaatcagttggtgtttgcagagccagtggctgttaagagttttcttccttatctgcttggccccaaaaaagatcatgcgcagggagaaactccttgcttgctctcaccagccctgttccagtcacgggtgatccccgtgcttctccagttgtttgaagttcatgaagagcatgtgcggatggtgctgctgtctcacatcgaggcctacgtggagcacttcactcaggagcagctgaagaaagtcatcttgccacaggttttgctgggcctgcgtgatactagcgattccattgtggcaattactctgcatagcctagcagtgctggtctctctgcttggaccagaggtggttgtgggaggagaacgaaccaagatcttcaaacgcactgccccaagttttactaaaaatactgacctttctctagaaggcgatccattttctcagcctattaaatttcccataaatggactctcagatgtaaaaaatacttcggaggacagtgaaaacttcccatcaagttctaaaaagtctgaggagtggcctgactggagtgaacctgaggagcctgaaaatcaaactgtcaacatacagatttggcctagagaaccttgtgatgatgtcaagtcccagtgcactaccttggatgtggaagagtcatcttgggatgactgcgagcccagcagcttagatactaaagtaaacccaggaggtggaatcactgctacaaaacctgttacctcaggggagcagaagcctattcctgctttgctttcactcactgaagagtctatgccttggaaatcaagcttaccccgaaagattagccttgtacaaaggggggatgacgcagaccaaatcgagccgccaaaagtgtcatcacaagaaaggccccttaaggttccatcagaacttggtttaggagaggaattcaccattcaagtaaaaaagaagccagtaaaagatcctgagatggattggtttgctgatatgatcccagaaattaagccttctgctgcttttcttatattacctgaactgaggacagaaatggtcccaaaaaaggatgatgtctccccagtgatgcagttttcctcaaaatttgctgcagcagaaattactgagggagaggctgaaggctgggaagaagaaggggagctgaactgggaagataataactggtgacaatagatgtgagttaaactttaggaaaaaggattccctttttttaaaaaaaatcaatacctcaaaagcaggctttgggacaagaaaaccccaaagtggcctgcttttcccatcccaggagctcattatccagtctgtgccaactgaagtaggagactgactgtgagtgctggctaaaagccctgggtggtgaggctcacagtactggtttccaggaggaagagcctttgtgct

SEQ ID NO: 63836 - DNA, 2283 bp, Homo sapiens
atggcggcggttgtcgcggcgacgaggtggtggcagctgttgctggtgctcagcgccgcggggatgggggcctcgggcgccccgcagccccccaacatcctgctcctgctcatggacgacatgggatggggtgacctcggggtgtatggagagccctccagagagaccccgaatttggaccggatggctgcagaagggctgcttttcccaaacttctattctgccaaccctctgtgctcgccatcgagggcggcactgctcacaggacggctacccatccgcaatggcttctacaccaccaacgcccatgccagaaacgcctacacaccgcaggagattgtgggcggcatcccagactcggagcagctcctgccggagcttctgaagaaggccggctacgtcagcaagattgtcggcaagtggcatctgggtcacaggccccagttccaccccctgaagcacggatttgatgagtggtttggatcccccaactgccactttggaccttatgacaacaaggccaggcccaacatccctgtgtacagggactgggagatggttggcagatattatgaagaatttcctattaatctgaagacgggggaagccaacctcacccagatctacctgcaggaagccctggacttcattaagagacaggcacggcaccacccctttttcctctactgggctgtcgacgccacgcacgcacccgtctatgcctccaaacccttcttgggcaccagtcagcgagggcggtatggagacgccgtccgggagattgatgacagcattgggaagatactggagctcctccaagacctgcacgtcgcggacaacaccttcgtcttcttcacgtcggacaacggcgctgccctcatttccgcccccgaacaaggtggcagcaacggcccctttctgtgtgggaagcagaccacgtttgaaggagggatgagggagcctgccctcgcatggtggccagggcacgtcactgcaggccaggtgagccaccagctgggcagcatcatggacctcttcaccaccagcctggcccttgcgggcctgacgccgcccagcgacagggccattgatggcctcaacctcctccccaccctcctgcagggccggctgatggacaggcctatcttctattaccgtggcgacacgctgatggcggccaccctcgggcagcacaaggctcacttctggacctggaccaactcctgggagaacttcagacagggcattgatttctgccctgggcagaacgtttcaggggtcacaactcacaatctggaagaccacacgaagctgcccctgatcttccacctgggacgggacccaggggagaggttccccctcagctttgccagcgccgagtaccaggaggccctcagcaggatcacctcggtcgtccagcagcaccaggaggccttggtccccgcgcagccccagctcaacgtgtgcaactgggcggtcatgaactgggcacctccgggctgtgaaaagttagggaagtgtctgacacctccagaatccattcccaagaagtgcctctggtcccactagcacctgcgcagactcaggccaggcctagaatctccagttggccctgcaagtgcctggaggaaggatggctctggcctcggtcctcccccaaccctgcccaagccagacagacagcacctgcagacgcagggggactgcacaattccacctgcccaggacctgaccctggcgtgtgcttggccctcctcctcgcccacggcgcctcagatttcaggaccctcctcctcgcccacggcgcctcagacctcaggaccctgccgtctcacgcctttgtgaaccccaaatatctgagaccagtctcagtttattttgccaaggttaaggatgcacctgtgacagcctcaggaggtcctgacaacaggtgcctgaggtggctggggatacagtttgcctttatacatcttagggagacacaagatcagtatgtgtatggcgtacattggttcagtcagccttccactgaatacacgattgagtctggcccagtgaatccgcatttttatgtaaacagtaagggaacggggcaatcatataagcgtttgtctcaggggagccccagagggatgacttccagttccgtctgtcctttgtccacaaggaatttccctggacgctaattatgagggaggcgtgtagcttcttatcattgtaactatgttatttagaaataaaacgggaggcaggtttgcctaattcccagcttgaaaaaaaaaa

SEQ ID NO: 63837 - DNA, 2060 bp, Homo sapiens
tttcgtctgaggctgaggctggggaacatcgggcagcatgagcggctgcgggctcttcctgcgcaccacggctgcggctcgtgcctgccggggtctggtggtctctaccgcgaaccggcggctactgcgcaccagcccgcctgtacgagctttcgccaaagagcttttcctaggcaaaatcaagaagaaagaagttttcccatttccagaagttagccaagatgaacttaatgaaatcaatcagttcttgggacccgtggaaaaattcttcactgaagaggtggactcccgaaaaattgaccaggaagggaaaatcccagatgaaactttggagaaattgaagagcctagggctttttgggctgcaagtcccagaagaatatggtggcctgggcttctccaacaccatgtactcaagactaggggagatcatcagcatggatgggtccatcactgtgaccctggcagcgcaccaggctattggcctcaaggggatcatcttggctggcactgaggagcagaaagccaaatacttgcctaaactggcgtccggggagcacattgcagccttctgcctcacggagccagccagtgggagcgatgcagcctcaatccggagcagagccacactaagtgaagacaaaaagcactacatcctcaatggctccaaggtctggattactaatggaggactggccaatatttttactgtgtttgcaaagactgaggtcgttgattctgatggatcagtgaaagacaaaatcacagcattcatagtagaaagagactttggtggagtcactaatgggaaacccgaagataaattaggcattcggggctccaacacttgtgaagtccattttgaaaacaccaagatacctgtggaaaacatccttggagaggtcggagatgggtttaaggtggccatgaacatcctcaacagcggccggttcagcatgggcagcgtcgtggctgggctgctcaagagattgattgaaatgactgctgagtacgcctgcacaaggaaacagtttaacaagaggctcagtgaatttggattgattcaggagaaatttgcactgatggctcagaaggcttacgtcatggagagtatgacctacctcacagcagggatgctggaccaacctggctttcccgactgctccatcgaggcagccatggtgaaggtgttcagctccgaggccgcctggcagtgtgtgagtgaggcgctgcagatcctcgggggcttgggctacacaagggactatccgtacgagcgcatactgcgtgacacccgcatcctcctcatcttcgagggaaccaatgagattctccggatgtacatcgccctgacgggtctgcagcatgccggccgcatcctgactaccaggatccatgagcttaaacaggccaaagtgagcacagtcatggataccgttggccggaggcttcgggactccctgggccgaactgtggacctggggctgacaggcaaccatggagttgtgcaccccagtcttgcggacagtgccaacaagtttgaggagaacaccttctgcttcggccggaccgtggagacactgctgctccgctttggcaagaccatcatggaggagcagctggtactgaagcgggtggccaacatcctcatcaacctgtatggcatgacggccgtgctgtcgcgggccagccgctccatccgcattgggctccgcaaccacgaccacgaggttctcttggccaacaccttctgcgtggaagcttacttgcagaatctcttcagcctctctcagctggacaagtatgctccagaaaacctagatgagcagattaagaaagtgtcccagcagatccttgagaagcgagcctatatctgtgcccaccctctggacaggacatgctgaggcaggggacagtgtcccctgctaccgcccgcccctacccatggcccgttgctggatgactgttactcttttttcagaaggtgttgggattatcacaggttaagccttttgttccccgtctgcacctgaagggttgtcgcctggcctggcagagcct

SEQ ID NO: 63838 - DNA, 1467 bp, Homo sapiens
cccacgcgtccggcatctaccttcccgtggttaaagagaaactggaacagtaaatggcagtatgtataatggttaagagcaagaccggaggctcagccagttcatcaaagcctacaagacgggcaacatggaccaggcgctgtccctgtggttcctcctgggctggattggcggagactcctgcaacctcatcggctccttccttgctgaccagctgcccctgcagacctacacggctgtgtattatgtcttggcagacctggtgatgctgacgctgtacttttactacaagttcaggacgcgcccctctctgttgtctgcccccatcaactccgtgctgttgttcctcatggggatggcgtgcgccacaccgctgctgagtgctgctgggcccgtggctgcccctagggaagccttccgggggcgggcgctcctgtccgtggagtcgggcagcaagcccttcacccggcaggaagtcattggcttcgtcatcggctccatctccagcgtgttgtacctgctttcccggctgcctcagatccgcaccaacttcctccggaagtccacccaggggatctcctactctctgttcgcgctggtgatgctggggaacacgctgtatgggctgagcgtgctgctcaaaaaccccgaggagggccagagcgagggcagctacctgctgcaccacctgccctggcttgtgggcagcctgggcgtgctgctgctcgacaccatcatctccatccagttcctggtgtacaggcgcagcaccgccgcctcggagcttgagcccctcctccccagctgaccagaaccaggctgagcgcaggaggacaggcaccaccggatgccacaccaggcaggaggaggtgtggacagtgatggtacggcggccctgcatcagcctgcgggtggcctctggatcctccgtggaccgaaccgtccccccaggaacacaccttcaggtagaccccgaagcctcaaggccggggctggagcggagaccccagggcctctcaggagacagtgaggctgcccctcctaccacctacctcattctgcctactcaccccaggggccacagccacagcctgctggactcaggactgtcctgtcaactccagacaactgaataaacaggccgggtacagtggctcgcacctgtaatcctagcactttgggaggccgaagcgggtggaccacttgacgtccgtagttcgagaccagcctggccaacatggtgaaaccccatctctactaaaaatacaaaaattagccaggtgtggtggcacacatctgtagtcccagctacttgggaggctgaggcaggagaactgtttgaacctgggagacagaggttgcggtgaaccgagatcgtgccactgtactccagcctgggtgacagagtgagactccgtctcaaaaaaaataaaaaagataaccgaggaaacggtaaaaaaaaaaaaa

SEQ ID NO: 63839 - DNA, 1498 bp, Homo sapiens
cgtgttcctcagcgagcaggatgaggtgctactgatccaggaggccaagagggagtgccgggggtcgtggtacctgcctgcggggagaatggagccaggggagaccatcgtggaggcgctgcaacgggaggtgaaggaggaggcggggctgcactgtgagcccgagacactgctgtccgtggaggagcggggcccctcctgggtccgcttcgtgttcctcgctcgccccacaggtatggcccacctggaggcagtgtgaacagggccagttgacacctttcccccagctcctcggtgaggtgagcccctctacagccagtcctgttatggctggcacagcctggcatgggcagattccagcctttgggctgggggcctctctcctgggtcagggatgtctgttgactctgccagagctgcacttctctccacacagaccctccctgccccatcccccacatctcccccaggtggaattctcaagacttccaaggaggccgatgcggagtccctgcaggctgcctggtacccacggacctccctgcccactccgctgcgagcccatgacatcctgcacctggttgaactagccgcccagtatcgccagcaagccaggcaccctctcattctgccccaagagctaccctgtgatctggtctgccagcggctcgtggctacctttaccagcgcccagacagtgtgggtgttagtgggcacagtggggatgcctcacttgcctgtcactgcctgtggcctcgaccctgtggagcagaggggtggcatgaagatggccgtcctgcggctgctgcaggagtgtctgaccctgcaccacttggtggtggagatcaaggggttgcttggactgcagcacctgggccgagatcacagtgatggcatctgtttgaatgtgctggtgaccgtggcttttcggagcccagggatccaggatgaacccccaaaagttcggggtgagaacttctcttggtggaaggtgatggaggaagacctgcaaagccagctcctccagcggcttcagggatcctctgttgtcccagtgaacagatagagaggtggaggaggtgacagggagctaggcagccgtgctccctccagtgcggacttgtctccctctgagggaggcaagaggctggcgatcagggatcttgttgcattgggagcaggggcggctctcctggtccccaggagagaatgctttgaggagcattcctctagattgcacaagggacagtgcctttaaccaagcgaggagtccaaagctcaggacctgactaccctgagggcacgctgacgcctctccccagggggatggggagctttctgcacccccagtggcatctcctcatcacgttctgtgccgtccttgggaaaggcctgcattctgatccttccaggcccttcgagcatggaggggcactggggaaggtcccccgagggaggagcacgttgctgagtaaagaggtgttactcaaaaaaaaaa

SEQ ID NO: 63840 - DNA, 778 bp, Homo sapiens
ctcgcacccatccccgagtcctcctcggactacctactgcccaaggacatcaaactggcggtgctgggcgccggccgcgtgggcaagagcgcaatgatcgtgcgcttcctgaccaagagattcattggagactatgaaccgaatacaggcaagctgtattcacggctggtctatgtcgagggggaccagctctccctgcagatccaggatactcccgggggcgtccagatccaagacagcctcccccaggtcgtcgattccctgtccaaatgcgtgcagtgggccgagggttttctgctggtctattccatcacagactatgacagctacttgtccatccgacccctttatcagcacatccggaaggtccaccctgactctaaagcccctgtcatcatcgtgggcaacaagggggaccttttgcatgcccggcaggtgcagacacaggacggtattcagctagccaatgagctgggcagcctgttccttgaaatttccactagcgaaaactacgaagatgtctgtgatgtgtttcagcatctctgcaaagaagtgagcaagatgcacggcctcagtggggaaagaagaagagcctccatcatccctcggccccgctctcccaacatgcaggacctgaagagacgcttcaagcaggctctgtctcccaaagtcaaagccccctctgcactggggtgaactatctcagacagatgcctctcctttttaatacgcatttgtgcagctaaaagactgggcttctcgctttttaatcacacat

SEQ ID NO: 63841 - DNA, 1278 bp, Homo sapiens
gctttatcgaaagctgttaaattctcaggttgtcaggttctgccttcaagggttgttggaaaatagtccccatctaatatgtataggagctcttaaaaaactgtgcaatcacccctgccttttgttcaactctataaaggaaaaggaatgtagctcaacttgtgataaaaatgaagaaaagagtctatacaaaggcttgctaagtgtgtttcctgctgactacaaccctctcctgtttactgaaaaggagtcaggaaaactacaggtgttgtccaagctcttagcggttatccacgaacttcgacctactgaaaaggtggtgttggtatccaactatacacaaaccttgaacattttacaagaagtatgtaagcgtcatggatatgcttatacaagacttgatggacaaacaccaatctctcaaaggcagcagattgttgatggctttaacagtcaacactcttctttttttatttttttgttaagttcaaaagctggtggtgtaggacttaacctcattggaggatctcacttaattctctatgacattgattggaatccagccactgacattcaggcaatgtctagagtatggagagatggtcagaaatatcctgtacatatttacagactcctaactacaggtacaatagaagaaaagatctatcaaaggcagatcagtaagcaaggtctttgtggggcagttgtcgacctcaccaagacatctgaacatattcagttttcagtagaagaacttaaaaatttgttcacattacatgaaagttcagattgtgttactcatgatctgcttgactgtgagtgtacaggagaagaagttcatacaggtgattcgttggaaaaattcattgtctctagagattgtcagcttggtccacatcaccagaaatctaactccctgaaacctctttctatgtcccagctgaagcaatggaaacatttttctggagatcatttaaatcttacagatccttttcttgaaagaataacagaaaatgtgtcattcatttttcagaatataaccactcaagctactggcacatagtgaaagattacttctgacattccattgctcttcttttgaaaattagtatggtaattaaatgtactttttgaaaattaatagaattatttaaattacagtatatgttgcaaaatatatcacttttgatacaatagtcaaaattgagtggtttaatgttttgtaaatattaagtgtttaaatgaaaaataaagatgtgcttatatcattgaaaaaaa

SEQ ID NO: 63842 - DNA, 1343 bp, Homo sapiens
acccgggagaaggagggccaagatggcggaagcggaggagtctccaggagacccggggacagcatcgcccaggcccctgtttgcaggcctttcagatatatccatctcacaagacatccccgtagaaggagaaatcaccattcctatgagatctcgcatccgggagtttgacagctccacattaaatgaatctgttcgcaataccatcatgcgtgatctaaaagctgttgggaaaaaattcatgcatgttttgtacccaaggaaaagtaatactcttttgagagattgggatttgtggggccctttgatcctttgtgtgacactcgcattaatgctgcaaagagactctgcagatagtgaaaaagatggagggccccaatttgcagaggtgtttgtcattgtctggtttggtgcagttaccatcaccctcaactcaaaacttcttggagggaacatatctttttttcagagcctctgtgtgctgggttactgtatacttcccttgacagtagcaatgctgatttgccggctggtacttttggctgatccaggacctgtaaacttcatggttcggctttttgtggtgattgtgatgtttgcctggtctatagttgcctccacagctttccttgctgatagccagcctccaaaccgcagagccctagctgtttatcctgttttcctgttttactttgtcatcagttggatgattctcacctttactcctcagtaaatcaggaatgggaaattaaaaaccagtgaattgaaagcacatctgaaagatgcaattcaccatggagctttgtctctggcccttatttgtctaattttggaggtatttgataactgagtaggtgaggagattaaaagggagccatatagcactgtcaccccttatttgaggaactgatgtttgaaaggctgttcttttctctcttaatgtcatttctttaaaaatacatgtgcatactacacacagtatataatgcctccttaaggcatgatggagtcaccgtggtccatttgggtgacaaccagtgacttgggaagcacatagatacatcttacaagttgaatagagttgataactattttcagttttgagaataccagttcaggtgcagctcttaaacacattgccttatgactattagaatatgcctctcttttcataaataaaaatacatggtctatatccattttcttttatttctctctcttaagcttaaaaaggcaatgagagaggttaggagtgggttcatacacggagaatgagaaaacatgcattaaccaatattcagattttgatcaggggaaattctacacttgttgcaaaaaaaaaa

SEQ ID NO: 63843 - DNA, 916 bp, Homo sapiens
gctgctttggacagacactggaaggcaccccagacccctggtggtggtgtaatccgataactttattttaattgaaaatggaggcataacatgtcctagaaaaataaagatttaggatacaaaggagacacagcggcagggctgcccccagggatgagggaatctttggtctgggccggataatgaggacaagggcttgagtcgaggggagctggtgaaggaagacccccgtctccccacagctgccccaccccccgcccctggcaggaaatgccacactggggagggtctccagtctcaggggcgcggggctgcctgtcctccaccttcggattccaggcagttgtgacaacaccagctatcggcagagctattaatagtgtttcagggagtgacagggagagggctctgggggctggaagtccggccctggggcagggtgttccgcttacagctagtaccaagtggagggggcagggcccctgagtcaggaccctgagtcccccacgtatatggcagggcacagcatggggagggctgtaacagagaggcctcccatccaaagggggatggagacctggacaggaggtggccggggatacaacccccagcaccaccagggcttggagaggccacccaggcagaaggatgtggtgactggggtcttcagcaaccgcatttctggggctcccccctcccattcctgtccctgcgtcttcagcaccaatgtcgggagaggccacggggccacactgggtcacagttccaagggctcctccacaggcaccgactggagctgggtcagaaccttggcctcagcttccaacccctcgtcaacctcaccccctgcggtggcccccaggagcagcccctcagggtcggggtctggcagcctcagcacggtgtggggggcctg

SEQ ID NO: 63844 - DNA, 3957 bp, Homo sapiens
atgtcttacagtgtgaccctgactgggcccgggccctggggcttccgtctgcaggggggcaaggacttcaacatgcccctcactatctcccggatcacaccaggcagcaaggcagcccagtcccagctcagccagggtgacctcgtggtggccattgacggcgtcaacacagacaccatgacccacctggaagcccagaacaagatcaagtctgccagctacaacttgagcctcaccctgcagaaatcaaagcgtcccattcccatctccacgacagcacctccagtccagacccctctgccggtgatccctcaccagaaggtggtagtcaactctccagccaacgccgcctcttcagcacctgccacccacaccagctacagtgagggccccgccgcccctgcacccaagccccgggttgtcaccactgccagcatccggccttctgtctaccagccagtgcctgcatctacctacagcccgtccccaggggccaattacagtcccactccctacacccccycccctgcccctgcctacaccccctcccctgcccctgcctacaccccctcacctgtccccacctacactccatccccagcaccagcctataccccctcacctgcccccaactataaccctgcaccctcggtggcctacagcgggggccctgcggagcctgccagccgtccaccctgggtgacagatgatagcttctcccagaagtttgccccgggcaagagcaccacctccatcagcaagcagaccctgccccggggaggcccagcctacaccccagcgggtcctcaggtgccaccacttgccagggggaccgtccagagggctgagcgattcccagccagcagccggactccactctgcggtcactgcaacaatgtcatccggggcccatttctggtagccatgggccgttcttggcaccctgaagagttcacctgtgcctactgcaagacttccctggcagatgtgtgctttgtggaagagcagaacaacgtttactgtgagcgatgttatgagcaattctttgccccgctgtgtgccaagtgcaacaccaaaattatgggggaagtaatgcatgccttgagacagacatggcacaccacctgcttcgtctgtgcggcctgcaagaagccttttgggaacagcctcttccacatggaagacggggagccctactgcgagaaagactacatcaatctgttcagcaccaagtgccatggctgcgatttccccgtggaggctggcgacaagtttatcgaagccctgggccacacttggcatgacacctgcttcatttgcgcagtctgccatgtgaatctggaggggcagccgttctactccaagaaggacagacccctgtgcaagaagcacgcacacaccatcaacttgtaggcggccaaggccgcctgtgctgacgaggcccggagctgctcctgctgctggcaacaaaggattcgggaggctgatgtttcttctgaggggaatggggagagagaggaagcgactgagcccyttggaagtataattttaggttttttcttctgtacacagatcgtgcatttgcatagttcagactaggagccaaatgaagactcaaaaccaagctagttattaatccaagactggaattgtacttcagacatttagagcagaattccaagaactcaaaagtgaaaagcaacaagcagctttcccaaagcgatacacttgctttggtcaccagaggaggacagagcttagagcagctgtggagaatctgaagcattctgcggagttcttaagcgactcccctggcaaacaaattgaagtgccaaacagcacttcgctgcagggtatttctagagtcatagctcgagagcttgttagctgaagccccttaggctttcctcaccaaaaaaggaggtgttattccattactagcgtcatggagctacctctgcgcatcagacttcagaccttgaacaaacttaaaaccttcttgggagcccggacgtccaaagagatgtcttctgggagccactgggcaattgccagggctccaggaagggctctggctcaggttgcagacagctgagaaaagatggccctgtcagccaccctctctcagtctgaaacatccaacatccccagaaggcttagctcctttttgaattgtgatgggaaagtagagttgggtttttccagttttgctctgtggtgtgtgagagatttttttaaaggctttgggttgtctttggcctttgtttagctttaagggttcgttagcatgagtgtccagtcgtgtgcatgaatttcaccccaacttgtgactgctcacttatgacgtctcccccagtaccctccatctcaaataggcttggtggcctgtggaaaagaagagagacagagagacagtgtctgaaacaggatggcagaataggctcacatgcccaaactctgggtggggaagaggaaacttactttctgccaccctcagtaagaacacacgaggaggcaggacctcccaccttcaggtctgcatcatccttttcaaatgttcctttaaatgcagcacactgagtttgtacaattgtgttaactgctggaagggacagatgcactgatatatatgcatttgctgttttggccaatattttgaaaatgtatgagctgagttgatctagctattatttaagtatttattgaagtagaggggccttcaaactactttatactagtgatagtttgagttaggtaagcatcttaaagctgtttggtgataaagaaggcagcttaaattctgtggttggaaacagtgtagtcgcttccctttttaggaagccctgttaatatgctcattgaaaacatggcattgaagcaggcacttgcgtggatgtttctcacttgagcacgatatttaggctctcttccaactcactctattctgtcctcactcctgttttggatttttctctttgcatgtttgaaatgttttatgggaatgtattagaactcttttcttctaaggactgagacttccaggggattgccatcttacctgtctcttctccatgagggagaaggaagcagctagctatgtccctagctgcaggaagcccctattttttccaagcacgaagccaccagtctcccccagggagcatcaggaagggacatggatgtgctcctgccacagggcccttcctacctttggatctgtgagaaggtgaatacaaagcagcaggcagagtaaaatctgctgggactgcctggagatttgtcaggagctgcagacaagtaccttggagcattctgttatttttggaaagttcaaatatgcagggacaaggaggttgctgactgtactgacaggctctaagtcattttctccaaaaactatctattcaattatcaggggctggtcttgaggaaggaaaaaaaaaaaaaacgtccccaaaattcagtttccaaaatttttttttaaggggtttacacacacacacacacacacacacacacacacacacacacacacacacactattaaaaagtgttttttttttaaaaaaaaaagtaaaatttctgaggggggggtttcaccaccgtcctttattgaatcaatttttctacatttcagagcaagtgtagattctgagggactcctatttgccaaaaagacaaaactagcaaaaaaaaaaaaccaaaaaaccaaaaaaaaacccattaaaagggtaccagaaaaaaaaggaagtttgaaggggggtccactcagggtcgggaagtcgggggaagggccaggagaaaggccgggtcaacctaaagttaacattgggaggccctacaaccctaaccaaaattttcaaaaacccaggggggggagcacacttggaacctacatttttggccccctaatgggggactttaataaaccttttatgggccaggcccaggggctaa

SEQ ID NO: 63845 - DNA, 1368 bp, Homo sapiens
tttcgtcaacgacgctagtaactgcctggcttctccctctggtgtctcccggaaagcgctccgtctggtccgtgcgcgatcacggcccggcgcgtggctcgggctcgggcggagctggagacgtgtggagctgttcgaggactcgcgggtgtgcagtgcacctatgatatgtgttttagaaatagccgttaaactttggtttgaatgaagaatgtctctcaatccacctatatttctcaaacgaagtgaagaaaatagttcaaaatttgtggaaacaaaacagtcacaaactacttccatagcttcagaagatccccttcaaaacttatgtttagcatctcaagaagttcttcaaaaagctcagcaaagtgggagatcaaaatgtctcaaatgtggtggttccagaatgttctactgctatacatgttatgttccagttgaaaatgtacctattgaacagattccacttgtgaagcttccattgaagattgacatcattaaacatccaaatgaaacagatggcaaaagtactgctatacatgcaaaactcttagcacctgaatttgtaaacatttacacgtatccgtgtattccagaatatgaagaaaaggaccatgaagttgcactcatttttcctggacctcagtctatctcaataaaagatatttcttttcatctgcaaaaaaggattcaaaataatgttagaggcaaaaatgatgaccctgacaagccatcttttaaacgcaaaagaactgaagaacaagagttctgtgatttgaatgacagcaagtgcaaaggcacaacactgaaaaaaattatatttatagatagcacctggaaccaaacaaacaaaatattcactgatgagcgacttcaagggttgttacaagttgagttgaaaacaagaaaaacttgcttttggcgccatcaaaaaggaaagccagatactttcctttctacaattgaagccatttactactttctggtagactaccatactgatatattaaaagagaaatacagagggcaatatgacaatcttttatttttctattcttttatgtaccagttgataaagaatgccaaatgctctggagataaggaaacaggaaaacttacacattagtttttaacaagccacttatgtctttttattttgctaacattaataaacttatatttgtgctttgttttttcttaagaaataatcatatataatgcctgtaagaccatttgaaaaaattccagtttcatatatatcacttcatatttcttgaaggaaattgtatctgggggaatttttcagagatactgttgattgaaaaacttacttcagaagttatttgctcagtgaaacctcagtttcat

SEQ ID NO: 63846 - DNA, 2173 bp, Homo sapiens
gcgagaagaaaggaaacaggtttcactaacctggattgtgaatgtatagctacatttctcccccagcttatgagaatgatccacaactatttacccaaagacaaaacaccaccaacttaattcaaatatttaaataatatttgtgaacttatgcctaaatataactgtatttctttgctcatagccctactttcagactttgctattcgtttttgttctaagatgcatggaactaaaatgtggaaagaaaagaatgcgaaaagatcctgttttcagaatttccccccaaagtagagatgctaagccaaatccagaagaacccatagatgaagatgaagatattcaaacagaaagaataagaacagccactgctctgaccacttcaatcttagatgagaaacctgttataattgccagctgtctacacaaagaatatgcaggccagaagaaaagttgcttttcaaagaggaagaagaaaatagcagcaagaaatatctctttctgtgttcaagaaggtgaaattttgggattgctaggacccaatggtgctggaaaaagttcatctattagaatgatatctgggatcacaaagccaactgctggagaggtggaactgaaaggctgcagttcagttttgggccacctggggtactgccctcaagagaacgtgctgtggcccatgctgacgttgagggaacacctggaggtgtatgctgccgtcaaggggctcaggaaagcggacgcgaggctcgccatcgcaagattagtgagtgctttcaaactgcatgagcagctgaatgttcctgtgcagaaattaacagcaggaatcacgagaaagttgtgttttgtgctgagcctcctgggaaactcacctgtcttgctcctggatgaaccatctacgggcatagaccccacagggcagcagcaaatgtggcaggcaatccaggcagtcgttaaaaacacagagagaggtgtcctcctgaccacccataacctggctgaggcggaagccttgtgtgaccgtgtggccatcatggtgtctggaaggcttagatgcattggctccatccaacacctgaaaaacaaacttggcaaggattacattctagagctaaaagtgaaggaaacgtctcaagtgactttggtccacactgagattctgaagcttttcccacaggctgcagggcaggaaaggtattcctctttgttaacctataagctgcccgtggcagacgtttaccctctatcacagacctttcacaaattagaagcagtgaagcataactttaacctggaagaatacagcctttctcagtgcacactggagaaggtattcttagagctttctaaagaacaggaagtaggaaattttgatgaagaaattgatacaacaatgagatggaaactcctccctcattcagatgaaccttaaaacctcaaacctagtaattttttgttgatctcctataaactcatgttttatgtaataattaatagtatgtttaattttaaagatcatttaaaattaacatcaggtatattttgtaaatttagttaacaaatacataaattttaaaattattcttcctctcaaacataggggtgatagcaaacctgtgataaaggcaatacaaaatattagtaaagtcacccaaagagtcaggcactgggtattgtggaaataaaactatataaacttagaattttttaaaaatatgacttttttaccttttacaaaacattctcttgctgaaatatgtgaagggtatattcagtagccaagagttgcatgactacttcacaccagttcatgatacaacaggtatacaggttttcttttataaccaactacaactcaagagtcttctgaaagtgttccagaaattgctttaaaactcaaaagtaaggggccaggtgcagtggctcacgcctgtaatcccagcactttgggaggccgaggcaggtggatcacaaggtcaggagttcgagactagcctggccaatatggtgaaactccatctctaataaaaatacaaaaattagccgggcgttggcatttgcctgtagtcctagctattcgggaggctgagggaggagaattgcttgaacccgggaggcagaggttgcagtgagccatgtgctagtgcactccagcctgggtgacagagtgaga

SEQ ID NO: 63847 - DNA, 1900 bp, Homo sapiens
cttcgtactaaaaccaaaacacccacattcaacatcacccttatttctgaatgggtgatacccattaggagctgtgtcaaacccccttacatgctgttggttggaaatataattatgatgcctgatgcacaaactatagaatgtcataactgtaagctgttcacttgcattgatgcaacttttaatcccactacaagtattctcttggtaagggctagggagggggtatggataccagtttctctacatcgtccatgggagtcttccccctctattcacatagtcaatgaagttcttaaagacatcctcaaaagaacaaagagatttatttttactcttattgcagtccttgcaggactacttgcggttactgcaacagcagcaactgctggagttgccatccgcagttctgttcaaactgctcactatgttgaagcatgccagaaaaattcctccagactttggaattctcaggcgcaaattgatcaaaaattagctaatcagattaatgatctccgccaaagtgtaacctggctgggagatagagttatgaacttgcaacaccgtatgcaattacagtgtgattggaatacttctgattattgcataacgccttatgcttataatcaagatcaacatagctgggaaaatgtctcaagacatttaaaagcctgggatgataacttaaccttggatatttcacaacttaaagagcaaatctttgaggcttcacaagcccatttatccacagttcctggctcacacatttttgaaggcataactaaacaattacctgattttaatcccttcaaatggctcaaacccgtcagaggatcattgttgttactggcattattaatattggtatgcttatgtagtctccttttagtctgcagatgcctccaaggagtccgaaaccaagtccgaagtcaacgacaagcaatgatggcgatggcgatcctagttaataaaaaggggggagatgtgggctgcaagccacccaggtgccgaggcaagagaccgaggacatgagctgttccagtataataaaatataaaacaagaatagttataccagatatagatcttagatatgattatatatgaatataattaatcattagtttgtagtaattactctttattccaatattataataatcctcgctctataatcataacctacgaaaaaccaggccatacagagataggagctgaggggacatagtgaggtgtgaccagaagacaggagtgcgagccttctgttatgcctggacagggccaccagaagggctccttggtctagcagtaacgccagcgtctgggaagacgcccgttgccaggcggaccgtggtctagcggtacgtagaaatgtgaaggaacacccactacttagcagaccgggaaagggagtctccttttcccctggggagtttagagaagactgctcctccacctcttgtggagggcctgacatcagtcaggcttgcctgcaattatccagaggcctaaccgtctccctatggtgctgtgcttcagtggtcacgctcctagtctgccttcatgttccatcctgtacacctggctctgccttctagatagcagtagtaaattagtgaaagtactaaaagtctctaatatgcagaaacaatggcgtaagctgtctttctctctgtctcctctccctctctgcctcggctgccaggcggggaagggccccctctccagtggacacatgacccatgtgaccttacctattattggagatggttcacattccttaccctgcccctttgtcttatatccaataaatatcagtgcagcctggcatttggggccactactggtctccgcgtcttggtggtagtggtcccccaggcccaggtgtcttttcttttaaa

SEQ ID NO: 63848 - DNA, 857 bp, Homo sapiens
tccagataccaaaagctcctcgtccgcctcagtgacgtttacaacaggtcgtttctggagaacctgaaagtgaacacggagaatctgctgcaagttgaaaacacagggaaggtgaaagggcttattcttacccttaaaggagagcctggtgggcagacccaagcatttgacttttactcaagatattttgcaccgtgggttggtgtggctgaagacccagtgacagggtctgcacacgctgttctcagcagctactggtcccagcatctggggaagaaagaaatgcatgcttttcagtgttcccaccgaggaggagagctgggaatttcccttcgtccagacggaagggttgacattagaggaggtgcagctgttgttttagagggcacactgacagcctagaggtggttatgctgtgacgctgctgtctctaaccaccaagtattttctgcttaaaaagaaatgtaaggggctgcctttagcaaatgtgcgtagtagtctacttaatcctcatgttaaaaatcgaaaaatgggccaggcgcagtggctcatgcctgtaatcgtagcactttgagaggccaaggtgggtggatcacctgaggtcaggggttcgacaccagcctggccaacatggtgaaacctcgtctctactacaaatacaaaaattagctgggtgtggtgccacatgcctgtaattccagctacttgggaggctgaggcatggagaatcgcttgaacccaggaggcagaagttgcagtgagcagagatcacaccactgcactccagcctgggcaacagagtaagactccattcacacacacacacacacacacaaaattgaaaagtgaagacattt

SEQ ID NO: 63849 - DNA, 878 bp, Homo sapiens
tttttttttttatgctgaaagtatatttatatatatagatatagatatttacttctctgtagacagtttttactgatgagtcatttgaacgttcaaagaacaaccgattacaatgctacatgaactataccagaaatgagatggatagcttctcaattcatttcacaaagccagcacaaagctgataccaaaacataacaattaaaacacaaaacagagaaccacagatctcacttaaaaacacagatgccaaaatacagaacagaacagtagccgattgaaatcaacaccacataaaaaatgtacaaagctttggcagatacgaaaccaagttgaaaatccaaacttacactcgtggaactggaacacaaacaccaggaacaaaaatgtccccccaccctgtcagtggcctctggccagggaaacacaggagcgagatctctgctacacctattagcggggagggggcctgctggtggggccgtgggcactgtcaccggtgtcaggttcatcctcatctgtgtcttcccactcacactctgcgagcgcttcaaggtaatggaatggccagctctgtggatctttcttatggagcttggccaaaaacctcaggacaagcatcttgctggtttccaggaatgctcgagggccccagaggaactcatactctgcgggctcagtgtaagggattcgcctgtactctaggtacttctgcctgacaaacacttcggtgatgagcttcttagtatttccaaagagaccgtttgtctcccggacatccaaccctaacttgaacagaaaattaaagatcagatcctccctgacacagttgcctttcataaagatgaggctcaagaccaccatcagaaggccaaact

SEQ ID NO: 63850 - DNA, 1263 bp, Homo sapiens
  misc_feature (1)...(1263): n = a,t,c or g
gtaaaagttgccctgcttctgacgaatttagaacagcctcgcacagagtctgagtgggagaacagcttcaccctgaaaatgtttctttttcagtttgtcaatctgaacagctccacattttacatcgcattcttcctcggaagatttacaggacacccaggtgcctacttgaggctgataaacaggtggagactagaagagtgccaccctagtggatgccttattgatctgtgtatgcaaatgggtattataatggtgctaaagcagacctggaataatttcatggaacttggctacccgttaattcagaattggtggactagaagaaaagtacgacaagaacatggacctgaaaggaaaataagtttcccacaatgggaaaaggactataaccttcagccgatgaatgcctatggactcttcgatgaatacttagaaatgattcttcagtttggattcacaactatctttgtggcagcttttcccctagcaccacttctggccttactgaataacataattgaaattcgacttgatgcttacaaatttgtcacacagtggaggagacctttagcttcaagggccaaagacataggaatttggtatggaattcttgaaggcattggaattctctctgttatcacaaatgcatttgtcatagcgataacatctgactttatccctcgcttggtgtatgcttataagtatggaccttgtgcaggccaaggagaagctgggcaaaagtgcatggttggctatgtgaatgccagcttgtctgtatttcgaatttctgactttgagaaccgatctgagcctgaatctgatggcagtgagttctcggggactcctcttaagtactgcagataccgggactaccgtgacccgcctcattcactggtgccctatggctacacactgcagttttggcatgtcctagcttggggncccttccggaaatntagcttttatcattgtctttgagcacctcgtgttttgtataaagcacctcatttcgtatctgatcccagaccctcccaaaagacctaagggatcgaatgagaagagagaagtacttgattcaggagatgatgtatgaagcagaactggaacgtctccagaaggaacgaaaggagaggaagaagaatggaaaagcacaccacaacgagtggccgtgaccatgtagaaaatagtccctttccaggccaaggacctgaattctgtttacttcttctggctgtgcaaaagcacactcaagtgaatgac

SEQ ID NO: 63851 - DNA, 2300 bp, Homo sapiens
ccaggtcagtgttgtctgctacacagcctactctctgtctttgtgtgatttgtcactctttgcagccccaaagtggttctaaaggctaccacaggaaactggacttctaaattcttcagtgacctcaatcccaggttgggggaatgttttttatagatcatcaccgaccgacctggctttcatgatgagagtgccatctaccccgtgggctattgcagtactcgaatatatgccagcatgaagtgcccagaccagaagtgtctatatacctgtcagatcaaggatggtggtgtgcagcctcagtttgaaattgttcctgaagatgacccccagaatgccattgtcagctcttctgcagatgcttgtcatgcagaactgctcaggactataagcactactatggggaaactaatgcctaacctgcttccagctggagctgacttttttggattttctcatccagccatccacaacctgatccagagctgtccaggagctcgaaaatgcatcaattaccagtgggtgaaatttgatgtgtgcaaacctggagatgggcagctacctgaggggctgccggagaatgatgcagctatgagctttgaagcctttcagagacagatctttgatgaagatcagaatgatccccttctgccaggatccttggacctcccagagcttcagcctgcagcctttgtgtcttcttaccagcccatgtacctgacacatgaacccttggtagatactcacctgcagcacttgaagtctccatcacagggtagcccaattcagtcttcagattgaacaagaagggatcagatgccacatcgtttttgtcgtgattaatttaacttaaactaaaattttgggtatatgaaagaaggcagcaattcagaagtaaagaagatactaacgtatttcatcatggaaggtcctgtggtgatggttttccctgggaaaaccttcagctgctttatttttagtaataaatttctcttgtcaattctgtttactttcatcttgtaatcgggatgtaatcttttttgcttagctctgcctgaggtaaagtaaacttcagcctcttataaacaagagtgatagagagctgcaggctgctacaacaaataccatagacaggttggtttataaataacatgaatttatttctcacagttctggatgctgggaagtccaagttcaaggagcgcagattcaatgtctggtgagggcccacttcctagttcttagacagctgtcttcctgcagtgtcctcacgtggtagaagaggaaggcagctctccggggtcccttttataagatcactaagccggttcatgagaggtctgctctcatgacctaatcacctcccaaaggccccacctcccaataccatcacattaggggttaggatttaacatgaattttggggacatataaacattaagtctgtagtagcagcagctgactaacgagggagatagggagattctgacaaacttctactcttgattgtgatcctaattcaaggaatatcaagtcccagcccctgcaacccaggctgctgcttaattttcatgtcagtatcatcaaaatccaatgttctgcttaaactcaagatggaaagtccagtccaaggtacactgttcatctttttcttcacattttgcacatccttcaaggggatctttaacctctttaaccctttgtattgcacctcagataatgtgctttttagctcagtacactgaaaccatatgataacacaaattcacatataattgggggttagtcccatactctataacagacttagtcctgtcttttcattagccatgtaataatataactccatgttccatgcaactggatttttggaccctgttaatagcattaaggtagaggtttactctatcacctaacacctcaacactacctgtgggatgccttagttacccagcagcaggttaccaagggctgtctggaaagggagggacaaaaggacccagaagtagaagaatggggatggagtggtgagaattgaatggttaatgcactgccattcataattgccaattgaggacaacacaaatgggattggtactttatagtaataaatctgaccagcagagggagggatcaggcagcagtgtttagagcacaccacactggccactgtaaactgagaagctaagttaactggtattttatgattttgagtatagtctttttataagttgtattacactttacaatgttaaaaggaaacaaactttgtattattagccaattcggggaaggggact

SEQ ID NO: 63852 - DNA, 1929 bp, Homo sapiens
tgactgtgtatatatatcatataatccatataaatgcagaaacatttattgaaagacatttcgaagccatcgtgtttgtatttcatgttcatgacaataaaacttgtaaacttcagtaacagttaaaccttctttaattatggattagccattaacatttttgaaacgtggaccatttaacctcggcctaccccctccaactgtcctggtgatgagttcattagctaagttaaaattaatttgaactttgatctaaaccaaaacaaatcgggaaaaataaagctgtaaaggaactttatcaagctttccaaaaccaactaaaaattacttgaagttttccgagtgagcattgcctgtgccagtattcttcattataggattataaactcgtttttttcccaaagccgcatgtctacgccaggcagaggagtaattattcagccaatttcatggatggtaaacgatggatataaataattgatagcacctagaggcttccagtttgggtggaaggctaaaagtagaggggaactcactcacttgagaaatgatatttaagtgaataaatagttctcttctatgaaactattactatttagttctctggaaaacttaagtgtattaatgattagaacatcaaatcctaagtaaagaaatgacattttaaatataaaaagccaaactttaaataaatcatagagacctcagacataatataggaaagaattcttttgtccttgtttacactgtgtacatagtacaaatataattttaaagctacatcctataacatttaagaaataacagtagtttcaaaatgcttaagatgaggagaaaaatgccttagaagactaggtttctaaaagtcagaaataaaagtacaagttatttttcttgtatccagcaactttataaagcaacttgagtcctgaagaaaagactgttgttcttttaagaaatgggtcttctcgaattataaactttaacaccattttgcatcgaagaacgagaatatttagtgagtaatgcacctatggtttgcttctctccacacaaatcttgaatatatggagcaatatcttcttctgtccacttctcccttagagagaaaaggctattaaaacgttcctgattatcctcaggtaaatcatctactttcagcaaaaatatgatttctggtctcgagtgtctatccaccagcgctaaacccttaagctgatcaagactagttaccattccttcaggaacactctgctgccacacttcttgaaactcagcgagattgaatttcaccgcattctgaagtagcattcgtgctgctgctctacatattttatcagcatccaactcaaaataaacttcgccttcatctacatatttcttcccataacatttaagacagtgttctatcatttcctctggctccaatggtccgagttcctgaaggcatgtgttcaaaggaactttaccaaaagaccatgattcagaatccacaagctgagttacatgattcagaagtttcatctcataatcaaattcaagaatcctccaataacctccaatcttacaggcatttagaacttgtaattgggtcattatttcttcctcacttgcctgaatttgatcaagcaaatcttcagttgtatattttgagctatttgaatccttctctttttgactgtcaggtccttcatatggattttccatcaaaagtttctttagcttctttaacttgggtctacgtcttcttaattcccaataattattagaaaaaccaaagatctcagtgtgaataatgttacagtgtgaatcttccttcttcaactggtccggagttttacaaccaggaatgaaaagcaacatattggaagtgtctgctatcttcaagtcgtatgttttgtctttactgcacagcacagcttgctcgtc

SEQ ID NO: 63853 - DNA, 2017 bp, Homo sapiens
ttttttttttttccttttaaaaactttatttaaatggagactcttagtcaaatgattggaaaaccaataacgaaaaatagttcttcaggttcttctcctggaaaggcggaggacacaccaaactgcactggccctgtcaggggacacggcaccctcgtgggaccaggctcagccctcggggtggcacgaggtcctgcaggctgcaggaccctcacactccagccccgtctggtgacccaacccgggcccgtggtgcatgctggggaaggccactggccggcccctgggcttcggctcctgaggaggcatggccccacaccctgcccggccataaatatatacagattcctgggcatccagggcaccaggaccgacgcagagctggggtcctgtccctaagcctgtggcacagcgactcttgacatgggagccagggagctgggaccgccgcacccctcccctgcctccctcctggggtcaccaccctcaggcggctgccagctggcctaggacgcggcggaactgctgggtgctgtggcccagctccttgaccctctccaccatgtcctgggccgcggaaggcgatgggtactgcaaggcagcggccttggtggtggccacgatgccgcgcaggaggtcgcacagcaggttgctgtagtgggtcacctggctgcgcacgtcagcagccttggcctgccgtgacagtgtgtccccgatgaacaccagcttgtgggcgctgaggatgacgaacttgctgtgcgccacaaagatcttgggcggctggttggtggccacggcggtaaagaaggcgtccacggcgttggtcagtgtggtcaggttggcctcacactgctccaggtagaagagcagcagctgccggtccgagggccccaggccgcctgttcgccccggggccaggggttgggctggcgtccagttggccaggtcgtggtctatgggccgtgacacctcctgttccagtcgttcaaactgcttcagctgctgcaactccagctggctcttgccctgccgcgtgatgctgcccttttccagcagctccttctgggtcttctcaaactcctccttcccctgtaggtggacgtagtcatagtcctccatccagcccccctcgctgttctcgtactgcccatctggcgagtcctgggaggtgaacttagggggtgagggcaggggtcgtgactggatgctgctggtcttgtcagtggggttggggtgcagggtgccacccccctcaggccccggggcagtggccttggtccgtctgaagagcagtgaggcattgccgtgcaggaaggaggccagctgcttggcgtcctcgggcacagcccgcgagcaggccaccagccggtccaggtcctcaagggtggctccagagcctccccggccagcgtcgagggcctgaccatgtgccaccagcgtctggtgcacgtcctccatcttctgcagctgccggctaagcttggcatgcagggcacggtcagatgtgtgggcagcattgcccaccgcgctgcgggcaaactccaacagctcgtggacggcactctggacggcggccacagcagcctgcaggtcctgcaccagcggctcctgtggctcagaggggctacgccagctcccagtcgcaccggcgctgcctgccaggtccagaaggtgggcaacggtggcgctcacaccctgctgcagccgtgccagggcctccacagcaacttccagctccaggggttcccggcccggccctgccacctccaaggaggacgcagactggctgctgcgtgtgctgccggtgctggaggccgacaggcgcttgccctctgccggggcttcacgttcagctgggggaggcaccgcatacacaccactgtcgaccacgccaccatcagccacctcaggaggaagcacccgttcacggggcacatcgtacagggtgcccgggccaggccgccgcaagccagggggcacgtcgtagaggtcaggagccgggggcggcacgtcatcc

SEQ ID NO: 63854 - DNA, 1562 bp, Homo sapiens
ttttttttttttacttgaccgtaggacatattaagatgtttattatttactaagagtaacatgtatacatttgcagtaatttgtacaatccaactacattacaattcacagtaacatacactagctctaacctgccttggatacaattaagtctcctcaacacactattttatcgccaaacttacattctggcttttataatcattttgcaacacctggtacagtatacacctatagctttgccatagaaatgcccctaaatgcccttcagagagcagaggtgaatactttctcatgaagaaacgccaacttttctaagcgagttcgtttcagtagtgggagccattcccagtaggataactctaccacacggtagccaagccgagccagctgccgcctcttcatattgtgcagtccaaggagatccctggagccatagcaatactggttcctgtttgtgaactgaacagccagcttcattcttggggtctgcatgcaggctgcggggcacaggccagccatctccatggcccctgatttatctgctacattgcaaaggaagccccccagaggtacagctgccttattctccaactccatgggctgctgcccaggctctgactcagttttgccctggaaatgtcctcttgctttcccttttagtaacttattcatcaaatcatctgtaaggctgactcccacatgctcaagccttaatttggctacattttcagccggcgtggcttctctattaaatggtaatggcttcaggttaacatcaagctggacctctaagtcagaagatcgggtatgaggcaaaatcatatggtgcttgacgtactggggcccccccagcatggtctccagtaaaaagacagtttctaagaattcaggctttgaattcatatccttctctgctaaataccacagcaattcagacccctcttgctgaaggtgagtactaagacgattgcctctgtaatctggacactcaatgccaactgtaccatcgagggtatatagttccttaaggaggtcaaacttagttctctcctgagctaacctgacaaaccctggactgagagcgaaatcaattaactctactggaaagtactccaaaaatgccaggcccagcaggcaggtgggcaggtgttctgggtactggttgaattcaggcatctttctgtgaatctcacttatcaggctggagtaaaattcttctgcattgggtggcttataattcagagttccaaatgaccacagaatcttggcaacatctttacttcgacagtgtgccactctaggaggcaaagacgcagccactgcattcattactccttcattcaggaagcgtaaggccgagcagtaaagagtcaggtgcatgacaccttgaactcccagggaaggaattcgctgaggagctatctctccaatctgcttcatgaaattgatgtgatccacgtgagtgaaacggaacattttaacaatattcactaaggagcgactactcagatgctgaatgttagcacaagccaagtctcccattttccgtaggacatatt

SEQ ID NO: 63855 - DNA, 2931 bp, Homo sapiens
caccagatcatctagtcaatatatagaatcattttggcagtcatcacaaagtcaaaacttcacagctcatgataagcaacgttcagtgctaagctcaggatatcaaaaaactccccaggaatgggccccacaaactgcaagaataaggaccaggatgcaaaatgacagcattctgaaatcagagcttggaaaccagtcaccatcaacctccagccgacaagtgactggacaaccccaaaatgcatcttttgtcaagaggaaccggtggtggctacttcctctgatagctgctcttgcctctgggagtttttggttctttagtactcctgaggtagaaaccactgctgttcaagagttccagaaccagatgaatcaacttaagaataagtaccaaggtcaagatgagaagctgtggaaaaggagccaaacattcctggaaaaacatcttaatagctcccatcctcggtctcagcctgctatcttactgctcactgctgcccgagatgctgaagaagcacttaggtgtctgagtgaacaaattgctgatgcctattcttcttttcgtagtgtccgtgccatccggattgatgggacagataaagctactcaagacagtgatactgtcaaactagaggtagaccaagaactgagcaatggatttaagaatggccagaatgcagctgtggtacaccgctttgagtcatttcccgcaggctctactttgatcttctacaaatattgtgaccatgaaaacgcagccttcaaagatgtagccttagtcctgactgtcttattggaggaagagacacttggaacaagtctaggcctaaaggaagttgaagaaaaagtaagagattttcttaaagtcaagttcaccaattctaacacacccaactcctacaatcatatggacccagacaaactgaatggcctctggagccgtatttctcacttagttctgcctgtgcaacctgaaaatgccctgaaaaggggcatctgcttataagaagtgagagagaagaaaaatcatgtcccaagttctgagaattgttcacactttctaaccagagacagaattcagagctctttttgaaagaactagtttctttttaaagaagttaagtgcttacataaacatggaacatataaatcattcattcaacctaattatctgtgatatgagagaatcatttcagtttccattgagagctctgttaaaggtatcttaggagtgcagattatatgcagttccttagagaatctgttttgattctgggctgagttattacagttatggtatgaccagtgagagggatttgtgtcctttcttatgaaccttcctgattttttaacttagatttctcactaagtttcctgagttattagtaagattgctccctaaatgtaaccagggatttttccattatgttcccttttataccatttaggtgtgagttccttagcttctgcctataggaacataagtaatgaaaggtcatctaggtgtgtgtttggaatttttttcttttgttttttggaaaatggaaagaacaaggcaaggaaggaaaattaatggggaagctgaagggaggaaatgttacagtaatccactgagatgtagtttagtcaaacataggtatatgaactgttaatcttggtggattccgttgggatttgttttttacatctcctttttccttccttgaagaaaaattcttggctgtcccaaggattcttcatgtatattgcaaaatttaatatatttgttcacttgagtcttaagagtaggtcaggccaaggcaggtggatcacctgaggtcagaagttcaagaccagcctggccaacatggtgaaaccccctctctactaaaaatacaaaaattagctgggcgtggtggtgcatgcctgaaatcccagctacttgggaggctgaggcaggagaattgcttgaacccgggaggcggaggttgcagtaagccgagaccatgcttattgccctccagtctgggcaacaaaaatgaaactccgtctcaaaaaaaaaaaagtaggtcaattcgtaacagtttatttgggacacaccctgaagcttttgttttgaattaaaaaatgagtttcaggaattgacaaaccatttgttaaccagctgtcctgggctattgaagaagatttcattttccgcgcatccacttgttgcagtccaagtcctctagtgcaacgccatagcaaatataaagatttactatgcacgtgatacattttatggagtgcctcaagccaagatagtgaatttatatgaagggtgtgaaatgtatttctttactactatagtagtttagttataactttgcatctataattgagctttctcatctgtcaaatgctatggttttcttaaaatgttacaattctagatctatccaccttgtttttttattgtctacaaaccattaaatgtaaatattgtttttagagtcagtcattggctttgtcatttaccctttgagagttccacaagtggtagtagagtggtttaacgtctttcctctagtactaccagtattcataaatgtataccccttactgtaatttgttcctcttagaagtcagatcatctgatttatagaggattatgaaaaccagagtttttgaaaaggcttattttatacatacgtattatatagagaaacaaatgtttttattaaatgtttcattgacccaagtaatttaaaagtaatatgttacctatgtctttcaggaaaaataattatagcagctgatctgtaaatgactttaaaagctattttagtaatttaaataaatttactttcttggtttatactctctatgtgttataaacttaatgatttatcatctttaaaaaaagaaatccaagtattttccttgaacaattgtagcaactctggctaggag

SEQ ID NO: 63856 - DNA, 908 bp, Homo sapiens
gcacgaggtgccttctcttcaaacctctgaccctctgccaggctctgtgcagagatgcagcgtggtagtaagtcagcccaacaaagagaactggtgtcaggaccatctttacaactccttgggtcggaaagggatcagcgctaaatctcagccttatcacaggtcccagtcatcttcctccgtcttgatcaacaaatcaatggattccatcaactaccctagtgatgtgggaaagcagcagctgctgtctttacacagaagttcaaggtgtgagagtcaccaggacttgctgccagatattgctgactcgcatcaacagggcactgaaaaactctcagatctcacactccaagactcacagaaagttgtggtggtcaatagaaatttacccttaaatgcccaaattgcaacacagaattatttttccaatttcaaagagactgatggagatgaagatgactatgtggaaatcaagtcagaagaagatgagtcggagttggagctatctcacaatcgtagaaggaaatctgactcaaagtttgtggatgctgacttttctgataatgtctgcagcggcaacacattgcattctttgaatagtccgcgcactccaaaaaagccggttaacagcaaacttggcctttcaccatatctgacaccatataatgattctgacaaactgaatgactatctttggagggggccatctcccaatcaacaaaatattgtccagtctctaagggaaaaatttcagtgtctcagttcaagcagctttgcttaaggttcttcataataactgcttgaatcaacttcttattttgctcataaaacgttacagatactgatgaggtgttttatgtataccagattaaaacaattttgtaagaaccagaggtgtaaaatatact

SEQ ID NO: 63857 - DNA, 1364 bp, Homo sapiens
gacccccgtctgcaggaattcggcacgaggaaagactgctgatgaaatatgtaaagctattcatgtatttgacttgaagacactgcctgtggactttgtggaatgcttgatgcggttcctaccaactgagaatgaagtgaaagtgcttcggctctacgagcgggaaaggaagcctctggaaaacttgtcagatgaagatcggttcatgatgcagtttagtaaaatcgagaggctcatgcagaagatgaccatcatggccttcattgggaactttgctgaaagcattcagatgctgactcctcaactacatgcgattatagcagcatctgtctctataaagtcgtcccaaaaactcaagaaaattctggagatcatcttagcccttggaaactacatgaatagcagtaaaagaggagcagtttatggatttaaacttcagagtttagatctgctcttagatacaaagtcaacagacagaaagcaaacactgttgcactatatatccaatgtggtgaaagaaaaatatcaccaagtgtccctgttttataatgagcttcattatgtggaaaaagctgctgcagtctcccttgagaatgttttgctggatgtcaaggagctccagaggggaatggacttgaccaagagagagtacaccatgcatgaccataacacgctgctgaaggagttcatcctcaacaatgaggggaagctgaagaagctgcaggatgatgccaagatcgcacaggatgcctttgatgatgttgtgaagtattttggagaaaaccccaagacaacaccaccctctgtcttctttcctgtctttgtccggtttgtgaaagcatataagcaagcagaagaggaaaatgagctgaggaaaaagcaggaacaagctctcatggaaaaactcctagagcaagaagctctgatggagcagcaggatccaaagtctccttctcataaatcaaagaggcagcagcaagagttaattgcagaattaagaagacgacaagttaaagataacagacatgtatatgagggaaaagatggtgccattgaagatattatcacaggtaaaagatatttcttcactgtggcccatggagatcccactggcctcacctagactgggatgcatgcagattttgcagcttcttttgtccagggttgtcaagttcattagttgactttattcacacccagagtgatgcagagaggctttgaagtccatttacagcagcatgtatactgccccaatactctgcattgggaaccctgttaagttttcaggcagagcttcctttcattttaaagggatttccattggtattgatatgtcatcatgctccattttttttttcctcggg

SEQ ID NO: 63858 - DNA, 1816 bp, Homo sapiens
ttttttttttttcttttaaaaataatatttaaatttattgtttcacattagtttgaataaagcacaagccaagatggtttaaatatcatttgcagatgtccaagcttctttacaattacaggtcatgggcatcatcaacctagtccttgacttgcagctaaaaaaggcaaaaggtctgtgtgaagtgacagaagagcacaccctactcatgtcatgagcaaggaatcaaagtcgaagaacagtaacagtcttgacatcagcactgtaagaattactctgcagtaaactccaacccagaatggggaagaatactgaattagctgagcacattctggacacaattctgaccaatttcagtctcatgatctctgttggagcaggtttcattctccaattctcttttacagaacagcagaactcgagccttcataaaagtgattaacggcctttccgcttcttcatttttcctccagccaccttgttcctgacaccaatagcaccctctgtgtcatcattatctccagcatcctctcgcgagcgtttcttcttttctccatgctcccttaactccattcgggcaaacctttgggcttcagcgacgcgttctgtcagcatcataacctcatcatcctgtgttggaaaacctggtagtttcttcccaattaagtgttctatgcgctggaagagttccacatcatactgtgtgacaaaagtaatagcctttccggagcgcccagctctagctgttcgacctactcgatggatgtaatccttggaatgggtaggaatgtcaaagttgacaaccacatctacatgaggtatgtccaaacctcggctggcaacgtcagttgctagaagaatggaacgggccttggccttaaacttattaagggatcctaggcgcttactctgactcatttgtccatggagggggatggcagtgaagccaagatttcgcagtagcaaagctgttctctgggtattattacaggtgctgcagaatatcataaaggagtttccagccaattcatttagaatataaaccaggtaggtatccttgaatttagagggaataaaaatataatattgctgtaatttttcaactgtctggtatttagaggaaacggcacatttcacaggattcttcagagctgctcgctgaagtttttgaaccttcttggtcatggtggcagagaagaggaatgttttccgatctcgaggaatcactttgaggatcttgtcaacctctgtctcaaaatccatattcagtattcggtcggcttcatccatgaccaagtatttgagagctctcaagttgaaacctttcgtattttccaagtggtcaatcagtcgaccaggagttgctattattatatgtggtttttttgcaagggccaaagattgagacattgaatcaattccacctacaatcacagcactctgcactccaatagaggaccccagggcttcaaactgctctgagatctgaaaggccagctcccgagtcggggtaagaactagggcaaacaaacgctgcggggtctccagcagtgcgtttagaatgggcaaagcaaaggcgcctgtctttccagagccagtttctgcaagcccaatgatatcacgaccttgtaaggccaaaggaatagcttcaatctggatcttggtgggttttgtccatcccaactggtcacaagcttcacacaacacatctgtcacacccaggtctttaaatgttttagtttcctcctcttccacaatcggctgggacgcttcggtcggagaatcgtgttcctcgggtgccgccatcttctcgtgc

SEQ ID NO: 63859 - DNA, 673 bp, Homo sapiens
  misc_feature (1)...(673): n = a,t,c or g
gacagcattgcagaccatgtcaacagtgctgctgtgaatgttgaagagggaaccaaaaacttagggaaggctgcaaaatacaagctggcagctctgcctgtggcaggtgcactcatcgggggaatggtagggggtcctattggcctccttgcaggcttcaaagtggcaggaattgcagctgcacttggtggtggggtgttgggcttcacaggtggaaaattgatacaaagaaagaaacagaaaatgatggagaagctcacttccagctgtccagatcttcccagccaaactgacaagaaatgcagttaaaaaccaaatttcagtattattggtgccaacatgtctatcctgaggacctttgctgctgttggacactccgtcaccttttggaacacaagtatatcaagatagtggctactgatgttcaagtgggattgaagtgtgataaatggatatattttgttgtttgctggggtgttcatggagatgttaagagattgaggccctgggctgagggtatataatgtatgtcaggtaaagtttgaagactgccaaggagcagattttctccctggaaatgtgaaaactggaacctataactctggataagggacttggaganggtgtagaaacgttgggggttatgggaagacctaggtttccttcccataaa

SEQ ID NO: 63860 - DNA, 1637 bp, Homo sapiens
gaaacttatctccataagttaaaacaaataggttgaccttatatggtttactttttcccaggagtaaagaaaattgtgttgtggataacatcaaagtgtgcagtaatgacactgggagtggaaaattcaagtgtgtttgcatcactatgagagtgcctcggaacccaactatcggagataaatttgccagtcgccatgggcagaagggcattttaagcagattgtggccggctgaggacatgccttttactgagagtgggatggtcccagacattctgttcaatccccatggttttccatcccgcatgaccattgggatgttaattgagagtatggccgggaagtctgcagctttgcatggtctctgccatgatgctacacccttcatcttctcagaggagaactcggccttagaatactttggtgagatgttaaaggctgctggctacaatttctatggcaccgagaggttatatagtggcatcagtgggctagaactggaagcagacatcttcataggagtggtttattatcagcgcttacgccatatggtctcagacaaatttcaagtaaggacaactggagcccgagacagagtcaccaaccagcctattgggggaagaaatgtccagggtggaatccgttttggggagatggaacgggatgcgcttttagctcatggtacatcttttctccttcatgaccgcctcttcaactgctcagatcggtcggtagcccatgtgtgtgtgaagtgtggcagtttactctctccactgttggagaagccacccccttcttggtctgccatgcgcaacagaaaatacaactgtactctgtgtagtcgcagtgacactatcgatactgtttctgtgccttatgtttttcggtattttgtagctgaactggcagctatgaacatcaaagtgaaactggatgttgtttaacttgatgttgaccttttggattaagaggactatcagattaaagcaaaatgtaattttaattcaatgaagatatcattaccaggttactcttgagatttttcaacggtgttagaactctcaaccaagacctgaaaaccaagtatgcaaggtttctgaatctctctggtagattaactattgacaatgattttctgttatctttgttcaaaaagttcatgtcttctcaaaatatgaaatattgataaatggaagagcatacggtgacaagtctcctttccaaccccaggttccctacaccctgctctcagcaggcagtgagtgtcacacacctgttaatccatcttgagcaggacagtactatacaaatagaatgcaagctgtaatgtaattttatattttcttatagccacgttgaagtaaaaacaaacaggtacagtgttttttaccagctttatagaagtacagttgttacatatttaatgaatacaatttgatgggtctgactatatgcacacacctttgataccatcaccacaatcagggtaataaacatacctgtcatctccacaagtttcctcctgcccctttgttttttgctttttggttgctggtgagtttttgttttgtcttctgtggtaagaacacttaactcaagacctaccctcttaacaaatctttaagtgcacgatatag

SEQ ID NO: 63861 - DNA, 2303 bp, Homo sapiens
  misc_feature (1)...(2303): n = a,t,c or g
gggcgtcgcgccctggggccggggccgggcggcaccgcggtgcgcaagcgcaaccgtcggtgggtcggggatcggtcgcctgagaggtatcacctcttctgggctcaagatggacaacaagaagcgcctggcctacgccatcatccagttcctgcatgaccagctccggcacgggggcctctcgtccgatgctcaggagagcttggaagtcgccatccagtgcctggagactgcgtttggggtgacggtagaagacagtgaccttgcgctccctcagactctgccggagatatttgaagcggctgccacgggcaaggagatgccgcaggacctgaggagccccgcgcgaaccccgccttccgaggaggactcagcagaggcagagcgcctcaaaaccgaaggaaacgagcagatgaaagtggaaaactttgaagctgccgtgcatttctacggaaaagccatcgagctcaacccagccaacgccgtctatttctgcaacagagccgcagcctacagcaaactcggcaactacgcaggcgcggtgcaggactgtgagcgggccatctgcattgacccggcctacagcaaggcctacggcaggatgggcctggcgctctccagcctcaacaagcacgtggaggccgtggcttactacaagaaggcgctggagctggaccccgacaacgagacatacaagtccaacctcaagatagcggagctgaagctgcgggaggcccccagccccacgggaggcgtgggcagcttcgacatcgccggcctgctgaacaaccctggcttcatgagcatggcttcgaacctaatgaacaatccccagattcagcagctcatgtccggcatgatttcgggtggcaacaaccccttgggaactcccggcaccagcccctcgcagaacgacctggccagcctcatccaggcgggccagcagtttgcccagcagatgcagcagcagaacccagagttgatagagcagctcaggagccagatccggagtcggacgcccagcgccagcaacgacgaccagcaggagtgacgctgcctgctcccggtgtgaccgcgtccttccctggccgacccgaaggaagccttctggttgtctgccacttcctcctgttggactgcctgagagaggggaagagagagacctcggacctgcatgtcaagatggattttccccttttatctctgccctcctccactccctttttgtaactcccttacagcccccagacccttcttgaaacgagagccagcaagctgagcacagaccagcagcgacctcccttccagcccccagaaagctcggtcacttgagtgttttctagaatcctggggtgctcccgggccgctctcagagaagtggcaggtttcacgttcagccgtgtggcggatcgtgtggcttccaaagccttttacagcccccgccccccatcccgtggtctgtctgcaggaactctcccgtctgtgagaagcctctttccgagtcgacctcccggccaccccggccctgtgcctgctcggaagagctcactgccagctgcggcctgggcaccgcgggccatgtgtgtttgcatgaggaactctttagtggcagacacctaagagacggctgcggtcaccccacgcctccgcggctcaggagccgtcctgggtgcataggaccagtttctgtgacttttctccagttgggcatgttgacagacatgtttcccctcctcccaccctcattttctggtcctcgcgactgagagccaggggcgacatcatgaccttctgtcccggccgccttagccccgggcacagggaaggcagctgggccgtttctgtctgtgtcccatcctgctgtccttctgtcctggatgtttcatgggcccggggcccccccagggaagcttacccctcctgtgctgggtggaggcccacgggacacctccaggtgccacccaccttggcccttaaaacagcccacccaggaaagcaagccgggagagcccggacagcaggcagccttgtctgggttccttgaggcctgggggtggcagacgaagcccacggcgccgtggtcccagcagcagggttgtcagtcggagcatcctgggggctccctggctcctggcccntctgtgaggtaggcgcagtaccgtgtatcgtaggtagcagtaggaacgggggccgcccgcggccctgcagccgctcatggcggtgaggtgtgtgccaagcccacccggggtgcagggcgtgacgtgtaagagaacacctaggcgttgtgacctctgaaaaaaaaa

SEQ ID NO: 63862 - DNA, 598 bp, Homo sapiens
ggcacgaggttacttgggtgaccaatagacagaagcacctacgttttataaaggaagaactttatccctcttggtctgtggaggtagttgctgagtggcactgggtaaaaataaccaattcaggagaatttgtgttcccattagattctccacacaaaaagccctatgaaggtcttatactggggagggttcaagaaaaaactgctctaccattgaggaatgcagatgtaaacgtgctccccattccagaccacaaattaattgtcagcgtgccctgtactcttcactcacataagccaccgcttgctgaggttttaaaagactacatcaagccagatggggaatatttggagttgtttgctcgaaatttacagccaggttggactagttggggcaatgaagttctcaaatttcagcatgtggattattttattgctctggagtctggaagctgactatgatcttgattaaagtagtggattcttcattgtttcctcaccacttttcccttaattctaagtcatttttttttttttgttaccaccccatatttttaaaattataaacgggacttgtttttttctttaggggaccaaat

SEQ ID NO: 63863 - DNA, 367 bp, Homo sapiens
ggcacgagcgcagcttgtgactcctgcctctctgaccccgccaggtggattacaaagctgacgagtggctgatgaaaaacatggatcccctgaatgacaacatcgccacactgctccaccagtcctctgacaagtttgtctcggagctgtggaaggatggtacgccctttgcccttcgccccctgcctcctcttggctgcggctggtcatcttcccacctccacagtgggccgagctgccaaacaaggggtacacatgtgccccctgacataggccaggtggtctctgccctctgtagctcccatgagagagggctcctcggaccgaaacaggaggccactgcccttgcgcacacaccgtggccggg

SEQ ID NO: 63864 - DNA, 1688 bp, Homo sapiens
ttttttttttttacacaatattatatttttatttttaaacactgaattgtacatctttcacataaaacatgagattctagcctgttttaaaaaataagtatacttgctagtactatcttcactctttttttttttcagaagccaatgttctctaaatctgcagcttcatttccacagctttacagaatcataatctcttgaatatatttccaatgttattaaaaaataaaaaatcatacaagatatatttagcacattaaaacttaagaggttacagtataactgtccagacctccaggtaccactgaatacttttccagtacaaagaggccaatatgttagaataattaattctctgtatttacttttattaaaaagaggtttttggtagtaagaacaaataatctctcatttgttgcctgaaatcctaaaataggatcattggtttctaggcttgctacttgctgcttagcaacctgtcctacttgcctgccttcctttctgttgtaaagtacagtggacatgggagcaggctgacgatagatgaatactcgacgaaggcactcacaaagggctgcatacgagtaatttggagcacaggcaaaaaattttttgtctctctttgatgcttggacatagcctaaagcattgaaagttgcgatgtgctcccacatatcatcttgtttgctggagtgtggttgccagagtagggcatcaacatcatggcgcaaacagaagcagggcatttctttaggatccactatgacagagaaaaggtactggttgcttccaagattcaccacatgagtagtttttaatgtattgccatcaaatctgcataaactggagctctcttcaaagaaaatatcacattcttctaactcttgagcattgcaaggtggtttttctttatctggatttggattcagttcttcagaggtcaaatgcatcaaacgttcagctattgcagcacactgggctgaatctcttataagttccccttgtttatctccaattactagctctggccaggtcagtccttcattcttcttaatcaaggaaatctccaagctattactctctttaattatccatgtactgctttcatgatcaatagatgaatagagttttccttctaaaaactggtgatccttcagtacaatgttgatgtgatcaggcaaaaactgtatttgaatgtcctccttagtattgtcttctggaagccgtatggttactgtcaaatcatcttcagtctgttgccagtaatacagaggttctttgattttctctgatatgtcttcatccatattttcttcaagatcttgaccagcctgaacaaatgttaaagacttgtaggatacaatcattagaccatttccatcaggctcaatagcagcataatgtggcactgactttccacggagaatatcacgcttaataatttcatattttttattatcttgatttttcttactgatagtgacccactccagagaaacatagaaaccacttcctttcatatccaattcctctttctctattcgaagaagtagggtagctatagaatgttcttcagcatttagcagtgagatactgtgaattataataaaaggatccccaagttcttcattaaacataatctcccatttttcagaagcgctatttccacgttcacctgttccaatgac

SEQ ID NO: 63865 - DNA, 1293 bp, Homo sapiens
ggatttcgtttcctccggctgggagtggccgctctaggcagcgttgaggtcgcggggttgaggggggttgtgaaaggagagcggcctctcctctatggtcacggggccggggcacgcttcccccactctgtcttgttacttccggtagcgaagcctctccctcttcctctgctcccgcggggtctgtgctgagaataatggcccggttggcccgggacgagtggaatgattaatgatgttttgcagcagttttctacgtctgaaattttttatgtctctggaacccagaatttgctaagagatggaggaacctcagaaaagctatgtgaacacaatggaccttgagagagatgaacctctcaaaagcaccggccctcagatttctgttagtgaattttcttgccactgctgctacgacatcctggttaaccccaccaccttgaactgtgggcacagcttctgccgtcactgccttgctttatggtgggcatcttcaaagaaaacagaatgtccagaatgcagagaaaaatgggaaggtttccccaaagtcagtattctcctcagggatgccattgaaaagttatttcctgatgccattagactgagatttgaagacattcagcagaataatgacatagtccaaagtcttgcagcctttcagaaatatgggaatgatcagattcctttagctcctaacacaggccgagcgaatcagcagatgggagggggattcttttccggtgtgctcacagctttaactggagtggcagtggtcctgctcgtctatcactggagcagcagggaatctgaacacgacctcctggtccacaaggctgtggccaaatggacggcggaagaagttgtcctctggctggagcagctgggcccttgggcatctctttacagggaaaggtttttatctgaacgagtaaatggaaggttgcttttaactttgacagaggaagaattttccaagacgccctataccatagaaaacagcagccacaggagagccatcctcatggagctagaacgtgtcaaagcattaggcgtgaagcccccccagaatctctgggaatataaggctgtgaacccaggcaggtccctgttcctgctatacgccctcaagagctcccccaggctgagtctgctctacctgtacctgtttgactacaccgacaccttcctaccttttatccacaccatctgccctctgcaggaggacagctctggggaggacatcgtcaccaggcttctggatcttagggagcctacgtggaggcagtggagaga

SEQ ID NO: 63866 - DNA, 1719 bp, Homo sapiens
  misc_feature (1)...(1719): n = a,t,c or g
cccggcctccaatctgcttccatgggggttggctttctgagtgggagaaatgactctaatctggagacatttgctgagacccttgtgcctggtcacttccgctcccaggatccttgagatgcatcctttcctgagcctaggtacttcccggacatcagtaaccaagctcagtcttcatacaaagcccagaatgcctccatgtgacttcatgcctgaaagataccaggtcattttcttggtgaacagtggctcagaagccaatgagctggccatgctgatggccagggcgcactcaaacaacatagacatcatttctttcagaggagcctaccatggatgcagtccttacacacttggcttgacaaacgtagggatctacaagatggaactccctggtgggacaggttgccaaccaacaatgtgtccagatgtttttcgtggcccttggggaggaagccactgtcgagattctccagtgcaaacaatcaggaagtgcagctgtgcaccagactgctgccaagctaaagatcagtatattgagcaattcaaagatacgctgagcacatctgtggccaagtcaattgctggatttttcgcagaacctattcaaggtgtgaatggagttgtccagtacccaaaggggtttctaaaggaagcctttgagctggtgcgagcaaggggaggcgtgtgcattgcaaatgaagtgcagacaggatttggaaggttgggctctcacttctggggcttccaaacccacgatgtcctgcctgacattgtcaccatggctaaagggattgggaatggctttcccatggcagcagtcataaccactccagagattgccaaatctttggcgaaatgcctgcagcacttcaacacctttggagggaaccccatggcctgtgccattggatctgctgtgcttgaggtgattaaagaagaaaatctacaggaaaacagtcaagaagttgggacctacatgttactaaagtttgctaagctgcgggatgaatttgaaattgttggagacgtccgaggcaaaggtctcatgataggcatagaaatggtgcaggataagataagctgtcggcctcttccccgtgaagaagtaaatcagatccatgaggactgcaagcacatgggactcctcgttggcagaggcagcattttttctcagacatttcgcattgcgccctcaatgtgcatcactaaaccagaagttgattttgcagtagaagtatttcgttctgccttaacccaacacatggaaagaagagctaagtaacattgtcagaaataaataaaaccacaagtctcaagaatttgccacgtatgttcaagggtgaatttgaagaatttcagaaccactggtatccagagaaagcctgcagctntccacaggagctgtaaaagtcatgttgctgctaccaccatatgtgtacagaccctcttacgtgagaatcgatgtcagggaagtcccgtactcgagataatctaatagttagtaggatgtattgatccgttcatgatggtaccagataggatgatttgcatgacttagaactttggggaaaaaagagaaaagatatattgtgttgcgggtcttgttgtgcgtatgcggacagtccatcntgacatctcgttaaccgccctaccgatgacgtcgctcgtgtggggaccccgtcttctccggacggtcccaaacgggctggtgcggtc

SEQ ID NO: 63867 - DNA, 820 bp, Homo sapiens
ggcacgagcccgtctccagcccgggcttacgccccgccgacagaaaggaagaggttttatcagaatgtcagcatcacacagggtgaaggtggctttgagataaacctggaccacaggaagctgaaaactccccaagccaagctctttaccgtccccagcgaggccctggccattgcagtggctactgagtgggattcccagcaggataccatcaagtactacaccatgcacctgaccacattgtgcaacacatcattggacaacccaacccagagaaacaaggatcagctgatccgggcagccgtgaagtttctggacaccgacaccatctgctacagggtggaggagcccgagacattagtggaacttcaaaggaatgagtgggatccaatcatcgaatgggctgagaaaagatacggcgtggagatcagctcctccaccagcataatgggacccagcatccctgccaaaactcgggaggtgctcgtcagccacctggcatcttacaacacatgggctttacaagggattgagtttgtagctgcccagctcaagtccatggtgctaaccttgggcctgattgacctgcgcctgacagtggagcaggccgtgctgctgtcacgcctggaggaggagtaccagatccagaagtggggcaacattgagtgggcccatgactatgagctgcaggagctgcgggcccgcaccgccgccggcaccctcttcatccatctctgctccgagagcaccacagtcaagcacaagctcctgaaggagtgaggcctgggcagagcacactcagcaggatagaggcagtgca

SEQ ID NO: 63868 - DNA, 1220 bp, Homo sapiens
gctggaggaagtactcaagagtgagctgagtggaaacttcgagaagacagcgttggcccttctggaccatcccagcgagtacgccgcccggcagctgcagaaggctatgaagggtctgggcacagatgagtccgtcctcattgagttcctgtgcacgaggaccaataaggaaatcatcgccattaaagaggcctaccaaaggctatttgataggagcctcgaatcaaatgtcaaaggtgatacaagtggaaacctaaaaaaaatcctggtgtctctgctgcaggctaatcgcaatgaaggagatgacgtggacaaagatctagctggtcaggatgccaaagatctgtatgatgcaggggaaggccgctggggcactgatgagcttgcgttcaatgaagtcctggccaagaggagctacaagcagttacgagccacctttcaagcctatcaaattctcattggcaaagacatagaagaagccattgaagaagaaacatcaggcgacttgcagaaggcctatttaactctcgtgagatgtgcccaggattgtgaggactattttgctgaacgtctgtacaagtcgatgaagggtgcggggaccgatgaggagacgttgattcgcataatcgtgaccagggccgaggtggaccttcaggggatcaaagcaaagttccaagagaagtatcagaagtctctctctgacatggttcgctcagatacctccggggacttccggaaactgctagtagccctcttgcactgagccaagccagggcaataggaacacagggtggaaccacctttgtcaagagcacattccaaatcaaacttgcaaatgagactcccgcacgaaaacccttaagagtcccggattactttcttggcagcttaagtggcgcagccaggccaagctgtgtaaagttaagggcagtaacgttaagatgcgtgggcagggcaccttgaactctggcttagcaagcatctaggctgcctcttcacttttttttaggcatggtaactggatgttttctaaacactaatgaaatcagcagttgatgaaaaaactatgcatttgtaatggcacatttagaaggatatgcatcacacaagtaaggtacaggaaagacaaaattaaacaatttattaattttccttctgtgtgttcaatttgaaagcctcattgttaattaaagttgtggattatgcctctaaaaaaaaaa

SEQ ID NO: 63869 - DNA, 930 bp, Homo sapiens
tttttttttgacattacaaagttttttaattcttttaacttagtccagacacaagaagccagattatattttaggtgtcgacagaactatttgtttaaaatagcaagttcaggtgagttagtagtcatgaaaattaaaatgaaataccaattccatttcctcgtgtacctctttgcaaatgtcggacaaagcagagttttataatagtttaataacttgtgtaacaacggtggctttggtgtatctctaaagtggagtctttaaattataaaggattttgtgtgcttgaaatcattttcactcattgtcgtggctttagatgaagaattactcttctggaaggaggtttcttttgaaaagtagcctttcctctgagcatagcatacaccaaggccacaaacggaaatcactaaggccacaactactacggctgctatgatgccacttatgttgagatcatctacttgcattcgtttcccaggacacctgcgatatccaacagaattgcgggcttcacaggaatattctccagtgtccagtttggaaacagtattaaattgcagagttccagtttttgtattcattgtgtatgagctgttggtgctttgggagccaagtctgggattttctagcaaacggatgccatccttaaaccatgtgtattcaggagctggattcccttctttgtcttgacatcgtagctctaccacagttccactcagagcagaagagggtacttcacatgatggaactgctggagccactaatacttccagagtgactgtatcctcttccaggttttggccttgctcagatggggcactaacttcacaacgatatttccccgcatcacttcttgtcacatttttgatccggatattgaaatctatcatctcagctcgatttttaaaatcaccttgaagagtctgt

SEQ ID NO: 63870 - DNA, 493 bp, Homo sapiens
agaaaaggctaggatgatatatgaagattacatttctatactatcaccaaaagaggtcagtcttgattctcgagttagagaggtgatcaatagaaatctgttggatcccaatcctcacatgtatgaagatgcccaacttcagatatatactttaatgcacagagattcttttccaaggtttttgaactctcaaatttataagtcatttgttgaaagtactgctggctcttcttctgaatcttaatgttcatttaaaaacaatcattttggagggctgagatgggaaataaaagtagttaaataacatcagaaactgagttcctggagaactacagtttagcattcctcaggctactgtgaaaacacaaccgttatggtctttgtctccatttttatcaaggttttccatggttaagtttggagaaaataccacacaaaacaatgaattgccaaattgtttgttttattcaagactcaatctactttgcaagcg

SEQ ID NO: 63871 - DNA, 1917 bp, Homo sapiens
ttttttttttttatcattccaattcatattcagccagtgtttattaagagcctactacacgccagacactttacatgctgatcacatttactcctcacaaccatcttgtaagggagacatcatcagtgccatttgaacaaatgaaaaactgaggctcagagagattcaataccttatccaaagctctccagacaataagtgcaaaaacaaggatttgaattcaggactgtttgattccaaatctggaactttctggaacctctgacacacacacacacacacacacacacacacacacacacacagcaccatgtcctgagctgctgcctcctggactcccgccagactgcacctgacagacaaagccaactaggagggaggggagtgagggagaaggtcccacaggtgaccaatgcctggccccttcatgacagcaggggctagggctgtcccacagggactagagagaggtgtggaaggcagggactttcccataatgctccctcctctcagtgcacaagtgtgctatgttgagaaatggggcaaaagaacaaacagtccttgccacagagggagacaggcagcagccttatcaaacaagataaggagacccggatgatgtgccttttgaggcccctggtggtggaggaggattgagccaggtgaatgggaaaggaagaaaagatgaacccatcttggagtgttgtactttggttgctggagagccaacagtggagactggagacaaatatttaagtcattccggcaggccccatgtacgtgcctcacaatctaacaccgcccaccttggccagaaaggaaggcttcctatggaggtgctgccctgctcagtctgtcttctcaggctttctccaggacttgcgggtctccaggaagatcttgaccagggacaggaggatgggcacagccataggcaggaagagtgggatgtagatggcaaacttctggtcatcagggaaataaaggaggtggaggagtgacgggtcaaagaaggcaagctcagaggatgtcacagcttcctggctggcgacaaaggcagatgccaggtgcccagacgccaactcttctgccgacttctggacggcagctacagccttgtacacctcagatgccacgtcgtccttaatgacaatgttgctgatcttgcccagaagctgcgccagggaggtaagggtggtggtggctgtggccaggttctccactgaccgagcccagagcagccggtctagctcccaggtcattagcccttcactcgtaggccctgaaagcaggcattttggaggcagctggggctgagcaatcccaaagagcaaccgcaactgtgccaggaacacctccatcactcgcaccatgtccacctcgactctcactggcagcactgaggcattataggttttggagtcaacattatataccataatgccaccccagcggggactatggaaggcattggtggccactggagcgccatccttgtcctgaatgtacagcggtgagtgtgcaagctcaggcacgtagagtagaaagttgagcacagggtacaaggaggcagcactggatcccagccgggactccactgggttgatgacatgggggaggctgtgcatgtccaaatagtagctggaggaagctgagtcaaagcggggattcacccccaacattgcatagtaaagaatctgagagtccacagagaagttgccagcggcaccgagggcattcaggaaaggttgcacatagcgccggacagccccctcaatgtcccagtagacatcatgggacttggggtctgggttgagtaaactgaaggtgatctcatagcccaagctggacttgagaggccgcctcttctcagcgctccacttgtcctctggaagggggtcagccagagcagcagca

SEQ ID NO: 63872 - DNA, 870 bp, Homo sapiens
  misc_feature (1)...(870): n = a,t,c or g
ttttttttttttcacagccacatatatgtttattctgcgagtccgtgtcccacagtctgagactcttcttcccctccccttcccgccccgtgaagtggcccggggccgagccccgcctccatcttggctcagccaattcccacccagtttccaggagtctcatttgcatttccgggagcagctgtccaatgggaaggcagcaccctgcccccccccacaagggggcggcactcctggtggatcgcaccactcttgggatccagggatggggggaacgggcttccactgaggtccgggtgacaggagggtggtcttccctcaaggcagggttggagttcagtggaggagggagttctggccttggaagaggcccagcagtccgctgtctggggcgggctccttgatgagtttctggatctccttgaactgggggtggacggcatcgcccacaagctgcagaatgagcccttcgctggtggagaggaaggcaccactctgtctcatgcgggccagagccaccagccggtccacctggctgcgtgaggagcaggcgtccaccaccacatggacctgcagcccccggtctaggaggtccagggtcgtgttctgtgggtagagagaggtcagggccaaccccggataagaacgggggtcctgggtaaggaattggggatggtgagtcagaattaggggcccagaatggggaggagggaggctcggatcagaggaaggggcccccaggtcaggaggggatccaagataggatggggcccacaggtgaggagagagggcccaggtcaggatgggggtcctgcaggcaagtggaggtnnnnnnnnnngnagngaagacggnatcaggnnnagncccct

SEQ ID NO: 63873 - DNA, 6336 bp, Homo sapiens
caatacgagtaattggtgagagtgacatcatgcaggaattcctatcagaatccgatgagaactacaatggtgtgtccgacgtagagctgagagtagcattaccagatggaacaacggttacagtcagggttaaaaagaacagtactacagaccaagtatatcaggctatcgcagcaaaggttggcatggacagtacgacagtgaattactttgccttatttgaagtgatcagtcactcctttgtacgtaaattggcacctaatgagtttcctcacaaactctacattcagaattatacatcagctgtgccaggcacctgcttgaccattcgaaagtggctttttacaacagaagaagaaattctcttaaatgacaatgaccttgctgttacctacttctttcatcaggcagtcgatgatgtgaagaaaggttacatcaaagcagaagaaaagtcctatcaattacagaagctatacgaacaaagaaaaatggtcatgtacctcaacatgctaaggacttgtgagggctacaatgaaatcatctttccccactgtgcctgtgactccaggaggaaggggcacgttatcacagccatcagcatcacgcactttaaactgcatgcctgcactgaagaaggacagctggagaaccaggtaattgcatttgaatgggatgagatgcagcgatgggacacagatgaagaagggatggccttctgtttcgaatatgcacgaggagagaagaagccccgatgggttaaaatcttcacgccatatttcaattacatgcatgagtgcttcgagagggtgttctgcgagctcaagtggagaaaagaggaatattagttagagactgattatctcatgtgagccaggacattcttccagcaaggttggcctctggatggtgaacgggctgtgcaaaaaagccctgcttcttcccttgtctagagggtggacattggctacaggctcttccatctctcatgacttcatggaccctcctctgccagttttttaaatcagatcaccctccatgttgttcctgacccacaggggaagctgtcctcagttgtagccgtcttgactggatgagtcctggcagtctttctaggcgaaccaagaatgtttgtgtgagggaaggtgtttgctgttgctttactgctgtctgtatgtgccagtgctggaacagaatttggaagattctgaataattagttacttattctcaaagaaaatctttgaaagaatcaggaggtcaagtcaagaacatgaaaatttatattttagtacagtagaaagaacattgggctctgggaattttatctgggttttctcctggctttttttttccctctgtgtaattttgggtaaatcagcctccctagctttcagttttctcttctgtgaaacaggaagactgaaccacgtaattaatatccaaggtcccttccggctctaaaaggctatgattctagatgagaagttatatcaagaaagatgtggccaatcagattgagtcatccaggcatacctttttagcttctgtttgtggagttgtctccagataagaggagatgtgccttcccaataactcttttttttttcctttcagaacattttccagatggcgaggccacagcagagagatgtggccacctagcctttccttatccccttcccttcccttcacccccatcctcttactcctttcatgtcccatttcagacagagtaaccattaacaaaaaagaagagaaaaagttaaagtcgttatattcaaaagccctaaactaaatattattaataaccccctctgaatttcatgtctctggaattgaggtggtagtgaacagcagatcggtcagcaccagaagtcaactgagttaaggcaggaaaagaaataagcccaaccaacttgccaaaggtatctttgtcctttcacctgggcctcataccaacagcctctccttgtactatatttttaaaactggaactatgaacttcatccatttgcactgttcagacatatatatgtatgtatgtaaaaattatatatacacaaattagctgcacgtatatacatatatatattactatttaaatttcatattgatggcagtaccttttttagcttgtgtttttacacacctttcactagaatccatgacctccctcgtgctctctttcttttgaaacaaactttaaaaaggaaaaaaaagcattttacagggaaaaatacctctcctcatgaaggacttgaaaagtttacaacctgcttggatttttgcccctttttttgtattgagtatagattccggctcatgggttgccaatagagtctaggaacaaggagtatagtttctttatcttccaagagggtgctggggagaagaaagaggtgtgtttctcaaggttaacaggctgtagttctgcagggagagcctgaagtcctggtatgggctcttgattctgtgacaatttttttgatccatctatttctctcactcctggctttctagccacattctgcacctccttcctgctttcctagagcctcggtatgctttccctcaaccgaccctggctcaggaggttgatgccatgggaacctgaacctgaaacacttcatggtagtaatttcctgttttccttgccttttttttttttttttttttttttttctgagacagggtcttactctgtcgcccagactggaatgtggtggcatgaacatagctcactgttaccttgaattctgggctcaggtgatccttccgcctcaccctcctgagtagctgggactacaggtgtgcaccaccacacctggctaattcttcttaaaatttttttgtagagacagggtctcactatgttgcccaggctggtctcaaactcctggcctcaggtgatcctcttgtctcagcctcccaaagtgctgggattacaggcatgagccactgtgtccttccctgccttttttgcagcagggatagtactcaggaccagagttaagctgataccttaggcacacaggttggacttacatagaggaaagaaagcaagcaatgccctatgtacatgaggttttacctcctccattcctgaccaataaccacccataactacggcattctctgtgacttccttaaacagcagtgatgggaagggatccaatagtatcttcaaggccttggggaaacttgcagtgggtcagtggtctgtgccaaccaaacgatagccccatccaagccagctgagaacctaggaaggagtagtaggaatatggttgattagattggatctcccaagttttaattgaaaggagactgaacgaaaacctgttctgctttctgtccgttaaagagctcctcatctgatcttgcagctagaccctttgagacttaagagctgcatcccaggatcagaagccagggctaattggggtaggacaatattcccagcccctaagctctgtagataatgcataagaagcaccaagtcaggctcagatgcaactaaaacacatctttgagccttttctttttcccttctcccctttctaaacaaaaaccttcctaggatggcatcttttgctctaactgggagacagtcataattggttgtagtcaattctactaagcagtgttggggtggttggaaagtctcttttttgtaatttgtttttgcaaatcattgtgaggccactttttctttctttctttctttctttctttctttctttctttctttcgttctttcgttctttctttctttctttctttctctttctttcttttgctttccttctttcatctcttttttgtaatttgttgttgcaaatcattgtgaggccacttttctttccccttccttccttcctttttttctgtttttttttttttttttttcccagagtcttgctctgtcgcccaggttggagtgcagtggcacgatctcggctcactgcaccctctgcctcttgggttcaagcgattctcctgcctcagcctcccaagtagctgggattacaggcatacaccaccacgccccactaattttttgtatttttggtagggcggggtttcaccatgatggccaggttggttttgaactcctgacctcaagtaatctgcccacctcggcctcccaaagtgctaggattacaggagtgagccactgcgcctggcccacttttctttctttcttttttattttgttatgctggcagccatttgcccctgcatggtatgggatcaaagaggacagcctttcctccctcaccttctccaaatctaggtgaaatcacagagtacaaaaagtgagaatgctgaatgtgtaaagttgcagagggatccctaatttgaagactttgacacagaactaacttcttttgacttaaatgaatttaaaatgagccaaaggaccctgaaaagaagacatgttgatttcccactcctagatgctaaagagacttggcaccagctttgttcaaactgtaaaaatagcaatttgcccctactcgctcagagtgggacagtagtgaacagagctgggattccatgcgacagcttgaatgctgaccttcagacatgagacatagggatttggaggccccttagaatgggtagatggtgttatgttccctttctggcatagcattcacttggtgctttggagattaggtgagggccctataggtagttggcctgttggcagaatttatttaggaacagcccttttgaaagtgtcccagtaacaaagcacccagctgcagcaaggaggtggggaagggaggggcacccccaaagggacagcgccttcttctcttccacccatgcacggccttgggtgatgggaggcgggttccctgtggcttgcgtggatcccatagggtccaaagcccttctttttgcatggaagcagtgttgtgactcttctctctccccttcctctgcacttcctttctgtaatccctactgttcttcttagtcccagcttctgcccagggaggcttctacccagacttcttttgcaatttgtccctgggaagagggggtctcccagtgcccccagcttcatcccagcagaaccagcaggatcctcctggtctctcactggccttcctccacacttggtttctatcctcaggggtagaagctcagagctttttatggcccaggagaaaatgtagaccctgagaaacctgtccctgcagaaaggttcccttgggccatgctttgggccctctgctctttatatgtttattctattctccatttttccaccccgtccttaccctaggcctaaacacaggtacagatatgtgcatgctcagggcagctcctaggcctggactgagctctcaggggggaattagataaatattccaacatcctcatgcctggcccatttagtttcatcctttagttacccaggccagtagctttgggttatcccttcctgtagctccaaacccagcacttggagcagcaaaatagggcactgacaggagatgaaactctctcctatctcagaatttgccaacttctgggctgggctcctaggaggtagttttcttgaaggggactgcatcctagttgacctgaattttccagaccaggagggactgctgtgctctcccttctcgccatcatactgtttggctagattcattcagcagtagaagctgtttgatctgttgaccccagcatactgctgtttcttcaccagcttcattgtgtcacagtagcttcctttgggaggatgatgtgatagaacactcagagagagggagggagaagagagatagtgggtatgcttctctagctccccatcttccaggtccacctcttgacttcctgttcccctaaacctgagcacatcacgccaggccctctttgctgccaggacagcatcagctcactcctcagcaataatctagggtatgtgggaaggtcagggctgtggtaaggaatagaatcaaagaggggagtgatacgggatgggggcacttggccgcctgctaaacttggacattaattttatatcatgacccccttttaagccagtgagctgggcttcagtttttcccaggccatgcacatttaatttatttcagagaaactctaattgtattttcactgcagtatcttgtattttttatttgtgatttaagaaatgtgaagagaaaatacacagacacaataatggctaacattgtttctttcattccttgttctagagctaaccactctaaaattgtttggtaatgtcacttagtgtaattaattgtaacatattcttttaaataaattgatttattgatcaaaaaaaaaa

SEQ ID NO: 63874 - DNA, 1572 bp, Homo sapiens
cttgtactacagtcaagatgaggagtccaaaataatgatcagtgactttggattgtcaaaaatggagggcaaaggagatgtgatgtccactgcctgtggaactccaggctatgtcgctcctgaagtcctcgcccagaaaccttacagcaaagccgttgactgctggtccatcggagtgattgcctacatcttgctctgcggctaccctcctttttatgatgaaaatgactccaagctctttgagcagatcctcaaggcggaatatgagtttgactctccctactgggatgacatctccgactctgcaaaagacttcattcggaacctgatggagaaggacccgaataaaagatacacgtgtgagcaggcagctcggcacccatggatcgctggtgacacagccctcaacaaaaacatccacgagtccgtcagcgcccagatccggaaaaactttgccaagagcaaatggagacaagcatttaatgccacggccgtcgtcagacatatgagaaaactacacctcggcagcagcctggacagttcaaatgcaagtgtttcgagcagcctcagtttggccagccaaaaagactgtgcgtctggcaccttccacgctctgtagtttcatttcttcttcgtcgggggtctcaggagttggagccgagcggagacccaggcccaccactgtgacggcagtgcactctggaagcaagtgactggccctggaggtggggcccggggtcggggctggggaaggggagccccagggtcgccagagccgcgagccactccagcgagaccccaccttgcatggtgccccttcctgcataggactggaagaccgaagtttttttatggccatattttctactgcaattctgaagtgttcatttctcacaaactgtactgactcgaggggcgctgatttcataggatctggtgctgtatatacgaatcttgcaaagctctaactgaacggaccttcttattcctctcccctaacaccatcgtttccactcttctcagtgtaggtaaccgtctatggtgtgttttttcattaatgacaaaaaaaaaagggtttcaactggattatttaaatattggtaaatattgtgcattagggtttgtttttccttttaagaagtatgtcctttgtatctctaagttacatgacctatatcttttcctctttaatagtagttttatgttaacctttaagagatttgtttttcctcaaaggagaatttaaaggtatttttttaaaattctaataagaggatcagccgggtgcaatgactcatgcctgtaatcccagcacgttgggaggccaagtcgggcggatcacaaggtcaggagatcaaggccatcctggttctatactgtgtagattgctggctactaaaaatacaaaaaattagccgggcgtggtggcacacacctagtagtcccggctactcgggtaggctgaggcaggagaattgcttgaacccgggagacggaggttgcagtgagctgagatcgtgccactgcactccagcctgggtgacagagcaagactctgtctcaaaaaaaaaa

SEQ ID NO: 63875 - DNA, 1927 bp, Homo sapiens
cggacgcgtgggggagctgtgagtttcgaggatttcatcaaaggtctttccattttgctccgggggacagtacaagaaaaactcaattgggcatttaatctgtatgacataaataaagatggctacatcactaaagaggaaatgcttgatataatgaaagcaatatacgatatgatgggtaaatgtacatatcctgtcctcaaagaagatgctcccagacaacacgttgaaacattttttcagaaaatggacaaaaataaagatggggttgttaccatagatgagttcattgaaagctgccaaaaagatgaaaacataatgcgctccatgcagctctttgaaaatgtgatttaacttgtcaaatagatcctgaatccaacagacaaatgtgaactattctaccacccttaaagttggagctaccacttttagcatagattgctcagcttgacactgaagcatattatgcaaacaagctttgttttaatataaagcaatccccaaaagatttgagctttcagttataaatttgcatccttttcataatgccactgagttcaggggatggtctaactcatttcatactctgtgaatattcaaaagtaatagaatctggcatatagttttattggttccttagccatgggattattgaggctttcacatatcagtgattttaaaatatcagtgttttttgctactcatttgtatgtattcagtcctaggattttgaatggttttctaatatagtgacatctgcatttaatttccagaaattaaattaattttcatgtttgaatgctgtaattccatttaaattccatttatatactttaaggaaacaagattacaacaattaaaaaaacacatagttccagtttctatggccttcccaccttctgttagaaattagttttatctggcatttttaaacatttaaaaattattaaacatttaaaaattagtttattatcagatatcagcatatgcctaataaaacttattttaataagcatttaattttccataatatgttacagccaaggcctatataataattttggatttgttcaatctttcttacaggctgttttctattgtatcaatcattagtatcaatcattaagtggaagttgaagaaggcatcaaacaaaacaaggatgtttacagacatatgcaaagggtcaggatatctatcctccagtatatagtaatgcttaataacaagtaatcctaacagcattaaaggccaaatctgtcctctttcccctgacttccttacagcatgtttatttatattacaagccattcagggacaaagaaagaaaccttgactaccccactgtctactaagaacaaacagcaagcaaaattagcaagcaaaattcactttgaaagcaccagtggttccattacattgacaactactaccaagatttagtagaaaataagtgctcaacaactaatccagattacagtatgatttagctcatcataattcagattatttttaatcatcttagccaaaactgtaaagttgccacattactaaagccacacacatcgtccctgttttgtagaaatatcacaaagaccaagaggctacagaaggaggaaatttgcaactgtctttgcaacaataaatcaggtatctattctggtgtagagataggatgttgaaagctgccctgctatcaccagtgtagaaattaagagtagtacaatacatgtacactgaaatttgccatcacgtgtttgtgtaaactcaatgtgcacattttgtatttcaaaaagaaaaaataaaagcaaaataaaatgttaaaaaaaaaaaaaaggggcggccgttttaaaggatccagttttacgaccgcgggctggcaaggaaaaattttttttatggggccccctaaattcaattcccgggccg

SEQ ID NO: 63876 - DNA, 1770 bp, Homo sapiens
ttttttttttttattttaaggtatctttaaatataaattgaaccccagaggcagaaaagtcatctacccaacaccggcacattttaaacatgattaggatttgtaggtcaaaatcccgtaacaaaaaagggaagtttttggttgtttccaaaacaaggaaagcatgttaaacagaatcttgtgacttaaacttcactcaagtgagcttaaaactggcataattttgataccaaaagtaagctgaataaccaatacaaaaaacagaactaactggagtttttctcccccaaaacatagtcccaaatccaaaacaacttatataagggatgcaagtaacagaaaaagtcaaataaaacaacagtggttcctgaatttaaaggaaggatgccccacttctctctctctcaagaggcagatgggtcagtttttcttatccttgtctttcttggtttgctgggccccagattgctgggcctgggactgtagtaactgagccgctgctttcttcttctggaagttgttcacctcctcctcaagctccttcttcttgtcttccactttcttcttttcttcttggtgtgtccgctttagaaggtcaaacttctcgtgaagctctttctctgcctccttaagttcagcttctttctccttcactctcataacaaacatttgtctcatttcttcttctttcttctgcagttctcccaggaattcattcctttttgcttcatatgtctcctgaagactgaagggtttgctgtcagggtcagtgtccttgaaccccatctcttcaagcttacagcgtcggtacaattcatagtggcgggtgtgagtctgctctcgcaagtcctccatgttcacgcggatcagcatctctcgaagtttcacaaaatcgcaatgattttcattctcaacctgcaccacaccccaggggtactgcctggcctttgccatcttgttgccaatcttcacctcttcggtgctgccaaccactgcaaatgggagatggacactcattgttgcgttaatctctgccaccgtttcttcatcagtgggaaactgatatatctggaccccattgctgaccagttcactcatgatcttactcttgaatttgtgcagttcattcttggcaatggtgtcagcttttgcaattattggaatgatgttcaccttactgtccagctttttcatggtgaccagatccagggactttagtgaatgtccagtaggggcaataaagtagaggcaggcatggatcctcgtgtcatggtagttgaagagagaacgtttaatcttcaattcctcttgcaggtaggcctcgaactgggcatcaatatattctactatcggcttatagctgtcatctttatttatctggtctccaaatcccacggtgtcaacaatggttaacttcagccgtacattgctttcctgaagctcataacttctggcttttaaccgaacacctggttcattgtgagtagctgggtcactttcaaatttggtgttgaacaaagtgtccattaacgtggatttgccaatgcctgtctcaccaacacaaaggatgttgaaacagaatccttgagaagtagacttgttgaccagctggtcagggaggctgtcaaatcccacatggccagacaaagacaagtttcgaagctcttcattagacggtctccccacggccacggccatcgcagctgcggcaccggctccggctgcgcccgggtgctttccgccgactccggctgctgctagtgctccccc

SEQ ID NO: 63877 - DNA, 1836 bp, Homo sapiens
agacgctcacggatatagtgctctcctggttccccttctactttgaactgaagatcgccttcgtgatatggctgctgtccccttacaccaagggctccagcgtgctctaccgcaagttcgtgcacccaacgctgtccaacaaggagaaggagatcgacgagtacatcacgcaggcccgagacaagagctatgagaccatgatgagggtgggcaagaggggcctgaaccttgccgccaatgctgcagtcacagctgccgccaagggccagggggtgctgtcagagaagctccgcagcttcagcatgcaggacctgaccctgatccgggacgaggacgcactgcccctgcagaggcctgacggccgcctccgacccagccctggcagcctcctggacaccatcgaggacttaggagatgaccctgccctgagtctaaggtccagcacaaacccggcagattcccggacagaggcttctgaggatgacatgggagacaaagctcccaagagggccaaacccatcaaaaaagcgcccaaagctgagccactggcttccaagacactgaagacccggcccaagaagaagacctctggcgggggcgactcagcttgagcccctccacccccgcaggctgcagagcaaggatgaagcctcaggaggggcctcagacccagcccctgctccacactgtgccagtagcctaggtgtctcaggcccctgggccccgcagatggccatttccggtgcctgcccagtggccactcttctggaaggggcttggaaaagaggaaggaggcccagctgttgggggtttgagggtagagggtggaccagaggctgaggactgagccacccaaggaggtggggactgctcggcctccaccgctgttccgctgcagccccgccctgccccacccacccagtgccttgctgaagcccatagcaatccgcttctcagaggtcctatcgtgtttccactgctcgccttggtttgggagcagggagggggaagtcctagcccagatggaccaaggacgggcctgaaggcacatgggggaaagggagcacacggggaggacgttggggaccctgggtggggcctccaggtgcagctgtggatggaagacagggattggcctgtgcttcagcgaccaggatggccaggccagagctgcagctgggggctcttttcctggtcattgggtggggctgagtgccacatgttcccacattaaaaaggggggtccagggctgtgtgagtgtgtctttctgggtctagggctcggggtagtttgggtcaaggactgtccctccagcagtcgcctcctcccaccctgagccccacagtcatctggccctttccctgctcaaccctccctcctaggctctgagcctcagaggacccagcccatgagagaacggggatctggggggcctctcacctgctcctatgaccttgctcccttttaggtcaccccattgccaccgtgcccctgggctggactcccgtgctcctcagggcccacccctgctctgtctggtacaggcccctgctgagtgggcccctctcctctgcccctggggtccatcccctcttgcccagggtccccatcctgtaccaagcagactgggccctaagacccctggcagaacccagcctctgctcacacccgccccagcttctgccacggcttcagtcagggccaggaggaacacgtgaaggagaaagagaaatgcaggagccgcggggctcccggttccttgggaagagggtgcccattggacctttggcactggatgagccaataaaccaaactctggcacctcaaaaaaaaaa

SEQ ID NO: 63878 - DNA, 1245 bp, Homo sapiens
gtaactagtacatcgtaaccacattacgccagcttggcacgaggggaacaccaggcagattcatttatacagcgctcaacgaacccaccatcgattatggtttccagaggttacagaaggtcattcctcggcaccctggtgaccctgagcgtttgccaaaggaagtaatactcaaaagggctgcggatctggtagaagcactgtatgggatgccacacaacaaccaggaaatcattctgaagagagcggccgacattgccgaggccctgtacagtgttccccgcaaccacaaccaactcccggcccttgctaacacctcggtccacgcagggatgatgggcgtgaattcgttcagtggacaactggccgtgaatgtctccgaggcatcacaagccaccaatcagggtttcacccgcaactcaagcagcgtatcaccacacgggtacgtgccgagcaccactccccagcagaccaactataactccgtcaccacgagcatgaacggatacggctctgccgcaatgtccaatttgggcggctcccccaccttcctcaacggctcagctgccaactccccctatgccatagtgccatccagccccaccatggcctcctccacaagcctcccctccaactgcagcagctcctcgggcatcttctccttctcaccagccaacatggtctcagccgtgaaacagaagagtgctttcgcaccagtcgtcagaccccagacctccccacctcccacctgcaccagcaccaacgggaacagcctgcaagcgatatctggcatgattgttcctcctatgtgaaagaattgccttgaagaattgtattaatgaagaggttggattctgctacagagagtaatctgatacaagtcccagagtggaacttttaactcaggcctttttaagaggaatcacaataactgcagatttttaaacaaacaaaatcaccgaccttgcaaatactgaaattggaagagggatctgcaagtgcagggtgttggttaaagttgtacctcccaagtatttgggggatatatttattctgtattgacaaaagcaaatccactttttctttttctttttttttttttaagcttaattctgcaatcatttgtcttttataaaccgtaaagctctatacaagggacactataaaaaaaactccatgttttaatttatgatgtttttaaagctgtgtaaaggaagaatgaagtggtgatatttacaaaaaagt

SEQ ID NO: 63879 - DNA, 1105 bp, Homo sapiens
  misc_feature (1)...(1105): n = a,t,c or g
ggtggaggaatgtttcaagaacctgaaaatgaaggtggagaaggagtacggtgtccgagagatgcctgactttgacgacaggagagtgggccgtcccaggtctatgctgcgctcatacagacagatgtccatcatctctctggcttccatgaattctgactgcagcacccccagcaagcctacctcagagagctttgacctggaattagcatcacccaagacgcccagagtggagcaggaggaaccgatctccccggggagcaccctgcctgaggtcaagctgcggaggtccaagaagaggacaaagagaagcagcgtagtttttgcggatgagaaagcagctgcagagtcggacctgaagcggctttccaggaagcatgagttcatgagtgacaccaacctctcggagcatgcggccatccccctcaaggcgtctgtcctctctcaaatgagctttgccagccagtccatgcctaccatcccagccctggcgctctcagtggcaggcatccctgggttggatgaggccaacacatctccccgcctcagccagaccttcctccaactctcagatggtgacaagaagacactcacacggaagaaggtcaatcagttcttcaagacaatgctggccagcaaatcggctgaagaaggcaaacagatcccagactcgctgtccacggacctgtgagctgctgctgactagggctgcatgggagagccagggaggggagtttctggaagaggaaagccatgcgtggaacatcgaagcctcagagagtgggagactgtccccatcagttgtccttacttagaggagacagagaggccaatcaggtcccagagctggagtgctaacaagcccagcatcccctggggctgtgatcatggtggatgaggaagcctcaacgtagattcctgaactcaaggtaccagcaagaatgccttctcccagtgtgctctccccaacatcctaggcacagctttcataacccagtttcttaggtgtaagaaactgcttttatctcatttattaagtctcagaacttaacagaaaaggaagccttttaaatattctttttaattntattttagattaacagtt

SEQ ID NO: 63880 - DNA, 1013 bp, Homo sapiens
cccctaggagccctgaacaccatacgccagcttggcacgaggggagaagtctcggtcctataatggccagcatggcagacagaaacatgaagttgttctcggggagggtggtgccagcccaaggggaagaaacctttgaaaactggctgacccaagtcaatggcgtcctgccagattggaatatgtctgaggaggaaaagctcaagcgcttgatgaaaacccttaggggccctgcccgcgaggtcatgcgtgtgcttcaggcgaccaaccctaacctaagtgtggcagatttcttgcgagccatgaaattggtgtttggggagtctgaaagcagtgtgactgcccatggtaaattttttaacaccctacaagctcaaggggagaaagcctccctttatgtgatccgtttagaggtgcagctccagaacgctattcaggcaggcattatagctgagaaagatgcaaaccggactcgcttgcagcagctccttttaggcggtgagctgagtagggacctccgactcagacttaaggattttctcaggatgtatgcaaatgagcaggagcggcttcccaactttctggagttaatcaaaatggtaagggaggaagaggattgggatgatgcttttattaaacggaagcgtccaaaaaggtctgagtcaatggtggagagggcagtcagccctgtggcatttcagggctccccaccgatagtgatcggcagtgctgactgcaatgtgatagagatagatgataccctcgacgactccgatgaggatgtgatcctggtggagtctcaggaccctccacttccatcctggggtgcccctcccctcagagacagggccagacctcaggatgaagtgctggtcattgattccccccacaattccagggctcagtttccttccaccagtggtggttctggctataagaataacggtcctggggagatgcgtagagccaggaagcgaaaacacacaatccgctgttcgtattgtggtgaggag

SEQ ID NO: 63881 - DNA, 1658 bp, Homo sapiens
  misc_feature (1)...(1658): n = a,t,c or g
ttttttttttttggctgcaccagtgtattttcccatccaaaacatacacaggggaggcttgatgccaccccaggaaacagaataaccccttctagggacttcttagcagagactgatctccatctgcccgcaagggctgggtgtccaatttgtcctgcttcccagagctgcatggtgggtagaggagtaagtggaacataagaacaggcttgcatgactgtgtttatttgaaccaccagatctgttccaataaagagctctccagaccctgcctcaccttacagggaagggcttagagtcagggaagaggggcctgttgctcctgtccctgaaaaaggaggtcaagatggagcccgggcttcctggtgaccattcagactcctcccactgcttgtccctgtggaggacacaggacgggctaccccatctcaggtttggggtgggatcgctcacagtcacccccggaacagccccaactgagggtggggggcctggccctggacacctcatgtctctgggccgggaagccacgatccctcatccatcaggcctgctgccgctctccaccccagcgggggatggacatctgtgctccctcgcagtacactgcggacccaggaggtcccctgcatgacattcctctccttggcctcaggccagcaggcggctgtactctgccagagcagaggactttctcaccccatcccagatccgggcagcgtagtggaaccagttcttctcggtgaggatcgtgtgtgacagctgtggccgggccatggacatcacttggctccggagcttgctcaccaaggactggaaactggggtggccacgatacccaggcagcagggagaagagtgggctggaaccaggtcctgctcttggtgggttttcactctctgcttcactgtccatgaagggtaccaggaataagttgacctcagagtccaggaagtcaggtggaagccccgggaagacattgcattgtaacatggacagagttcccttgtaacgcaggtgggagtgggccatgagctggtcaatcatcaggtgcatctgccgcagcttccgaggacagaagtcctctcggcgagctttgttctgcaagaagactaggtgggggtagtactcggtgccttcatcggagcccgatgagctgctggactcgtggctgggggatggggtggagggcttcaccatctctgctgtctgcaggaacctgtagagactgaggtctgtgaaccagtcctggacaacaatcaccacatggcagaccgtgaaaaggaaggcagcaatctggagtgactgcatttcaacgtaagtgtggggaaggttgtactctggaggcagtttgcggtcattattgatgagatggtctaggatagaagggctcaggatgggctgtgtgtccaggaaaacaatccgttcttgggtaataaagaagtcgatgccactggtctggttgccccctcgttccttcatttcagcgctctgggcccggaaaacataagtcctctggtcctcctctggagtgttggctgacaacaatgacatgaccatggacttgcctgtcccctggaggcccaggacaccaaccaccaacacatcagtctgatccaacaggtactcgatggcnctgtcacgaattccacgtctgg

SEQ ID NO: 63882 - DNA, 2108 bp, Homo sapiens
ttttttttttttaggtttaataattattttaattacaaatttccaccaattcttgccagtcatattattgtggatatcacaaatgaattatataatagtatattaccttatattcatctgcatgaaacttaggagaaaggagagcagaaatgtataagtttctgagaatgacaccataaagctcatatttacagtatggtagtctgtaaacatacaggcctgccagttaaagcccactcttctatcatcacccagctgcatgaccctgagcaagtcacttttgtttgctaatttttaatatcatctatcacctgacttctctatctacgagagttaactggctgcatgcaaaataccatgaaaaataccatgcacttttaagtgtgaagtagcactgtaaagtgacttatatattactggtctttctatttttagagtattaatattcatacatcagttaaaagtcaacatgtgtttgctaagtgatccttttgaaaggatccctttaaaagttcctaggcatcagcttcactgacaatctggtatgattctgaagccagcatttcaactcttggaaagatatacaatagtcacagcttgaattagtaactaataaaataaaatgccctcttattctccaaaatgtaataattcaggagtaatgacatcaagatttttctcctcaaactgaggagaaaaaagcccccccgtggcttgtttaaatgacttaaaatacaagtggtaactatggtgactagggaaccaatgtttaaaacatcaaaagattattacaaaaatccaatttcccatgaatttctaaaaattaaaattctgagatgttgtgtctgagaaactgcttcttcagcaaaatatttagcacagactacatcatcccaaatctatggtatggccaggtatttaggtccttcaaccaacgtttttagaaagggtcccgttgctctttacttgcaaaatgactatctctagggcctcaaaattcaagagacaacctagcttttataatgttaaaaagggaagactttggcatgtaaactagaactacatgattgtgaatatttggcaaattgatctctatgtgtatatacaagctatagctaacatgattattacaagttttttggaagcttgaaggccaaggaaaataatctgcacatataactttctgatttatcaagtactgagatattaatgaattcttcatattgttactcctgtatcagttctttagaatttcttagcctttgggtactctaagccttggatggaaccatttagggagtagctagatatatgcaaagaatattaggatttagaaacatttctggtttatcaaagtgaaaagataaatattacaaacactgaaaatgtgaaaataaggttcaagagagctgcaaactatgtgggtaccagttagaaagtatcttcatctgactcatcactcttgggtttggtaagtctttctagttcttctccatccccactggaacgctcccaaagattgccacttagatctcggatcctttcttgcctaggtgcgtattccggaacttgaggcttgctggcattataaataaatatagagagaaggactgatggggcttccaagaaaaattccagggagggcctgaagtcaaagaccaggacagacactgttgtgataatgacagtggtaacctgggccatcaagacatggaacatgttatccaggaacttcagaatgaaagccactgaaaggccctggaatgcagttacaaaaataagggctactgaaaatgccctgtggccataaaaaaatccacagttcttaatctgatcacggttactcctctgaaggcccagagtcagcccattaaacagaatgccaaagaaatagagtttgctgttctgtatgaagatgctttcagtgagctggttcccttccttcagtatcttttcattatagatattagccattgaagaaataaaacactggactataataagaacatggcccatgccaagacggatgtgactgaaaactctggctgtggtgttccatttagcttcaggaaaagtccattcctttgctgtacaattgtcttttctgg

SEQ ID NO: 63883 - DNA, 2016 bp, Homo sapiens
ggcggaaatctacattcagctacagcgagaataccagatttctgcaggggacttccctgaggtcaaggctatgcaggaacagcttgagaactatgacttcaccaaattccactcgctgaagcccaagctgatcgaggcagtggacaacatgctgagcaacaagatctcgcccctcatgaacctcatcagccaggaggagacgagcacgcccacgcagctggtgcagggcggcgccttcgatggcaccaccgagggccccttcaaccagggctacggggagggtgccaaggagggcgccgacgaggaggagtgggtcgtggccaaagacaagcccgtctacgacgagctcttctacactctgtcgcccatcaatggcaagatatcaggtgtcaacgccaagaaggagatggtgacctccaagctgcccaacagcgtcctgggcaagatctggaagctggccgactgcgactgcgacggcatgcttgatgaggaggagttcgcgctggccaagcacctcatcaagatcaagctcgacggctacgagctgcccagcagcctgcccccccacctcgtgcccccctcgcacaggaagtccctgcccaaggccgactgaggggtgggctgcagaacggggtgggaactgggggacctgggcctcaggcctgctccaccactgactcaccgaatgaccttgggcaaggcactgccctctctgtgccttggtttccccatctgtagaatggggagggtggacactggaaactagatgacttctttcacctccaaaattcccttagtttctatgaaaatattgggggtaggggggtggattaggagattgaagggttgagaagaaagagaaattgtccaaagagtcctcagaacctgcctggagaaatgcgcatgggggtgggcctggtaagtcccaggaaccacaggaagtgagctaaggctcacccagagcagctgggtctccaggctgcctgggctttttgtcctcatgaacaactctggagcagctgtctgtccctcagagggcacctggaggcagcaaagattatcttatttattttattttgttttctgctatatttagagtggcaaaaaaatagagcagagggtttctgctgtctccagactgtctaccaaagagaaggcgacagatgcctcctgggtttggaagggggatgcactgtggatctgccatccattctgcagtctccagcagagcaggcagtcaggccccagcgtgcctccatcccagtgccccgatgaccatctggtcagccctcccaacctcccttccagggggcttaccagcaaagccatattcggctaggaatttggaattcacaacctttattaacccctggcaaaacttcccgtttgcatgtcaaatcacattgaagcctgaagattagcttttcttactggtttttccaataagtaatagcaaagcccacttatcatacttaaactacagtaaagaaaagaggtggttctctgcagtgatcgtttagtgtggccctcaaacattaaatatccccaggtctccttggtgggtggcaggatttaaattcaatcaaatcctgtcctagtgtgtgcagtgtcttcggccctgtggacacaggtgaatgagggaccagccctgccctgggctgttgagaagagatcagtccacccagagttagacattgtttttgtagaaaacaggcatttattatgtctagggttttgggttttttttttttccttacaggataaaagcctttatacagaaacaaaatggaacctttcatataaaaccttttttttaaaggctggggggttcgtatcatgaaggcccatcacgaggcaggattcgggcacatacctgtacttttgttccaaagggggcgctccccaaatcccctgagtaaacctcttctgggactgctgctcagacacctgcgtcaggtggaggtgcctccccctctgtgggcaccagcttggggaggtaggtgacttttccttgca

SEQ ID NO: 63884 - DNA, 1790 bp, Homo sapiens
ttttttttttttgcatgtaacttttttattgaggctctaataagtgcattgtaacttgcttgatatttgtaggcagtcagtttagttagctgaacgttaatacagttatggattaagtgcaaacaatatacattcacagcttgactagcgaggctacatcacaatttataaagtgccagattagtgctaattgtcattcagcttgatttttcacctcagggaagggaaaacaaaaaagtaagggacctcctccctctagggaacaaaaaacattttcctaaaccaatcagtcatgagggcaaagactacttttccttcaatcccactaattagaacaccatccttttattgtcaatactgtactgactttcaatcttgataaagaagatagcctgaaaacgtagaatatttccagctacttccataaattgctcccctgtgcagacgtaaccatatctggtctccctggaagagctgaagaattgcatgattgctagcagtttcatggtctggagcaccatcattggcataggctgataccaagacctcttcattcttcatgaggttgacatacagtggcacattcactgccagctttagcatgtgaaaaatgaaaacgtaagtgccattcactgggcaattaaatctaccaagctgaagatcaaaagtttctcctaagttgttcagaagaagatcaaacacaataggttggtctaaagttccaggggccagattagaggttctggctgctgagaaggcaactcgcatctgctgaggcagagggtagacgtgtactggcagtatggtggctgctggatttgtcactggcacatccacaggggtcatgctacgggagtctccttgtccagagtcaccactgttaaaggtttcgttgtctctttctgggctgctcacctgagaagaatcactccaccctgctctcgaatttgctcgtggaccaccagatgtccctcctcgcttataacactgctggaaattatccctttgggaataaggtgctccagaatactctctagcttggaactgcagctggctataatttccattggaaattgaagggagtcctctataagtatcaaaacctttataaccaccaggggaccgataggaattggttattaatctcccaccacgagtacatcctctaacagatccccggctattgacaaatggctgagtaggtctgggaaatacattcgtctgtgctgggtaaaaggcaaggctaccattgcttacttgaatagttccatcaggatgataatttgcagtctcttgagaatggacagtttgttctacatgtatagatggcagttggcactggggtggtgtttgtgtacttgctgtggtaaaactttgattgtagccaggtgaataaggggattcttttatttcttgttcttttcgtggaggcagaggtgcattaacgttaaatactgtctgcatggcttgaaagggtgctgtgttaatggttactgaactactacttgctggaggtgactggaagccctgttcagagccctttgccatgggaggatttggagaagctagtgaagacggttgcttgcctgggggaattgctgcctggggaggagaaatgcagcatcagccaatcacctgccatataacaagcagttaacttactctaaaacccaaactggcataagtcagcaagttctttaggatgacatttggacacaggaatgcaaaagaatagcttttgcttacaatttcaaatctcaattgctgaggatgcataccagtatttgctt

SEQ ID NO: 63885 - DNA, 1543 bp, Homo sapiens
ttttttttttttaactttaaaactgccgtcttctgctttattgacaggtaaattgttcaaaaatgttctcacaattcaataattaattacaaagactgagacttacattaaaaaagtaaaaaccagaaccccccaggtgcccatccagcagaaggcccaggagggcagtggggtggcagggctaggcggtgctgggccactcagtgccgacttggggaagtgcacgtcctgaacagccttgccaagcagccgaccggtgggaggacaggggaagcctggcccaagctgtggacaagctgtgtctgccgccacagttaatcacaagcctctgacgacacagggccacagagctggtcactcaacatctggtacaaagggtgaggtgaaatccacgcgcaggggattgctgtgccgtgggccggggccagtgtgcaggagtgtgttgggtgggtctacgtgatcatacgggctactaatcacgggggctcccatgcgggggcaggactggtgggggggggggcgggccagggcggggcggggtggggtatcccagtggctgcttcgtgggcgccctggggctctgacttccctcagcccagcaggccacaggggctgcctgcaccacgacactcgctggttttatggcaggaggcagaagccgtggaagcgaatggaaaacagcacagctgacttcacagtagtagatactggtgacacttcatggctgcgacccagaatgaacttaacgcacacagggacgcagggtgtcactggtcctgggcctttgtccatgactaggtggtcagcaggacttctgcagctgactgtgcaatggctaaatgaaaaaaaggccacagactaacctccactttcctgtcttcaaaattctagtgacactgggaatgctataggacctcctactattctcttaaggtcctaggaaagtttcaggaactagggaaaagactgggtactgaggctgtgtccccagatgtctgcttccgaagcagccgcgtcatgacgggtttctgctgaggaagtggtgttggcagggccccatatgccctctcgggttgtcaggggtgggagacaggctgtatgggggtccttcatgtgcagatggaacagcatcgcctcacagctgtgcagacgaacagatgtggtctactgccacgaacaatgcggcataaaactgatcaatattataataaagatttgtcttcttcatctcccatatctacaaagtgattctacatttccttggacaacactggagggcccgctcagtcttggcactgacgctggaggccatctccagctccctggcccctgtggcgagctggcggcttcaggtgtcacaggccggctgctccaggccttcgagggggagctggctcctgtggggggagttggggctcggtgggccgctggggttggagctattcgatggagttgagtgtttggtggagtccgaatcaggctctttgtcaaagtcctggtctggatcagacatacttctcagaggcacagtgcacgctacgct

SEQ ID NO: 63886 - DNA, 2633 bp, Homo sapiens
tttttttaaaattccactgataatttatttcagcttttaatatattttctactataaaaccaagctgtcaagacaggaaaatattactagctttgttattacaaaacaagtgagaatttttaattcacaaaggatgaaaacgcaagacattaatctcactgtacatacaatattacaataaactcgattagctgtagactaataaaacatttaagacttcacacacacacacacacacacacacacacacacacacacgtaccttgaaacaagaaacacaggacaattttaatctttgatatatgttcatgaacaccaagaacaagaacatcactgatttgagtctaattgttttcctgggtatacaatcactaaataagcaagatctaaagcatattgtattattaaggacatctttaggcaaatataaacattctgatttagggctttttctccccacccgaaacaatctgctttagctatcaagtagtttggtttgttatcaatttaacacgctcacaacaacaaatacagaatttctaccacaaaattcaggtgagaggtttttagacagatcatacaaaaaaatacttgttcccaaggaaggcaatctgtaaattataaatgcaaccctaagaaaaaaaaatcctggtcacaaatcactcgctttcaaatattgatggagaaataaaaagtgtacgttgtgggtggagaaatgttggcatggaagagaggagaaaaggtatgaaatgaggaaagtgttatttgccacaggaaatattggattcagttgatttttaaaaatgaggtataacagtatgccagtaaatgaaaaaacaaaaaaattagaaaccaaaatgcacatttccaatggaaaaatctctaaacctcttatagttttattagacatttcatgtacagaagttaatctagaaaaatacattttaaaaatcttcaacagaccatgctccctgtaacaaaacctttccaaaccctgtgttttattatacaaagcaatctacattagtaggtaaaaagaaattctcaaatttagcaatgtcattttccatccaacatccatctaatttacagatgggtttccactattcatactggaattagaatttctgtaataaatttttttctaatgttttctggtacatattaaataacccaaaaggttcctcttgtagtgcatgtgccatttagcaagtctattcagtatttttccagtaccattctcattacagtgatttgcctgtaaatgtagttaatatctaaaagtgcacacagttaactttcccaaataacggaccatttctggaggaaacttaatattcacagaaaagattgccaataacaatgattagaaatgtagggttagaatgtactctgagactatacaacacaattatatacacaagctaaaggacattaagtctttagcctatatttacataaaataatgtgtgtttccacagggtcataccaataactcagtatggtactagatataattaggattgttagctacaattcagtatagcaagacagccctaaaatgccctgaactgacttccgctaactaaaactccagtatatcacagtgttttaagtaatattagtgtgctgcccaaacaagcaactaagatatccagtaaggatgctgtgtaacacagtaaaagacagcaagccttcatcaaggggttattttggggttataatgaattttggcacttaagactgccactgcatgcagaaaccccgaaaaagaaatacacaggtttcaaaatggatatacttcattttgtttaaaatgcccaagagcctttgcaacataactgaaagtattgttctatcaagtcatgaatcttgagaagaaagtacattatccaatttcagggaaaaaaaatacagttttcttaccaaattatccagtgtatatgactggttagaattttaagttttgatttttactgaaattcagagtatgaaatgcaaacattcaggataaaatgaattcataattacacgcagttatatcaacttgcaacaaagcagcaaatatgagggcctaacacacatctcgactctccccttcccttttgatccctcaaaaaaaaagtgcaaaatcaaagagtcactgcttggtccaaaaaataaaatacattgtgtataaacatttgaaatctgatggaatccagcttctattccacaggttgtcttcagtaagaatcaacgtccgaagatggaactcagttccagaagaattaattctacaatctgattctggtacacagtatgaactgctatattaccagtctctttttctggttttaatagagtgggaccaaaaacaattgctatactctgataggtcattcgatttttctctccattttctataactcttctgagatgtcggaaaagaatctgcattgtgtcttggtttggctttggcaactgtctgattaggtccttaacagcagcgactcgctgtcttggttcttgcttaattgcattaacaaaatcattaaaatgattaaatgtaaaaagaggttctggtaattctcgaaaaaacattttgagggctccagtaatgacatgaatatcttcccatttactgtcattcc

SEQ ID NO: 63887 - DNA, 2699 bp, Homo sapiens
cgctaaaactaaaattttagtggtttgtggagtggctagaaaacatgaattgtaagcagtttttcagaatttaaaaatctcttagtttgaacagtagaagatgtaaataagcatagagactgttggcaagttatgtttatcacaaaacaaagaagaaggcacagagggtccctttgacccttgaacttgtggttactaatagtattaaggttggtaatcatgaggaaggacacagaaaataagcctgttgtgtgggcatcttgcttgcctgtagatctttgttcccagttcaggaggtttttattcagtgcttgcttcatttactggaaaagttcactgggcccacctgtcaactccttcccccacagcttccagctcagcagcaaactgtagggaacagatttactccccagttccttctgtaaataatgctttaagaacagcattccttttggacaatatgtcatagacccaatttttaatactcccaagtcagatatctaactagagagtttaggaaatgtttggtatgatcaaacttttcccttcagtacacaatttaatttacgcagaagagcatcggagacatttgtctcatagatatgattgacatgagtgataggctaaaactaaaattttagtggtttgtggagtggctagaaaacatgaattgtaagcagtttttcagaatttaaaaatctcttagtttgaacagtagaagatgtaaataagcatagagactgttggcaagttatgtttatcacaaaacaaagaagaaggcacagagggtccctttgacccttgaacttgtggttactaatagtattaaggttggaaatcatgaggaaggacacagaacataaactgggatcttgaagacaggcatgttgataaaagtagccctgaagccttaatattagcaacatcgaagatgggaaagacaggattgatttatttgggaactaagtttacacattatatgtctcaatataaaacaaaagctatggctttagagtttaacaggttaaaaaaaaataggaggaaaggcaaaacaaatgtaagaatagtttttaatccattttctcacaagcagtgcacagtgggccggcaggtacttaagtaccttatcctaatcctggatgtgctcatacaggctgtcaatttgggtccgaaagtatttggaaagctctcctcgctttgctttcaatgttggtgtcaagagcccattttcaatggaaaatggctctggatgaagaaaaatggctttgacctgttcaaaagttttaaggccactttctttcccaattttctgcaagtcttctaaaatggcttcccttacaacttggttttggcacagttcctcaaaggagcccttcaccccaagcttggctgcaaatgagggaagtacatctgtgtcaggaaccaccactcctactaaggatgaccgtaagctctccccgtgtacaaaaatttgtaacactggttgactcctgttgtagatattttctatcttctctggtgcaatgtattctccttgggccagcttgaaaatgttctttttacggtcgatgatcttcagagttccattcgggagccagcgaccaatgtctcctgtgtgaagccagccatcactgtccagggcttcctgtgtcttctcagggtccttcaggtatcctttgaacacgtttgtacccttgatgcagacctctccttcattattcactgtaaagtagttcatgtcagccacatcttccagcttcacgtaattgcaagccaggggcaccccaacgtgacctgatgtccagtccccaggtaatgtaaatgtacagccacctgtgcattctgtttgaccataagcttcatacacctgacatcccattgctgcccggaagaatgtcatgactgaagtggacatgggggcagctccagtgacaattacacgaacccttccgcccaggctgtcctggatctttgcaaagatgagcttgtcccagaaactatcatgcctgatgatacccttttgaagctctttgaatttactggaaacagccagcttcaacaagaacttcttcaagggtgtcttggcctcattttgtaccttatcgtagatcctgttaaggagtcgaggcaccgcgggaaacaatgtgggcttcaaagtcttcatgtcgtcagccagcaaccgaatatccccttggaagaatccaactctggctccacagctgtacacaacagcctgtacaatcctctcaaacatatgagccagagggaggtaggatatggccacatcatcaggagtgggctcataagcatgctccacacatttgagaaaggcagcagcatttgaaacaatattttgatgggttatcatggctcctttggggtcacctgtggtcccactggtgaagcagatgacgctcaggtcttctgggctaggaggcacaggttttctgaagtgctctttgcctaggttctcagcatcatatagggataagatctcaattccactcttctcccctctttgcttcaggtcatcatcaaaggggtccataaggatgatcaccttcaggctcggggtgaagcctttctctacattccctatcagcaccaatgccttttggggtgtgtcacagatcaccatggagatatcagccttgtgacaatatgtcgaggcttcggtccccgaaatcgcgacccgggag

SEQ ID NO: 63888 - DNA, 783 bp, Homo sapiens
ttgatcgacgtccctagtccgtgtggtggaattccacgctgaccggcggcttccgcagggggaagttgcagggccatgacgtggacttcctcatcacccaccccaaggagggtcaggaggcggggctgctgcctagagtgatgtgccgcctgcaggaccagggcctcatcctgtaccaccagcaccagcacagctgctgtgagtcccctacccgcctggcccaacagagccacatggacgcttttgagagaagtttctgcattttccgcctaccacaacctccaggggctgctgtggggggatccacgaggccctgcccatcctggaaggccgtgagagtggacttggtagttgcacccgtcagccagttccctttcgccctgctcggttggactggctccaagcttttccagcgggagctgcgccgcttcagccggaaggagaagggcctgtggctgaacagccatgggctgtttgacccggagcagaagacatttttccaagcggcttcagaggaagacatcttcagacacctgggccttgagtaccttcctccagagcagagaaacgcctgagcctgcctgtgtccccaacttccactcaggaaattgggctgcccccaacctggccactgaatgtctccaggcagatatgctgccccctgacccccaccttcacccctccccgccaaggcctggctctttcggaggtcaattgtgcctgcaggatcagttgagcccctgctggtgtgctgcacggtgtgatgaggtatgagccctcaag

SEQ ID NO: 63889 - DNA, 1834 bp, Homo sapiens
ggaattccagaggcgcagctctggatctaccctgtgaaatcctgcaagggggtgccggtgagtgaggcggagtgcacggccatggggctgcgcagcggcaacctgcgggacaggttttggcttgtgatcaaccaggagggaaacatggttactgctcgccaggaacctcgcctggtcctgatttccctgacctgcgatggtgacaccctgactctcagtgcagcctacacaaaggacctactactgcctatcaaaacgcccaccacaaatgcagtgcacaagtgcagagtgcacggcctggagatagagggcagggactgtggcgaggccaccgcccagtggataaccagcttcctgaagtcacagccctaccgcctggtgcacttcgagcctcacatgcgaccgagacgtcctcatcaaatagcagacttgttccgacccaaggaccagattgcttactcagacaccagcccattcttgatcctttctgaggcgtcgctggcggatctcaactccaggctagagaagaaagttaaagcaaccaacttcaggcccaatattgtaatttcaggatgcgatgtctatgcagaggattcttgggatgagcttcttattggtgacgtggaactgaaaagggtgatggcttgttccagatgcattttaaccacagtggacccagacaccggtgtcatgagcaggaaggaaccgctggaaacactgaagagttatcgccagtgtgacccttcagaacgaaagttatatggaaaatcaccactctttgggcagtattttgtgctggaaaacccagggaccatcaaagtgggagaccctgtgtacctgctgggccagtaatgggaaccgtatgtcctggaatattagatgccttttaaaaatgttctcaaaaatgacaacacttgaagcatggtgtttcagaactgagacctctacattttctttaaatttgtgattttcacatttttcgtcttttggacttctggtgtctcaatgcttcaatgtcccagtgcaaaaagtaaagaaatatagtctcaataacttagtaggacttcagtaagtcacttaaatgacaagacaggattctgaaaactccccgtttaactgattatggaatagttctttctcctgcttctccgtttatctaccaagagcgcagacttgcatcctgtcactaccactcgttagagaaagagaagaagagaaagaggaagagtgggtgggctggaagaatgtcctagaatgtgttattgcccctgttcatgaggtacgcaatgaaaattaaattgcaccccaaatatggctggaatgccacttcccttttcttctcaagccccgggctagcttttgaaatggcataaagactgaggtgaccttcaggaagcactgcagatattaattttccatagatctggatctggccctgctgcttctcagacagcattggatttcctaaaggtgctcaggaggatggttgtgtagtcatggaggacccctggatccttgccattcccctcagctaatgacggagtgctccttctccagttccgggtgaaaaagttctgaattctgtggaggagaagaaaagtgattcagtgatttcagatagactactgaaaacctttaaagggggaaaaggaaagcatatgtcagttgtttaaaacccaatatctattttttaactgattgtataactctaagatctgatgaagtatattttttattgccattttgtcctttgattatattgggaagttgactaaacttgaaaaatgtttttaaaactgtgaataaatggaagctactttgactaaaaaaaaaa

SEQ ID NO: 63890 - DNA, 6806 bp, Homo sapiens
cagctccgaggggagtcggaccggagcaaacagccacccccggcttcgtcccccacgaagaggaagggcaggagccgtgccctcgaggccgtgcccgccccgcccgccagcggcccccgggctcccgccaaggagtccccacccaagagggtgcccgatcccagcccagtcaccaagggcactgcggccgagagcggggaggaggcggcgcgggccatcccccgcgagctcccggtcaagagcagctcgctgctgccggagatcaagcccgagcacaagaggggcccgctccccaaccacttcaacggccgggcagagggaggtcgaagcagagagctgggcagagcggccggagcgcctggagcttctgacgccgacggcttgaagcccaggaaccatttcggcgtgggcaggtcgacagtgaccactaaagtgaccctccctgccaagcccaaacatgtggaactaaatcttaaaacccctaagaatcttgacagtttgggaaatgagcacaatccatttagccagccagttcacaaaggcaacactgccaccaaaatctccttatttgaaaacaaacggacaaacagtagcccaagacacactgacattcgaggcccaaggaatactcctgcctctagtaaaacgtttgttgggagggcaaagctgaatttagccaaaaaagccaaagaaatggagcaacctgaaaagaaagtaatgccaaacagtccccagaatggtgtgctggttaaggaaactgctatagaaaccaaagttaccgtctcggaagaagagattctgccagcaaccagaggaatgaatggagactcttctgagaatcaagctcttggtcctcagcctaaccaagatgataaagcagatgtacaaacagatgctggctgcctttcagaaccagtggcttctgctctgattcctgtcaaggatcataagctcttagagaaggaggactcagaggctgcagacagcaaaagccttgtacttgaaaatgtaaccgatacagcacaagacatccccaccactgtggataccaaagatttacctccaacggccatgccaaagccacagcatacattttctgactcacagtcccctgctgagtcatctcctgggccttctctttcactgtctgcacccgctcctggggatgttcccaaagacacatgtgttcaatcacccataagcagtttcccatgcactgatctaaaagtgtcagaaaaccataaaggatgtgttttgcctgtgtctcgtcagaacaatgagaaaatgccacttttagaacttggaggagaaacaacccctcctttgtccacagagcgtagtccagaagctgtgggaagtgagtgtccatccagagtcctcgtccaggtcaggtccttcgtgctccccgtggagagcacccaggatgtgagctcccaggtcatcccagagagctctgaagttagagaagtgcagttgccaacttgtcacagtaatgaacctgaagtggtttccgttgcaagttgtgctcccccacaagaggaagtactgggcaatgaacactctcattgcacagcagagctcgcggcaaaatctggcccacaagtcataccgccagcatcagagaaaactctgcctattcaggctcaaagtcagggcagcagaacacccctgatggctgaatccagtcccaccaactctcccagcagcggaaatcacttagccactcctcaaaggccagatcagactgttacaaatggccaggatagccctgccagccttttgaacatttctgctggtagtgatgatagtgtatttgattcttcttctgatatggaaaaattcactgaaattataaaacagatggatagcgcagtttgtatgcccatgaaaagaaagaaggccaggatgccaaactctcctgctcctcactttgccatgcctcctattcacgaagaccatttagaaaaggtgtttgatcccaaagtgtttacctttggtttggggaagaagaaggaaagtcagccagaaatgtcaccggctttacatttgatgcagaaccttgacacaaaatccaaactgagacccaaacgtgcatctgctgaacagagcgtcctcttcaagtccctgcacaccaacactaatgggaacagtgagcctctggtgatgccggaaatcaatgacaaagagaacagggacgtcacaaatggtggcattaagagatcgagactagaaaaaagtgcacttttctcaagcttgttatcttctttaccacaagacaaaatcttttctccttctgtgacatcagtcaacactatgaccacggctttcagtacttctcagaacggttccctatctcagtcttcagtgtcacagcccacgactgagggtgccccgccctgtggtttgaacaaagaacagtcaaatcttctgcccgacaactccttaaaggtcttcaatttcaactcgtcaagtacatcacactccagtttgaaaagtccaagccacatggaaaaatacccgcaaaaagagaaaaccaaagaagatctggattcacgaagcaacctacacttgccagaaactaaattttctgaattgtcaaaactgaagaatgatgatatggaaaaggctaatcatattgaaagtgttattaaatcaaacttgccaaactgtgcaaacagtgacaccgacttcatgggtcttttcaaatcaagccggtatgacccaagcatttctttttctggaatgtcattatcagacacaatgacacttagaggaagtgtccaaaataaactcaatccccgacctggaaaggtagtgatatatagtgaacccgacgtctctgagaagtgcattgaagttttcagtgacattcaggattgcagttcttggagcctctctccagtgatactcataaaagttgttagaggatgttggattttgtatgagcaaccaaattttgaagggcactccatccccttagaagaaggagaattggaactctctggtctctggggtatagaagacattttggaaaggcacgaagaagcagagtctgataagccagtggtgattggttccatcagacatgtggttcaggattacagagttagtcacattgacttatttactgaaccagaagggttaggaatcctaagttcctactttgatgatactgaagaaatgcagggatttggtgtaatgcagaagacttgttccatgaaagtacattggggcacgtggctgatttatgaagaacctggatttcagggtgttcctttcatcctggaacctggtgaataccctgacttgtccttctgggatacagaagcagcgtacattggatccatgcggcctctgaaaatgggtggccgtaaagttgaattccctacagatccaaaggtagttgtttatgaaaagcctttctttgaaggaaaatgtgtggaactagaaacaggaatgtgtagttttgtcatggagggaggtgaaacagaagaggcgactggagacgatcatttgccgtttacgtcagtggggtctatgaaagttctaagaggcatttgggttgcatatgagaagcctggatttaccggtcatcagtatttgctagaagaaggagaatacagggactggaaagcctggggaggttacaatggagagcttcagtctttacgacctatattaggtgatttttcaaatgctcacatgataatgtacagtgaaaaaaactttggatccaaaggttccagtattgatgtattgggaattgttgctaatttaaaggagactggatatggagtgaagacacagtctattaatgtactgagtggagtatgggtagcctatgaaaatcctgacttcacaggagaacagtatatactggataaaggattttataccagttttgaggactggggaggcaaaaattataagatctcttctgttcaacctatatgtttggattctttcactggcccaaggagacgaaatcagattcacttgttttcagaaccacagtttcaaggtcacagtcaaagttttgaagaaacaacaagtcaaattgatgattcattttctaccaagtcttgcagagtttcaggaggcagctgggttgtatatgatggagaaaatttcactggtaatcaatacgtgttggaagaaggccattatccttgtctgtctgcaatgggatgcccgcctggagcaactttcaagtctcttcgttttatagatgttgaattttctgaaccaacaattattctctttgaaagagaagacttcaaaggaaaaaagattgaacttaatgcagaaactgtcaatctccgatccctgggattcaacacacaaatacgctctgttcaggttattggtggcatatgggttacttatgaatatggcagttacagagggcgacagttcctattgtcacctgcagaagtacctaattggtatgaattcagtggctgtcgccaaataggttctctacgaccttttgttcagaagcgaatttatttcagacttcgaaacaaagcaacagggttattcatgtcaaccaatggaaacttagaggatctgaagcttctgaggatacaggtcatggaggatgtcggggccgatgatcagatttggatctatcaagaaggatgtatcaaatgcaggatagcagaagactgctgcctgacgattgtgggcagcctggtaacatctggctccaagctaggcctggccctggaccagaatgctgacagccagttctggagcttgaagtccgatggcaggatttacagcaagttgaagccaaatttagttttagacattaaagggggcacacagtatgatcaaaatcacattatcctcaacactgtcagcaaagagaagtttacacaagtgtgggaagccatggtcctatatacctgaacaaagaaggaagaagaatcttctggaggtccttccagccaccttatttcttaaaaaggacaatgctgatggaagaccagactggaaagtggatcgactcctccttcattgattctaaattcaaccttaaatcatgctgccatgactcagagaacttactcatcgtttcaaaagactatcatagctttaaaccaataatttgtcctcctttcatttcttgcctttcatttttggtagctgcttaaacaggttgcctaattagcagcttttgggtgattttgtaaaatgttatatcaagatttcaagactgtgtacattttaaattatttccaaagatagtgacaggagagaactggaacaaatttaccaactttgtggacctacaaagcccttacactttaaagggtaagacaaaggcttaagtttgaaaggtagagaactgtttagcatctgagaagaaatactttattaggcctgtaattttggttcttggccttaaacactttctggaacctttaaatatgctgcatagcacaatgggaaagccttaggtattcacacatttaaggaactctaaacaaaatactattttcctttagttcatattaaaaattaatacattttaaaaatttaatgtcaaagtctggtaacatttgttagtaggatttgagttattattttttgagacaggatctcaggctggagtgcagtggcacaatcacggctcactgcagcctctacctccccaggctcaggtgatcctcccacctcagcctcccaagtagctgggactataggcacacatcaccaagcccaggccaaactttgtttttttttgtagagatggggtttcatcacgttgcccaggctgatctcgaacctctgggctcaagcaattcactcgcctcggcctcccaaaatgctgggattacaggcctgagccactgcgcccagccaggatttgaattattttaactcatccatgggctgccctagaatgtcacaaatgagggttgtttaatgcctttcttatagctgctactggaacactattatgacctaatttatgagccatccttactcatctacaagtgctgaagcaatgttacatacttttttgctaaactcagattttttagcctaatttcttgtcctcctatccacctgcatccacacatggcctgcatggggctgccttccctgcagtgttctgcagccatgcttcagggtatagctgttggtggacagcctcaggtcttgggggcactatagccactaaacgaggtgtgaaaggctcaagaggatgaccagcaattaattatccccagaaagtgaaggaaaagagacctttagggatgttgctggtcaagtcttgatttgaccggagtcaaatcaatcttcaagcaatcttggaatcctcaactgcagtaagcatttcaaaatgcaaacaaactgcttaacaactgacaagacaccagcccatatgctgctcttccaacagtgggttctagctttgaacaaaagtgctaaacatttccttgaatatattcttcctctttttgtcctcatcactcaatactggtgctcttgtcacaggtagaacagcttgtttcttttccatctattcaagtgtgtttctaattctaaaatgctgatcttctctggagtctatggtaggcaattatggtcactggaatagtttgtcttgttttaaaatattattggtgcatgtacaacagcatccaacatatctgtcttgttcctagatatatagctctgattttaggccttttgtgcataccattacaatatggtggggtaagacattctacagtagcctgtgctgaactgatctcttaaataaacttgcttctggttaactaaaaaaaaaa

SEQ ID NO: 63891 - DNA, 1157 bp, Homo sapiens
gcggtggaattcggggaagactctaggaataatgaattgcagaacagtgccaggtgttccaaccttgttctatgtcagcacatcccgaaagcagagaggcccactgacagtgaggaacacgggaacaagtgcaagcaaagtttccacatggtgacgtggcacgtgctgaaacctcacaagtctgacagtggagacagtttccatcattccagcctttttgagacccagaggcagctccatgaagaaagaccttataaatgtggtaactgtgggaagagtttcaaacaacgctctgacctctttagacaccagagaatccacacaggtgagaaaccctatggctgccaagaatgtgggaaaagcttcagccagagtgctgccctgaccaagcaccagaggacacacacaggcgagaagccgtacacctgtctgaaatgtggggagcgcttcaggcagaattcacacctaaatcgtcatcaaagtacccacagtagagacaaacattttaaatgtgaggaatgcggggaaacctgtcatatttccaacctttttagacatcagagactacataaaggggaaagaccctataagtgtgaagaatgcgagaagagcttcaaacagcgctctgacctctttaaacaccacagaatccacactggggagaagccctatggatgttccgtctgtgggaaacgcttcaatcagagtgcaaccctcattaaacaccagagaattcacactggggaaaagccttacaaatgtcttgaatgtggggaaagatttagacaaagtacacaccttatccgacaccaaagaattcatcaaaataaagtgctgtcggctgggcgtggtggctcacgcctataatcccagcactttgggaggccaaggcaggcagatcatttgagatcaggagtttgaaaccagcctggccaacatggtaaaatcctgtctctactaaaaatacaaaaatgagccgggcatggtggtgcatgcctgtaagcccagctattcgggaggctgaggtaggagaatcacttgaacccaggaggcggaagttgcagtgagctgagatcatgccactgcactccagcctgggcaacagagcgagactccatctcaaaaaagaaataaagtgctgtcattttgataagtta

SEQ ID NO: 63892 - DNA, 911 bp, Homo sapiens
  misc_feature (1)...(911): n = a,t,c or g
cccacgcgtccgagtgaatgaagagggaacagaggcggcagctgccacagcaggcatcgcaactttctgcatgttgatgcccgaagaaaatttcactgccgaccatccattccttttctttattcggcataattcctcaggtagcatcctattcttggggagattttcttccccttagaagaaagagactgtagcaatacaaaaatcaagcttagtgctttattacctgagtttttaatagagccaatatgtcttatatctttaccaataaaaccactgtccagaaacaagtctttcattttctttgtaagtttggctctgttggctgtttacacccatgaattttggcatgggtatctatttttcttttttacattgaaaaaaatccaggggttgcttttgaatgcatcaagtaaagaagaagaaaagaatacatccgatgcgtagattcttgaccatgtagtaatctataaaattgctatatcctcctgatagccatgggaaaacatgataagatggtcatttattttgcagttagaattttggaagccacaaaatagacagacaccctgactgttgaagggaggtttaaaaacagatattcaattgaaatgtaagagagcaccccaattgagagcccaggttacgaagacaagcttgcctcgcctgacttttctgtcccttgttctgcaggattagtattctgttacagacctctagtttttagactcttcaattaaagggccaatggttataaannagaanaaaaacaccccaaaaaaaagccaaagaaacaaaaaaaannnnnnnnnnnnnnncttttaaaaaggattttgggggggaacaaatataccgggggagaaaaatatttttttttctttttatagggggggcttataaaacccctgtgg

SEQ ID NO: 63893 - DNA, 3224 bp, Homo sapiens
ggcacgagagtgagcccagattgtgtcactgcactccagcctgggcaacagggcgagactctatctcaaaacaaacaaacaaacaaacaaacaaaaacccaagaaggaacaaatcctgattttggaaagaattcagtaagtcttctctaatgagcctcctcaaaacacttctccttcaggcaaggagcctttttttcccctttagaacaaccatttacagcatctgaggccttttttaagggccaggtctcttccctgctgttaggtttttaattttaaggtcaagtttctaacaaaaatttgttttgttgccgtgagattaaactggccatatgagcattaaaaccatctgcttctgaaatagcaagctgaaactcaaccaaaacttgaagctgtttattacgctcacataccaagtcctctctcttcatgggtggggaccgggaattcatttgcagaaagaaggtgcatttccagtcacccagaaccgggcgctgcagctgctttatgatctgcgttacctcaacattgttctgacagccaagggtgacgaggtgaagagtggccggagcaagccagactccagaattgagaaagtgactgaccacctggaagccctcattgatccatttgacctggacgttttcacgccacacctcaacagcaaccttcatcgcctggtgcagcgaacttctgttctgtttggattggtgactggtacagagaatcagctcgccccccggagcagtacgttcaactcccaagaaccccataacatcctgccactggcatccagtcagatcaggtttggacttctcccactgagcatgacaagcactcgaaaggctaaatcaaccagaaacatcgaaacaaaagctcaggttggtgccaagagcaagaggctcatccgtggatgggtccccacctcccaccgagccacccatgatcagctcccttttaaataactgattaagaactgaatgacaaaatgcactaatgctgcttttaatggcggcgcaatagagaagtacaaggttttactagcttgagctactagaaggtgtaaaagatgcccgctgacactaccaagtagcctcttaatagaaatgtagaaaatatacaggacagggtggagatgagctcttgaatttagtagggtgaaagagttaactgccaacccggcactatcattgtacttgtttggagaaaatctgttttgttctggtgatgatggttttatcttcccttttagttgggtgggaagtaacagaaaatttgtttccccaaaagtttgacattttcttgttaatacacgtttcatttcagtacgatgccaactgttaagcctgcaggaatcctcctgggtatttctgaattgtgctgtgtgcatgtgtgtttgaaagctcaaacagcttgtcttcttacagcatcgagttgtttgctttattgttagacacaatattagcagtgtatcctttccgtattccctaccatcgaacccattaagatctaaaatccttgtcaagtatctggctttaaaagttgggagatggtagttttaaaaaaaaaaaaagcttttgcaaaaaccatccagtccctaagcatgggctatgttgcagccttttccaaaacagtttccactgcagtgatctttcagttctgcccacattaggttagcaggctgtggaaaaaagtgcctgtgtctacccttttcccaagacagtcctcatttccaaattctagttttgtcacaaaggctcatgctgttccgtgtcctcttcaaatctggaccgacagcaaagtcctctgactagagccatcgtgcttctcagctccgcttgtgtgtgccgtgtggactccgagtggcgtcgcgcggagggcgagtgggcaggagggctcaggccaactctaaggcacttttctctacatccaatggcaggttgtccccccggcacgctccacagctggtgacccgacagttcctggctccttgttcagacagcttgtcagtgaagaagacaacacgtctgcaccttcattattcaaacttggctggctctctagtatgactaagtaacatggcaacacatctgtctctccctaaataaatactaccacattatttcttctaaaggtgcctctgctcatctgattctcagccacaccaatctttccagtttcactgatggaatgtggccccctagttactgttgggggttactttaagcatcaagttaatccttgtcccaaaatttcacaatacttgttgctttagacatcagttcaggtagcttacattttatcagcgttcaacaacaccttaattgttgacactacaaggtggaattgtcaatgagatcatgtaagctgctgactgaccaagtttgtaggacaaaaagtcattacatattactttacttgcagaactgtgccatgtttcctactaaagtctgaggtgcagactctggtggaatagtgacacagaagttatctgggtatacaagaatctaaaagacattctccctggaaatacaaatatataacaaagagtagagactattattagggagtgtgcttcactgacagtctgaattggatctgattgttctcctgttacacaggagagagtactttcaatagaacatctacatactgagaggtagtatggcagttaatttcagtgcaagactgaatcaagcttcctatattttggaaaaaaacttatgttttttcatggaaactagatactctttactagtttattgaataaaaaaaattgaagatcccgcatttttaaaaggccctttacataaagtagagtttctagttgacagatttggaaatcagtctgaatgggacatactatggattcaacacacagaatgagttttcctcaaaccactaccttgacatagatttgataccctccctcaaaagaatcctataaaaaattgcttcaaagcccctttgaaattgcaatagtgcagcaaaaccacaagtaaacaactgcctgttaacctgttatttcaaatatagactgaaaagccaacaggcatttttcgtgtgcaatttttcttttaaaacaagttgtaagttgaaatatcaaatctgcacagcgctgtcccttcacagaaggcaagaaactgccggcacatcatgtcagaggccgccctcggtgctgtagctcgtgccgaattcctgcaggcggtgcaagttggtctaat

SEQ ID NO: 63894 - DNA, 2946 bp, Homo sapiens
  misc_feature (1)...(2946): n = a,t,c or g
ccagggagcaacatgagcaaaaataggagtgtgtcagagtttggtgtattagaggaactgccagttgttcatactggctaggcagggccttacatttgaggggagaagggtgagagattgagctgggtggaggaggacatgaaggcctttgggtgccatgatgggaggtggtggaaggttttgacctgtccaccttcctgtttcctccttgaagctgaggcatacgtcagtgggatgctcttttgcctgggtatatttctctccttttacctgctgaccgtcctcctggcctgctgggagaactggaggcagaagaagaagaccctgctggtggccattgaccgagcctgcccagaaagcggtcaccctcgagtcctggctgattcttttcctggcagttccccttatgagggttacaactatggctcctttgagaatgtttctggatctaccgatggtctggttgacagcgctggcactggggacctctcttacggttaccagggccgctcctttgaacctgtaggtactcggccccgagtggactccatgagctctgtggaggaggatgactacgacacattgaccgacatcgattccgacaagaatgtcattcgcaccaagcaatacctctatgtggctgacctggcacggaaggacaagcgtgttctgcggaaaaagtaccagatctacttctggaacattgccaccattgctgtcttctatgcccttcctgtggtgcagctggtgatcacctaccagacggtggtgaatgtcacagggaatcaggacatctgctactacaacttcctctgcgcccacccactgggcaatctcagcgccttcaacaacatcctcagcaacctggggtacatcctgctggggctgcttttcctgctcatcatcctgcaacgggagatcaaccacaaccgggccctgctgcgcaatgacctctgtgccctggaatgtgggatccccaaacactttgggcttttctacgccatgggcacagccctgatgatggaggggctgctcagtgcttgctatcatgtgtgccccaactataccaatttccagtttgacacatcgttcatgtacatgatcgccggactctgcatgctgaagctctaccagaagcggcacccggacatcaacgccagcgcctacagtgcctacgcctgcctggccattgtcatcttcttctctgtgctgggcgtggtctttggcaaagggaacacggcgttctggatcgtcttctccatcattcacatcatcgccaccctgctcctcagcacgcagctctattacatgggccggtggaaactggactcggggatcttccgccgcatcctccacgtgctctacacagactgcatccggcagtgcagcgggccgctctacgtggaccgcatggtgctgctggtcatgggcaacgtcatcaactggtcgctggctgcctatgggcttatcatgcgccccaatgatttcgcttcctacttgttggccattggcatctgcaacctgctcctttacttcgccttctacatcatcatgaagctccggagtggggagaggatcaagctcatccccctgctctgcatcgtttgcacctccgtggtctggggcttcgcgctcttcttcttcttccagggactcagcacctggcagaaaacccctgcagagtcgagggagcacaaccgggactgcatcctcctcgacttctttgacgaccacgacatctggcacttcctctcctccatcgccatgttcgggtccttcctggtgttgctgacactggatgacgacctggatactgtgcagcgggacaagatctatgtcttctagcaggagctgggcccttcgcttcacctcaaggggccctgagctcctttgtgtcatagaccggtcactctgtcgtgctgtggggatgagtcccagcaccgctgcccagcactggatggcagcaggacagccaggtctagcttaggcttggcctgggacagccatggggtggcatggaaccttgcagctgccctctgccgaggagcaggcctgctcccctggaacccccagatgttggccaaattgctgctttcttctcagtgttggggccttccatgggcccctgtcctttggctctccatttgtccctttgcaagaggaaggatggaagggacaccctccccatttcatgccttgcattttgcccgtcctcctccccacaatgccccagcctgggacctaaggcctctttttcctcccatactcccactccagggcctagtctggggcctgaatctctgtcctgtatcagggccccagttctctttgggctgtccctggctgccatcactgcccattccagtcagccaggatggatgggggtatgagattttgggggttggccagctggtgccagacttttggtgctaaggcctgcaaggggcctggggcagtgcgtattctcttccctctgacctgtgctcagggctggctctttagcaatgcgctcagcccaatttgagaaccgccttctgattcaagaggctgaattcagaggtcacctcttcatcccatcagctcccagactgatgccagcaccaggactggagggagaagcgcctcaccccttcccttccttctttccaggcccttagtcttgccaaaccccagctggtggcctttcagtgccattgacactgcccaagaatgtccaggggcaaaggagggatgatacagagttcagcccgttctgcctccacagctgtgggcaccccagtnctaaccttagaaagggggcttcaggaagggatgtgctgtttcccttctacgttgcccagtcctagcctcgctctaagacccaggggctgggcttctaagtttccggtcaagtctttaangcaagttctgtgttaagtcatgcacacacataccctatgaaacctt

SEQ ID NO: 63895 - DNA, 1258 bp, Homo sapiens
ttgaacagttgggaaaggagtctgggtttcaccagaaagctctccagagggcccagaaagcagagaatatgttggagactcttcagggtcagctgacacacctggaggcagagctggtttctggaggtgttttgcgagacaacttgaattttgagaaacaaaaatatcttaaatttctggatcagctttctcagaaaatgaagttggaccagatggctgccgaacttggctttgacatgcggctggacgtggttttagctcgaacagagcagctggttcgtcttgagagcaatgcagtcattgagaacaagaccattgcccacaatttgcagagaaagctaaagacacagaaagagagactggagagcaaagaattacacatgagcctcctccggcagaaaatagcccagctggaggaggagaagcaggcacgcacggccttggtggttgagagggacaacgcgcatcttaccatcaggaacttgcagaagaaggtggagaggctgcagaaagagctgaacacgtgtcgagacttgcacaccgagctcaaagccaaactggccgacaccaatgaactgaagattaaaactttggaacagactaaagccattgaagatctaaacaaatccagagaccaactggagaagatgaaggagaaagctgagaaaaagctcatgtctgtcaagtcagaactggataccacagaacatgaggctaaggagaataaagaaagggccagaaacatgatagaagtggtaaccagtgaaatgaagacactaaaaaaatctctggaagaagcagaaaagagagaaaagcagctggcagacttcagggaggtggtgtcgcagatgctaggcttgaacgtgaccagccttgctcttcctgattatgaaatcatcaagtgtcttgaaagattggtccattcacatcagcatcactttgttacctgtgcctgcctcaaagatgtgactactgggcaagagaggcacccacaaggccatttacagcttcttcattgaacactgtatctcttgagagaggtggccataagacatggcacacaattcccaatttcacaaattcctcatgtctttgagatttgatcagtttgtgaatattttatgctttgatgatatagtgagaatgcatcacttgcaaaaacgatctcaaaagtgtcagccttagataaacgttcagcattaaaaacgcctattatttcatttactagcattttaggatccagaagaattccaccaga

SEQ ID NO: 63896 - DNA, 2130 bp, Homo sapiens
cctcgccgcagtgggcccgcccgctggcccgtttccggtccggtgggtacaagatgacggagccgggcgcctctcccgaggacccttgggtcaaggtggagtatgcctacagcgacaacagcctggaccccgggctttttgtagaaagcacccgcaaggggagtgtagtgtccagagctaatagcatcggttccaccagtgcctcttctgtccccaacacagatgatgaggacagtgattaccaccaggaggcctacaaggagtcctacaaagaccggcggcggcgcgcacacactcaggctgagcagaagaggagggacgccatcaagagaggctatgatgaccttcagaccatcgtccccacttgccagcagcaggacttctccattggctcccaaaagctcagcaaagccatcgttctacaaaagaccattgactacattcagtttttgcacaaggagaagaaaaagcaggaggaggaggtgtccacgttacgcaaggatgtcaccgccctaaagatcatgaaagtgaactatgagcagattgtgaaggcacaccgggacaacccccatgaaggggaggaccaggtctctgaccaggtcaagttcaacgtgtttcaaggcatcatggattccctgttccagtccttcaatgcctccatctcagtggccagcttccaggagctgtcagcgtgtgtcttcagctggatcgaggagcactgtaagcctcagaccctgcgggagattgtgattggcgtcctgcaccaattgaaaaaccagctttactgaccggttcttggaaacctggagaacagccaacaagaggcccttgaatctctacgtggccactgaactgctgggcccgggagactggactacaacacctcacactggtcagctggtttctacttggtgtttggtttttcccagccccattttatcttcagcggagccgcggtgtttgttttgtgaaagcttctgattaatttattatattgacgataaaactcaaacctacccagccttccccccactccatggaagtccttgggatgggcgtctgctctggacaccccaaagagctcctgccctctcagccctttattcaagcctcagatttctgctcatgatctacatagatttggaaactgttttcctctgttttggtctcttgggcaacatttttggcccaagtttgggcaacatttggcccaagtttgggcattttggcagtagctgtatgggagaaaaagagtaagaggaaatattcccacagccatgaagggtgaaagggcaccttgtgcctagactagggctgcctggtcagtcccaggtgaggccaagggctttctggccatctcagggaggggccaccaggttcctcccctcaccccatattccatcaccttcctcctctgctctgggtggtaagggaagccctcccggttcccacaggctatgatgctgcatggcagaggcaggtataacacagcactacatattggaaattttttatttttctaaataccaatgcagttttgctacggttacaattttgaaatattaactgagcctcaaaatcaccctttctgtcaagcatatcttggcctctcccatgtctcagtgttgcctgcatttctcccaggacttgggggtggggtgaaaagcgtacaaaagatacttaaaagggctcctggggtacacaagcccagcaggtcctgagtgaagccgtgggccctccaaatgctcgttttatagcaacctctctctaccctagttctccaaattcacttctgccttcctcaggtttgatatctggcaggtttgactatccagaggaaattaaatatttttatataaaattaaattataataaatattgccaaatgctttccttttagcattggttccaatgtctaaatggttaacctcaagctactgcaatttagacaatgaaatggggctggggtctacccccagccaccagccctcatcctctctacccagtgctctggggttatgcctggctcctgactgctctgcttaaaggtgaaagtagcaggaacaacaacaaaagccaaccaaaaacaaggtagccagtgcaagacatctcactcttctgacatcctgc

SEQ ID NO: 63897 - DNA, 1341 bp, Homo sapiens
ttttcacagggagcattaaattattattccatacagccctggccctggcccttcttgagggagtggggtttgtgggggtgtgcccagcagggatcctgccagatgatgtccacatgagaaggcaggtgtccaacagcttcagcttcacccagtgccccccagacaaataatgacaagtccagggtcttctgatgtgtcaggccagcactccccttgctgatgggaaaaccggggctcggccagccccactgcatcccctcacatgatgatacgaggctctggcactgactcgccaatagacttgtggggcagcacgctggctccgttgaggtagagctcatcattaactatgacgtcctcacccagcactgtcacgttctccatgcgtacccactgacccacgcggcagcgccagcccacaatgcaggactcaagccaggaatgggaacggatccgggcatcccgcagcaccgtgcaccgccggatacacacaccatcttcgaccaccacgccaggtcccaggctcacattggggccaatgctgcagttctggccgatgcgggcacttgggtccaccagcacgttgcccacaatgccagggcctgagcacagccgctcaggctgcttctgcctcagtgactgcaggaagaggcacatgccagtgaggaagtccttgggctgcccaatgtccatccagaagccctgtaactccatggcatatagctgcccctccttggccataatggggaagacctccttctcaatggacgtaggctgcagctggatgcgccgcagcactgcagggctcaggatgtacatgcctgcgttgatcttattggacacaaacacctgtggcttctccacgaaccggtgaatgcggcctgtgtcagcctcacacaccaccacaccgtacttggagggttcctccaccttggtcaccaggatggagccctcctggccatggtgccggtggaactgcaccatggcttggaaggggaaatcgcagatcacgtcactgttgaggacgaagaaagggtctgcagtctcagagagtaggtcacgggccagcgccaggggcccagctgtccccaaaggctcctcttcatgggacatggagattcggattcccagcctctgctcctgtgccttcatttccttctccagcacctgcgacatgtagctcacggccaggatcacgtggtccacgcctgccgcggctagcgcctccacttggtgcagcaagatgggcttattgcagaagtccaccagtggcttcggggtgctcagcgtcagcggccgtagccgcgtcccatagccccccactaagatcagtgccttcat

SEQ ID NO: 63898 - DNA, 1218 bp, Homo sapiens
ttttttttttttggtacacgcactggcttgtttattagaaaaagtcttagagactcagtaaggcacgaagtccaggaagtgggcagggtcccctgggggacgtgaccaggaacaccagggcttcagtgccggatgccccactgtggtgggagttccccgctctctccagcagccccgctcccgtggagcctgaggacaagggagccctttcatccgagatgctgaatatgggcaacagggaggaggggaaggaagaggcagctccaccgtgtgggtgtggcggggggatggggctctgcaggagcctgatgctcctcggaccctgaaggcactacgactagaaggcccggctcaggggcaggtcctggagctggggcaggggtgggggctcagcctggctgattggtgtggggagggggcaggttggctgtcactgagccgagaggcaccaggtggcaggaggcaccagatggcaggctgtgaggctgcctcagctgaagtcgcggttgcgcaggaggagtggggctaccagggtccacaggtagaggagcagccctgcccagctggcacagatcttcacccacacggcggtccacgtgctgatcatcttccgggtctcaccgggcttgtaccagttggtgagcgtcatcatgacgtgcagtgaggccagcaccaggcagaagtggaagaaggagtagctgtaggtgacgccgtcctgctcgttgtcaaaggcccggccctcacaggctgccacctgctgctgctgctgctgtgtggcgtctagcataggtgggcactcctcggtctgcatcaggctgttcacctgccggtggtctgaggagcgcagactgatgaagagggtgcacaggaggaagatgatgaggcccacaatgctcggggcatcccaccactgggtctcatagccctcggggcctgccacaactgtctcgttgcccagctgggttggcaaatgggggttgcatttctgttcagggatactggatagggctgaccaggtgacaaacatggtgtagagggtgatgaccgaggcctgcagcagacccgagttgggctgggcgtcctggaccttgggcaggacagcagcgatggacacgcagacacagaaggtgaggttgaggctgataaagaccttgccctcgtggcagccgctgggctcagtgtagtacatgaacatcagcgccacgggaattccagcac

SEQ ID NO: 63899 - DNA, 1873 bp, Homo sapiens
cccacgcgtccgcctgcttcagcctcccaaattgctgagattatatggcatgagccaccgcgcccggcctgagctcatcagttctgacacacttaagtagtaaattgttcctacagttccttgaagctcatcttctcacagagaaggactgtatttaacttcgaggcttatgaacatttaaattaccaaggctttcctccatcacagggaggaacaaccgtctctagtcttaatataaatatttttatgagaattccaaaagagaacaagtagatttatctgcattttttgtgtaatcaacaggacagttttggcatgtgactgacttacacttagaccctacttaccacatcacagatgaccacacaaaagtgtgtgcttcatctaaaggtgcaaatgcctccaaccctggcccttttggagatgttctgtgtgattctccatatcaacttattttgtcagcatttgattttattaaaaattctggacaagaagcatctttcatgatatggacaggggatagcccacctcatgttcctgtacctgaactctcaacagacactgttataaatgtgatcactaatatgacaaccaccatccagagtctctttccaaatctccaggttttccctgcgctgggtaatcatgactattggccacaggatcaactgtctgtagtcaccagtaaagtgtacaatgcagtagcaaacctctggaaaccatggctagatgaagaagctattagtactttaaggaaaggtggtttttattcacagaaagttacaactaatccaaaccttaggatcatcagtctaaacacaaacttgtactacggcccaaatataatgacactgaacaagactgacccagccaaccagtttgaatggctagaaagtacattgaacaactctcagcagaataaggagaaggtgtatatcatagcacatgttccagtggggtatctgccatcttcacagaacatcacagcaatgagagaatactataatgagaaattgatagatatttttcaaaaatacagtgatgtcattgcaggacaattttatggacacactcacagagacagcattatggttctttcagataaaaaaggaagtccagtaaattctttgtttgtggctcctgctgttacaccagtgaagagtgttttagaaaaacagaccaacaatcctggtatcagactgtttcagtatgatcctcgtgattataaattattggatatgttgcagtattacttgaatctgacagaggcgaatctaaagggagagtccatctggaagctggagtatatcctgacccagacctacgacattgaagatttgcagccggaaagtttatatggattagctaaacaatttacaatcctagacagtaagcagtttataaaatactacaattacttctttgtgagttatgacagcagtgtaacatgtgataagacatgtaaggcctttcagatttgtgcaattatgaatcttgataatatttcctatgcagattgcctcaaacagctttatataaagcacaattactagtatttcacagtttttgctaatagaaaatgctgattctgattctgagatcaatttgtgggaattttacataaatctttgttaattactgagtgggcaagtagacttcctgtctttgctttctttttttttttctttttgatgccttaatgtagatatctttatcattctgaattgtattatatatttaaagtgctcattaatagaaggatggatgtaaattggatgtaaatattcagtttatataattatatctaatttgtacccaagattgaacctgtcatttatacaataaagcgaattctttatctctaaaaaaaaaa

SEQ ID NO: 63900 - DNA, 1474 bp, Homo sapiens
  misc_feature (1)...(1474): n = a,t,c or g
gcggnggaattcggaaaattccaaagtgtctccaatggtctttgattttgaacatgcatggtaagaggtcaggaagaaaagtaagtaaataagtaaacagacctgatgttctctctcataaagccaccctcatccttacttgactttgacatctctatagctcccttttttcctagtaatattgaaaggattacccttgttggccctaggtggttactgtgtgattttactgttattaaatctattataaactgcttcattattcctgaccttgactctatctctcctttaatccttccgtcgccctctcagaaatcccatgctgttggcccccaggaaatccgagagcgagccacagtcttgcagacggtatttgaagattacgtgcactccagtgagaggagggtctcctgggcaaagaaagctctgcagtccttcatccaagcctacgccacctaccccagggagctgaagcacatcttccacgtccgatccctccaccttgggcatgtggcgaagagcttcggactaagagatgcccccaggaatcttagtgccttgactagaaagaagaggaaagcacacgtgaaaaggcctgaccttcataagaagacccagagtaaacacagcctcgctgaaatcctacgttcggaatactcaagcggcatggaggccgacgtcgccaaggtcaaaaagcaaaacgcacctggagagcctggtggccggcccctgcagcacagtctgcagccgacaccctgctttggccgtgggaaaacattaaaatggagaaaaacccaaaaaggtgtacagcgggacagcaagacttcccagaaagtttaaaatctctctgggtcttcgagtggaacctggaagccccgggtggcagtggattgatgtccagttcttgtcagaggagccttgtgaaaaataactgcgcctttgcctgaataccacgtccccaagaatcagaggggccacagcccttctcctccatgggaggccctggagcctgatagaaatcagtggtgtggggcactgtagagactagccagctcccgacggaaggggtctgtgtcttgtattgatcccatcagtgcccggcactcccttcacccaggtgctgacgtgccggggttgagctggcaccccgggatgtgatgtaagaacgccctgcgcgccagcctggaacgggcttgattgctgcccttaactgtgttctgaagtttcacagcttggcttcagcctatcagcgcatacattggcatgaattttgtgaattagggtgttaaaaactggaattgaatttgtacaaaaagagaatatatttatcactaattattttcttaatgtaggaatgtaccgttaaaaagcaccactgcactccagcctcggtgacggagcgagactccgtctcaaaaaacaaacaaacaaacaaacaaaacaaagcaggtgtattgcggccgctctagaggat

SEQ ID NO: 63901 - DNA, 2957 bp, Homo sapiens
agtgactgaaaagactgcggaagacaagtcgagtagccatgatgtgaaaacagacactttagctgaggacaagcctggtccaggtccattttctgatcagtctgaacctgcaataactactagtagtcctgtggcttttaacccatttctcatcccaggagtatctcctggactcatttacccatccatgttcctctcccctggtatgggcatggctctgccagccatgcagcaggccagacactcggaaatagtaggtctggagagccagaagaggaagaagaagaagacaaagggggacaaccccaactcccacccagagcctgctcccagctgtgaaagggagcccagcggtgatgagaactgtgccgaacccagtgcccctttgcccgcagagagagaacatggggcacaggctggggagggggcactcaaagactccaacaacgacaccaattagaacttttttcatttaagaaattattgtgacttgtaagtttcttatcccataaaggtttggtacttccctcacttcacctccataagaacctgtgtttccataagtaagattacgtacctgatttcctgtctgagaactatggtaacagatgttaatagttgcagggtctcaccacttcattagataagtgttgtctacctagtctaggaggcacagaattctcattctgttatccagttcattccagcaatcatagttaatacagtacttggtgacacgccctacccccttctcttccaagtttcccactcacttgaggaggaaaaatggcaaaagaaagctgtctagggttttaccattgaagggtggaagaacagagacaaagaggagctctttttctgtgagctgggttgcacaggaagaatgtcacagggaaccaaaaagcacagaaaaaggaagtgctggtgcatatttttgagttaaaatatttccctattttatcatgattactaagtgagtagtatagacagaagtatataactaatggttgaaaatacatatattcatttctttataaaaaacaaaaaccttaccggtagtaatataatttcccccttggtggtttttcagacacctgcagcaagaagaaatactgactgactaggcattattttctatacatccctctcaccagtgaaaagattcctcttgctgcgagaaagctttacccaccatgagttattgctgtcgacgggggtggggcaaggacccgcgctccgtagagctacacgctgcttcacaagcacacggctagcgctctgctctcacctggttcgcttacagatttctctagccattaatttgcctctctgtgtttaaagagcaccaggaccgaatggattttcacttcaggctttccttcaccaagaataaggttctttctggagcctgcaagaagacagttgcccaacactttgacacttgctagtaggtcctttgatcaagagtgtctgaggctgtcaaatgtgtgccaccctttataatacagctatgaaaagttacttctccattaatttctccattctgtttatatcttacagttggacccaaattccaaattatcagttaatcgaaactacattgcaagtcaacattattttctcttcttcctcagcttctccatgtttaggaactgagaaagaacctgcctaagcagcacttccccatgtcctttcaccttcatgttaacgtcccttctgatggtctcactcttcacaggtagttcacactctgagacttgaagtaagctcatggttcagtactctgggggcgcagggctgcgcaggacccttggaaatgttgcaagtgttactagtaccagtttcactttttgttgtcacaatttactgtattttttactttttctgttacagttttgctaatttatcagaaggtccaaaagtctgacataactatttcattttgcattatttatttatgatgcttttttcattgtcttttatacatttgggattataaattatgtaaatgttaaaatgagcatctcaaagaagtctgttaaatcatgactgaaaaaaatcaatcagatgtatcttcaaaaagtggagtcccagttttatgaatcagagatataaaccagaaattctataactgatcatagaagaagaatccagtaattgaacaaatcctatttaatgacatccttgtagcatagatggtctataatgctgaccacagatttcttagaaatgctgctctctctatttaactaacattttgttcagttttgcctccagtggaagcagaaagggttttttcagctgttaaatcctaaaaatcaatataatttatttatgtaagaaaaataactcaatcaatatatttttgaaccttttaagtactaattttctttttatcaagtagaaaaaaaaatgtatttgccctaaatccttaaaatacaaatgctataaaaattcctgtatcttgaaagccttactgcaaatgagtattatagacatccagcagagtctggttttctttgttgtcgttgtgttgttgttgttttgtatggaaaagctgctttccccgggttccacttataacctccggtaggtcacagggttcaatgtggatctgacttaaaaacccaccagcatgctcaatcccttgttatccttatggaatctgtatgttaactctctgggtgttcaggcttctatttgactgctgttgtgaccctgtttgcaaaatgaatatgacactctgtggattatttgctctgtaaggcacaagtgcttcttatgattattttgacgtttccaagagcaaaagccaaatttaaactctcttcagcaaacttgagccttttcatctaattccatgtcactcacggccataactttccttgaccattcttcaccccatgtcttacataataaattgtggtcttgatcctggatttaaaaacaaaaaaaaa

SEQ ID NO: 63902 - DNA, 1154 bp, Homo sapiens
actacagtgcggtggaattcgctgagcgaggcagcggcggcagcagcggggacgagctcagggaggacgatgagcccgtcaagaagcggggacgcaagggccggggccggggtcccccgtcctcctctgactccgagcccgaggccgagctggagagagaggccaagaaatcagcgaagaagccgcagtcctcaagcacagagcccgccaggaaacctggccagaaggagaagagagtgcggcccgaggagaagcaacaagccaagcccgtgaaggtggagcggacccggaagcggtccgagggcttctcgatggacaggaaggtagagaagaagaaagagccctccgtggaggagaagctgcagaagctgcacagtgagatcaagtttgccctaaaggtcgacagcccggacgtgaagaggtgcctgaatgccctagaggagctgggaaccctgcaggtgacctctcagatcctccagaagaacacagacgtggtggccaccttgaagaagattcgccgttacaaagcgaacaaggacgtaatggagaaggcagcagaagtctatacccggctcaagtcgcgggtcctcggcccaaagatcgaggcggtgcagaaagtgaacaaggctgggatggagaaggagaaggccgaggagaagctggccggggaggagctggccggggaggaggccccccaggagaaggcggaggacaagcccagcaccgatctctcagccccagtgaatggcgaggccacatcacagaagggggagagcgcagaggacaaggagcacgaggagggtcgggactcggaggaggggccaaggtgtggctcctctgaagacctgcacgacagcgtacgggagggtcccgacctggacaggcctgggagcgaccggcaggagcgcgagagggcacggggggactcggaggccctggacgaggagagctgagccgcgggcagccaggcccagcccccgcccgagctcaggctgcccctctccttccccggctcgcaggagagcagagcagagaactgtggggaacgctgtgctgtttgtatttgttcccttgggtttttttttcctgcctaatttctgtgatttccaaccaacatgaaatgactataaacggttttttaatgaaaaaaaaaa

SEQ ID NO: 63903 - DNA, 430 bp, Homo sapiens
ggaattccgctgctgcgcttccgcttcctgctggaccacacggagccccgcaggaagccggagctgatcatgcgcgctgaaggaggactttggctgcgaggggagcccctgaacgcgggcttgcagtgaccctctgacccatccacctgcctttccagattctccggaataaaactgtgcctgggcctctactgacagccagcagggggctcttgaggactgggaggcgtcagggaaggggcataacctgggcgggttaggtggggtgttgtcactgaacccaagaacctgactgcctctttggctgatcatagggcctccatgctttgggagtgtcccaagaccgaggtccttagccagctcagaacacagggatagaagggtgcagcttctatcctggtaggcttttaggaattcttagctccctttc

SEQ ID NO: 63904 - DNA, 1888 bp, Homo sapiens
tttcgtgcggctgctgcggctccgggcggctctgactctgctcggggaggccccccgccgcccggcctcccgggggtcccgggctcgcgcaggacgcagaagggcagtggagccaggtgggagaaggagaagcacgaagacggggtgaagtggagacagctggagcacaagggcccgtacttcgcacccccatacgagccccttcccgacggagtgcgtttcttctatgaaggaaggcctgtgagattgagcgtggcagcggaggaggtcgccactttttatgggaggatgttagatcatgaatacacaacaaaggaggttttccggaagaacttcttcaatgactggcgaaaggaaatggcggtggaagagagggaagtcatcaagagcctggacaagtgtgacttcacggagatccacagatactttgtggacaaggccgcagcccggaaagtcctgagcagggaggagaagcagaagctaaaagaagaggcagaaaaacttcagcaagagttcggctactgtattttagatggtcaccaagaaaaaataggcaacttcaagattgagccgcctggcttgttccgtggccgtggcgaccatcccaagatggggatgctgaagagaaggatcacgccagaggatgtggttatcaactgcagcagggactcgaagatccccgagccgccggcggggcaccagtggaaggaggtgcgctccgataacaccgtcacgtggctggcagcttggaccgagagcgttcagaactccatcaagtacatcatgctgaacccttgctcgaagctgaagggggagacagcttggcagaagtttgaaacagctcgacgcctgcggggatttgtggacgagatccgctcccagtaccgggctgactggaagtctcgggaaatgaagacgagacagcgggcggtggccctgtatttcatcgataagctggcactgagagcaggaaatgagaaggaggacggtgaggcggccgacaccgtgggctgctgttccctccgcgtggagcacgtccagctgcacccggaggccgatggctgccaacacgtggtggaatttgacttcctggggaaggactgcatccgctactacaacagagtgccggtggagaagccggtgtacaagaacttacagctctttatggagaacaaggacccccgggacgacctcttcgacaggctgaccacgaccagcctgaacaagcacctccaggagctgatggacgggctgacggccaaggtgttccggacctacaacgcctccatcactctgcaggagcagctgcgggccctgacgcgcgccgaggacagcatagcagctaagatcttatcctacaaccgagccaaccgagtcgtggccattctctgcaaccatcagcgagcaacccccagtacgttcgagaagtcgatgcagaatctccagacgaagatccaggcaaagaaggagcaggtggctgaggccagggcagagctgaggagggcgagggctgagcacaaagcccaaggggatggcaagtccaggagtgtcctggagaagaagaggcggctcctggagaagctgcaggagcagctggcgcagctgagtgtgcaggccacggacaaggaggagaacaagcaggtggccctgggcacgtccaagctcaactacctggaccccaggatcagcattgcctggtgcaagcggttcagggtgccagtggagaagatctacagcaaaacacagcgggagaggttcgcctgggctctcgccatggcaggagaagactttgaattctaacgacgagccgtgttgaaacttcttttgtatgtgtgtgtgtttttttcactattaaagcagtactggggaattttgtacaaaaaaaaaa

SEQ ID NO: 63905 - DNA, 1607 bp, Homo sapiens
  misc_feature (1)...(1607): n = a,t,c or g
gcagtgcggtggaattcctggaagggaggggggcagcagccgccccctggaggaagggaccgggtctagccccgcctgcgtgcgaggcgccgcgccagggtctgaggatgctttttacccaacaagggccaagcaggcgcgggtgtcccaggagctgaagaaggctgccaagcggaccgtgagcatcagcgagggcccggacaccctaggcgatgggatgagggagagaagggagactctggctctggcccctgagccagagcccctggagaaggaagcttgtgagaagtggaagaggcccttcaggtctgcctcagccacctccctgacgctgtcccactgtgtggatgtggtgaaggggcttctggattttaagaagaggagaggtcactcaattgggggagcccctgagcagcgataccagatcatccctgtgtgtgtggctgcccgacttcctacccgggctcaggatgtgctggatgcccacctctctgaggtcaatgctgttcgttttggccccaacagcagcctcctggccactggaggggctgaccgcctgatccacctctggaatgttgtgggaagtcgcctggaggccaaccagaccctggagggagctggtggcagcatcaccagtgtggactttgacccctcgggctaccaggttttagcagcaacttacaaccaggctgcccagctctggaaggtgggggaggcacagtccaaggagacactgtctggacacaaggataaggtgacagctgccaaattcaagctaacgaggcaccaggcagtgactgggagccgcgaccggacagtgaaggagtgggacctcggccgtgcctattgctccaggaccatcaatgtcctttcctactgtaatgacgtggtgtgtggggaccatatcatcattagtggccacaatgaccagaagatccggttctgggacagcagggggccccactgcacccaggtcatccctgtgcagggccgggtcacctccctgagcctcagccacgaccaactgcacctgctcagctgttcccgagacaacacactcaaggtcatcgacctgcgtgtcagcaacatccgccaggtgttcagggccgatggcttcaagtgtggttctgactggaccaaagctgtgttcagcccggacagaagctatgcactggcaggctcctgtgatggggccctttacatctgggatgtggacaccgggaaactggagagcagactacagggaccccattgcgctgccgtcaacgccgtggcctggtgctactccgggagccacatggtgagcgtggaccagggcaggaaggttgtgctctggcagtagggccacgacctgcctgcctgggctggagctcttgcccgaagcctgaagcttccttcggcgccatgcaggggttggggttgggactggagctggccttgggatttaatggggaagaaggcctggcaggacctggcctgtttgtttaaaaatgaagtatgggttgggggattacgctagtttttctttgtatttttatctctatctatctcctcactttttctcccaaagtagaaaaaaatgatatctgaactgannaaaaaaaaaa

SEQ ID NO: 63906 - DNA, 1369 bp, Homo sapiens
ctaccatcccccatgaggaggaaatcaacacaactgataaaagaagctgatgaaaaacatcagagagagagagagtttttattaaaagaagcgacagaatcgaggcacaaatacgaacaaatgaaacagcaagaagtacaactaaaacagcagctttctctttatatggataagtttgaagaattccagactaccatggcaaaaagcaatgaactgtttacaaccttcagacaggaaatggaaaagatgacaaagaaaattaaaaaactggaaaaagaaacaataatttggcgtaccaaatgggaaaacaataataaagcacttctgcaaatggctgaagagaaaacagtccgtgataaagagtacaaggcccttcaaataaaactggaacggttagagaagctgtgcagggctcttcaaacagaaaggaatgagctcaatgagaaggtggaagtcctgaaagagcaggtatccatcaaagcggccatcaaagcggcgaacagggatttagcaacacctgtgatgcagccctgtactgccctggattctcacaaggagctgaacacttcctcgaaaagagccctgggagcgcacctggaggctgagcccaagagtcagagaagcgctgtgcaaaagccccccgtccccaggctttgctccggccaatcgagtcggttgactaagatgaggtgtgatcactgtattgagagatatattttgtgtataactttctctgttagtagttaactattggttttgtggtgaaaattttcttactttttctaccatatctgtattttcttagaacctactggacttatgtggtacaggaggctgcttagcagttttgaatagtttaatctataaattttcctcagctgtgttgcacatcagcctcgttctccctccactggaatgcatgtgttcactgccttgtcctttctctccctgctccttgcacattatcatcctaatgaaaatttcactgacagggccgaccattacaagggaactttgttctgacgatggttccttgatgtgaaaacaatattaatttaaacgtcttagcccccccccccataatattattcagaaaaacaaaataccaaggcgattagttttgtctaataacccatttaaatgccaagtaaaaataaaactcctagtgttgggtcagaagcatatttgattgaaattagctttttgaaaacatttatatctcgggacaaattgagatggccacatgcctagaatcctaagtttcggcagaatatgtatataaagatgtcacttgtggacaaaatagtacatagaggcaaatcactagacaaataagcttagtgtttacgtgactggaacagtcatcctg

SEQ ID NO: 63907 - DNA, 1098 bp, Homo sapiens
ggtttgcctgccgtcctcgagatgaaattggcagttggggctgattcacagaaacaccgatttgtggctgagcacggtggctcacacctgtcatcccagccctttgggaggctgaggtggacagatcacttgaggtcaggagttcgagaccggcctgaccaacgcagcaaaacccatctctactaaaaatacaaaaatcggctgggtgtggtggcacacacctgtggtcccagctcctcgggagtctgaggcagaagaatcgcttgaacccaagaggcagaggttgcagtgagccaaggttgcagtgaatcaagattgctccactgcactccagcctgggcaacagagtaactctccttctcaaataaataaataaataaataagaaacactgatgtgtctgtcaccttctaaagaaatgaaatgctaggaagtcctagccagagtgatcaggcaagaataagccataaaaggcatccaaataggaaaagaagtcaaactgtctctcttcactgccgatatgattctatacctagaaaaccctaaagactctgccaaaaggctcctggaaccgataaatgacttaagtaaagtttcaggatagtaaatccatgtacaaaaatcagcatttccaaacacagtaacattcaagctgagcaccaaatcaagaacgcaatcccatttccaatagccacggaatgaaatacctaggaacacgtataaccaaggaggcaaaggatctctacaaggagaaccataaacgagatgctgagtcccagcgaggtcggaggtgccactgagccctcatcgtggtgccgttcccgctctgggttatttatctgttgctcatctcagctgttgttcctacctcaaatttcaagtccctcaacaaatataacagaaccacttctagaatgaacctttggagaagggaggaagcagtgcattgtataggaattggcattctatagaaaaccacagaaactggaaataatgaagggttgtctcttggctctaaaataatgtatacacctaaatcatccccttatgatactcatcctctaacagcaattgaacttcgatacaatgagtcattact

SEQ ID NO: 63908 - DNA, 1046 bp, Homo sapiens
ttttttttttttcaggcctccaggcgtttattcagccccttccctctgccgccagctgcttgagtgaagcccccactccatgaggagccttgagacccctccagtcctgtgctcagaggctgagtctgggccccccacgcagagctggctgctgctcacgcctggctgcctttacccactcgccgatgatggtggcctccagcttccgcgcctcaaccacggaagcaggatcttctgggtgggaggctctgaggtcgaggtggtgcgctcccccctggatggtgacggcgatgactgaggcactcaggttcctccgaatcccgccccctgcccaggggtccaggttcccgttggagaagatgatgttgctggcggctctaagatcacccccccagaagctggtcagcagccagtcgggccggggccacacgccccaggtgtccaggcagtaccgctggcggagctcgtcagtgaagggcaggtcggggaacatatcggtcacattgttgctggcgaaggtcaggttgatctcggtgcaggcctggtagtcccaggccctggcgtcggggccggtgccgcagccagtggggtcagcacagctgtggtagagccggtagatgtcgtagcagtgctcggagcccgaggcgttgtagaccagccctggggaggagaggcgctggggcccaacggccacacacagacacaccgcgggctccggccaccaacctgtcccccctcggaatggtcctgcaggggatctggggctctgggatctgtaggtcccagtgaggaaggccctccaggctacctgcttggaggtcggcggtgtctgtgctgccagccccgggcctgactgttgagggcccccccgctctccacggggcagggtggggcctgctgccctctgttgccctccatgctggggaccccaggggccccttgggcagcacccaccaagctgggcctggctacagccagtgctgagagggtccccagggacggcccctgcctcccaaaagggtttctgggaaggtcgtgctgtccac

SEQ ID NO: 63909 - DNA, 5202 bp, Homo sapiens
atccaagggttgtatcgagcctataaaagcacagttttaagagagattccctttttctttggtccagtttcccttatgggagtccttaaaagcccttgggtcctggaggcagtatcatgtggtggattcttggcagtcagcagtctgtgcagcttttgcaggtggatctgccgctgcagtcaccacccctctagacgtggcaaagacaagaattacgctggcaaaggctgtgctccagcaactgctgatgggaatgtgctctctgtcctgcatggggtcttgccgttccaaggggctggcagggattattgccaggtgtccttcccctccgaaatggccagcccatcaagtctggggaggtttccatctttctgggggccttatgacccgaaacgcacagcttgctgttggaagttggcagaaagagtcccttgaagcagagacaagcctcacctccacttctgtcaagagaggggcctgcagtgcaaaccctcttccgctgagcagctgtctgaactataggccccagtgctgaagaccagttgtgctaagataccggcatggagattgtgccatccgtggtataggctggctggtatgaagtcattggcctgtatgccagagagctaagagaagaaaacggggtctgtggcggtactctgaacaatttcctcagaacctcttaataaataagtttggtaatgctgaggccaggccttttagagctttcatttgatctgtatctgatctttcatttcctgacacctgatggtggattcagcagaaggcaagatggttataattctaaaagaatagcttgtttgtttgtttgtttggggaaaaggagacttggggaagagttgtgtatgtgggtgtttctccccctagttaattcctgttgtgtaagggtaggctttgttgaaaaagaaagaaagattgaactacaggtgcatagcaagcactctttctgggtaactaggctgctggttttaattaccctcagatttcacccataaaaacgcacaattgtattattttacagagatgtgtccagcgccccctgtggtgtgtgagagaaagcagctgcaactcaagtgactaggtgggcccagctggcttcgtgcaggagggcacggtgggtgagccattctcgccattctcatgtcagactgaaaggagggcctgggccagctttgaaaaggcaggatgaaatggaaaggtcaccacacttagggattttagaccttgactaacaagctccaggtgtagaaaaattcaaaacaaaatgtcaggaatctagcagtgttgtctgccctggagcaaacaaacagtatgtgattttgcttcgcctattttttttttcttttttgggggaagataattaaaggcagaatgactgcgtttgtaaaagaaggaccaccaactatactgacatttataaatgaacctttattaaagacacttcaatgccatttgttagacacttcaatattttacatggttttcaatgtacactgtaccaaaatttctataaataaataactttgtacataaaagtaatactccctctttcacattgcctctcagaagcagcaaattcacatattttgtggaagtaagattagtcagttaactgtcaagaacaaaattctaaatgtgcttaccttttgaacagtgatgacacctgacagtaattgttaactattttctcagtaactcccttcagcttttggccaaaggaacatttgaaggaccttgtttctatttaagttttactaaatgacacattggcactcataagatggttagctaccagtctcaaaagtgcaaattatacccagaacccaggtcaagggctgtcctttccagtcccagctcagtttcatctgtgcgaaggaatggcatggacaggcctgctctgggtccttagtagaaataaggtagccctgaaaagtcagaacttcctcctttctgtcccccaaggccaatgtaatactcattatattggcaaaacgaaaacatcagtatagaaaaatccacaggtaccaacaccagcagcctttaccttaatttaaaagtctcaaatagcaatcgaatgatactgagaaggccacatttgcttttatcataaaataagaggaggaggaaaggcagtgtttaactgttctgaccttttgcttgtgatggattaacaaccctcattctacgccttacagacggacagattctacgccttacagacagacaggacttaaacctaaaaggaaaagccattcactgcaagtgtggatggcacttgcacccctggctctacagacagggaagcctgttgcaggggcatccacacatgagcagtgctcacctgaagctccttccggcgcatgtggagtcccaccgcacagcagcctaggggtctatgaagtgcaatataaatccaaggccttccatccttcccaccccgcaccaaaaactcctgtgaacaaatgtggttgtagcctctataaattccagccatgcgttaaggcaccagaactatttccccaccccctccaaaattaaacagcaacctgatacgaaaaataatattgtcaaaattgtataatttttttctgttaaccatgcactaaagattaaaatagcctctgtaaaagatatatatgaaatctctgaaaactcttatgtacaatgatatcaaatacttttttttgccttttgtacacaaatcccctcttgcgtttactgtgcttcagatccaagtcctgtgagcgactgatactccacatgggagttacaactatgtacagatgagtgacgcttgaacccaagcttcctcgcagcctctcctacctctctttcccgtagagattggtatgacaagaactgaggtagacaaaacctagctttttggtgccaacagcagtggcaccctctgtttcccggggagctgtcctgtcagtggcgtggactcgggactggcgtcacatgctttggggaggtggccattggaaacaagcaagtactgggcttccgcgcgctctggactgcctgaagttaatgaagatgcaggctgtagctctgtggagtccgggtgatacaaccttgctaaagtccaggaagaatcccctttcccatctagagatgccattggctttttcttcacagccgtcagcattctatcgtggttactggggtagagcgacccttggcactcggggcaggacccagcggcagtcctgctgcactggtgatgtggagaatgctcttggtcactcccacccggctccgggccatttggcgcacttggctgtgcgctgtctctggacacaggctgggggtggaaggcttgtcccctggagtaacagtccacttcggtgttgcagtcactgcatacgacccggccaccgtgttccatcttatgtggcccaggtgtcccttcagctttctccatcgctttccacggctttttgtgatacgcagacccagcacagagctttggctgcctgcaggcaacgctgtgagtgtcgggctctggaaagtggcttgcatctcttggacacacaccattgctctcaatgtgcccattggcctgagggccaccctcggtcctgaccacggtttcttgtcggtcagaaagggtcccctgagaagagaggtagcttggaacatctggtggcacgacggtttcatctgtgttggtgacactgtactcttcactcttcttcctggtctggtagatgatgcacacccagaccagtgacgtcaggacgatgctgctcacgacagcaatggtgaagatgcctaccgtggtcccatccttcctgcagcctgctgcgggcaggacgctcagctggctgtgagctcgctccgtgcccagggtgttggacatctcacaggtatatcggcccgcatcctctgccaccacgttctgaaccaccaggagctggttgtcaggggtcaagtggtgccgctcagtgaggctcagcgggcggtcccccttgaaccaggtgatgcggggcggagggttccccgtggctttgcattggagggccactgtttctcccacagataccacacggtcttccaaggggaccaccaaggatggggtctctaggacagtcagggtggcattagctgaaatagaaccggctgagttctgagcagtacagctgtaaacccctgcgtcatctattttcacatcagtgatgaaaaacacgtcgtcatccggcatgacatgcatgcgtcgctcacgggcagcggggaaatccgtgcctccatccttctgccaggcaatctgagggtttgggtgacctgtggcagcacattcgaggcgggccatggtggtggtccggatggttatgtcgtggggcgttttggtgaatgatggcaacacattcacggtgagcctggccttatgtgaataggtggagccaaagtggttggtgatgacacattggtagcggccctcgtgcccgaaagtgacctgacggaggtgcaggatggtggtgtactccatcacttccccgtcctgcgcgtggacgtggacaaagttctccatgtctgcattggtcaggacttcattgtctttcttccaggcaaaggtcatgggggagctgctgctgctggctgctgagcatgtaaaccggatgtccttgcccaccatagccatggtggtttctggctgggtgatgatctgtggcttcaggaagtcatcgcacacgaaactctctggtggcacagagaaaatgctctgacccttcagtgattctgggtgggcacaggtggctgtcacaaaggcctgcagcatcctgccaattagccacgggggcagccacttcagctggcagtcacacaggaagctgtcgctgctgatatggagctctttaagattcttcatcttcacaaaggcatcaaactggacagatctgatcgcattccctccaaggttcaggtgctccaggccttccagccccgagaatgctctcttagccacagacttgatcttgtttccaaacagagtcagcttgctgaggctgtcgagccctgagaaggcgccgctcgtgtcctctattgtgcccgaaatctcgttatggtccagatccaagactcgcaggctcctgagtcccttgaaggcaccctccgcaatgtggctgatggaattgtggctgagacgcaggacactcaggctgctcagctcggccaggc

SEQ ID NO: 63910 - DNA, 1214 bp, Homo sapiens
tttgttgcctacgtgaaaaaagagatacctcatatcgtagttacacattgtttattgaatcctcatgcacttgtcataaagacattgcctacaaaactgagggatgctctgtttactgtggtgagggtaataaatttcatcaaagggagagctccaaatcatcgcctatttcaggctttctttgaagaaattggcatagaatatagtgtcctccttttccatactgaaatgaggtggctttcccgaggccaaatacttactcacatttttgaaatgtatgaagaaataaatcagtttcttcaccacaagagcagtaatttagttgatggctttgaaaataaagagtttaaaattcacctagcataccttgcagatttattcaaacacttaaatgaactcagtgcatctatgcagaggactgggatgaacacagtatcagctagagagaagttatctgcttttgttaggaagtttccattttggcaaaaacgaattgagaaaagaaattttaccaattttccttttcttgaagaaataattgtttcagataatgaaggcatattcattgcagctgaaataacactgcatctgcaacaattgagcaacttcttccatggatatttttccattggagatcttaatgaggcaagtaaatggatattggatccatttctttttaatatcgattttgttgatgatagttatttaatgaaaaatgatcttgctgaattacgagctagtggccaaatcctaatggaatttgagacaatgaagcttgaggatttctggtgtgcccaattcacagcatttccaaacctggcaaagacagctctagaaatccttatgccatttgcaactacatacctttgtgagttgggattttccatcacttttacatttcaaaacaaagtcccagaagctgctttaatcctgagtgatgatatccgtgtggctatttcaaaaaaagttccctcgtttctcggacatcattgaacaaaagctacagctacagcagaagtcactgtaagctgatatacttttttaatgaataatttcaatcttaatatcattgtaaaattaagctgtaattctgtctctttcatatttatgatatactgaattctatgtctaaaaaacttaagaactttaattttgaatgaggcatgtgaaaatatgttttgagaataaaaacacagcagaaaagaaaaaaaaaa

SEQ ID NO: 63911 - DNA, 2359 bp, Homo sapiens
cttaccttagaaaaccaaattaaagaagaaagagaacaagacaactctgaatctccaaatggcagaacatcacctcttgtgtcccagaataatgaacaaggctcaaccttacgggatttgctgactacaacagctggaaagctacgtgtggggtctacagatgctggcattgcctttgccccagtatattcaatgggagccccaagtagcaaaagtggacggactatgcctaacattcttgatgacataattgcttcagttgttgaaaacaaaattccaccaagtaaaacctccaagataaatgtaaaaccagagcttaaagaagagcctgaagaaagcataatatctgcagtggatgaaaataataaattatacagtgatataccacattcttggatctgtgagaagcatattttatggcttaaggattataagaatagcagtaattggaagcttttcaaagaatgttggaaacaaggacagcctgcagtggtttctggtgtgcataagaaaatgaacattagcctatggaaggcggaatcaattagtcttgattttggagaccaccaagctgatctcctgaactgcaaagatagcatcatttcaaatgccaatgttaaggaattctgggatggttttgaagaagtttcaaaacggcagaaaaacaagagtggagaaacagttgttttaaaattgaaagattggccttcaggagaagacttcaagactatgatgccagcaagatacgaagatcttttaaaaagtctgccattgccagaatattgtaatccagaaggaaaattcaatttggcctctcatttgccaggattttttgtacgtcctgatctaggacccaggttgtgcagtgcctatggtgtagttgctgctaaagatcatgatataggaacaacaaatctccatattgaagtttctgatgttgtaaatatactagtttatgttggcatagcaaaaggaaatggcattctctcaaaagcaggaattctcaagaaatttgaggaagaagatttggatgacattttaaggaaaagattgaaggactcaagtgaaatacctggtgctctgtggcatatttatgctgggaaagatgttgacaagataagggaatttcttcaaaagatttcaaaagaacaaggccttgaagttctaccagaacatgatccaatacgtgaccaaagttggtatgtgaacaaaaagctccgtcaaaggctgcttgaagaatatggagtcagaacctgtactcttattcagttccttggtgatgctattgttttgccagcgggagcacttcatcaggttcagaattttcacagctgtattcaggtaactgaagattttgtgtctccagaacatcttgtagagtcatttcatttaacacaggaactgagacttttgaaggaagaaatcaattatgatgataaactacaggttaaaaatattttgtatcatgcagtcaaagaaatggtgagagccttgaagatacacgaggatgaagtagacgatatggaagaaaattaagtgtgatccagtttgatatttttaggttgttgaactgggattacttaaccttgaatgatgatatgtatgcacactgactttaagcttcataaaaccatcagtgccaagaaattctctttgtagtaattacttgttactgacaccacagcagtatagcatatgtcacagctcctgtgattcaatgttataaaacaagcagaattttaaaagcagcactatatagctgttttgtattatagtgtatatgatgtttgtgaaaatgccagatttaaaatgatgtatttatttttggtaaaaaataaaaaattctatgctatattgttgatcaagtgtaaatgtgaccttgtacagtttactaaaattactgatatttttcactacattgagacagttactgtgagaataggacacaaactccagctattgcctgcatctgggaaattgctgaatcgcacagcagtcatgtcataatcagaaaattactgccaaataattgtaaaatttgtaaagtataaagtatataaagtagatactaaatacagacacttcaatattttgttgaagctattgactgtacaattaaacattttcaaaaggtgtaatttatttaaaattgtctcattttggtaaaatttatgtgaacttttaaagctaaatattaaacttaatatgctatgtaaatatatacatatatacatttaatgatgtatttttttaaaacattggcttgcttttgttaaagtgcaagtgttacatatggctttgtacattaaagttgaaaggggttttacattttccattaaaaggactttatcaaaaattg

SEQ ID NO: 63912 - DNA, 1725 bp, Homo sapiens
  misc_feature (1)...(1725): n = a,t,c or g
cgacccacgcgtgcggcatgtggatcccgctctacctgcaccgcgcccttgttgtgcataagacagcagagacgtgcaacagcccgccctgtggggccaaggacagcctcatctttggggccatcacctgctttacgggatttctgggcgtggacacgggggcaggagccacgcgctggtgccgcctgaagacccagcgggccgacccactggtgtgtgccgtgggcatgctgggctctgccatcttcatctgcctgatcttcgtggctgccaagagcagcatcgtaggagcctatatctgtatcttcgtcggggagacgctgctgttttctaactgggccatcactgcagacatcctcatgtacgtggtcatccccacgcggcgcgccactgccgtggccttgcagagcttcacctcccacctgctgggggacgccgggagcccctacctcattggctttatctcagacctgatccgccagagcactaaggactccccgctctgggagttcctgagcctgggctacgcgctcatgctctgccctttcgtcgtggtcctgggcggcatgttcttcctcgccactgcgctcttcttcgtcagcgaccgcgccagggctgaacagcaggtgaaccagctggcgatgccgcccgcatctgtgaaagtctgaggtggtgccattgggacaatgaagaacccacactcccacctcgtctgggaggtgtcctacagcgtccgggaccggctgggctgccccaaagctttctgtgtgatccacggctaggcacccaccctctctggcccaggcctgctgagtggccctggcatcaagaggaggctgtgtcctcagttaccctggaaggatgtgtgtgttggagccacacggttggacaggttcccagccctaggtttgggccgcagggcccctggggccaaggaagaagacagccccaagtgggtgtccggggagagcctggcctgccaccagcttatgtgatcttgggcaagtccctgccctccctggaacgaagggccagggggctggactttcccacacaacttgctgggcaaagcacgatctgcagctttgaagactcaacagaccctggaccatacggagagcaggtggcccaggcctcagggcggcagtcccggctttgaggctcacgcgagggcctggtatgcagggaccactgctcagctgggcctcggaccttggggatattggacgcaacctggcaaatgaagctgggcgcccaagtctctgggtactccctggaggacactgtctcactgtctcgggttggctcccagcctggaggtcccagatggggactgttctgacaagctggcatcaccaggggtgaaggccctggctgcagctgtacaccacctgtgcccccaggctcaaggtctctggcaggtgcacaccagcccaactctgcagggcttctctccctgccaccaccccccaagccaggaccccactccttccccgaggctgagctgagccttttccaggggcagggcccaggagaccattcccagaatccatggggcagtagccagggctccggctgctggaggaagcagctatccacaaagcttcctgccccagagctgaggctgaggccccgggagaggcggtccctacccaaacactggctgctggcattccaccaagtgaccccaggngccaggccttcgatcacccacctcccatccag

SEQ ID NO: 63913 - DNA, 865 bp, Homo sapiens
ttttttttttttgagccagagggaccatttttattagattccagcaagactactgtacatgtttcatgcagattaaatatgtgtcttcactgcccctgggaggggagcactctcactgtcagctccttcattggtgtgtcaaggggtgagtgtcaaggggagctctcaatgtattccgtatggggggcagttgggatcatgactcggggtagaggtgagacagtaggtagctgagggtccctgggaccttgagtcttcagaggttcagggactgcaggaccttggtcctttgctggtactggcaccagaggatcttgatccttcagaggcactgggactataggaacttgattcttcagaggttcagggactatacgaccttgattctttggaggctgtaggactgtggggccttgatccttaactagtactgggagaatggggtcttgattcttcacggactcggggaccacaggaccttgattctttacaggtgccacaactgcagaatcgtgaacctttgcatgctctgggactacaacatcttgatccttgactggccctgagaccactaaaccttgattctttacaggctcagagaccatggaaccttgattctttatgggtgctgtggccatggcactttcatccttcggatgctctgggaccatgggatcttgatccttgataggtgctgagaccatgggaccttcatccttgacaggtgctgggactatgggaccttcacccttgacaggtgctgggactatgggaccttgatccttgacaggtgctgagaccatgggaccttgatccttgacagatgctgagaccatgggaccttcgtccttgacaggtgctggga

SEQ ID NO: 63914 - DNA, 1534 bp, Homo sapiens
ttttttttttttgtttacatcatattttattttattacagtcaataaatatacttttatatatgaaatcattatagaatacatattttaaggcactaagtctcaaaagtgaaggcacctgttatactttgctctctaatttgacacattaaaacatgagaggtaaatctgccaatttattttgagtttgcaagcttacaatttaataggaataaatcaggtagcttcagaaatcaactaagaaaattaacaggctagagtctgaactaataatcttggacatgggtttgattatcacttggtttattctgattactcatttaccttttcatttatgaatctaaactgacaattccacctttagaggtataatagagctattaaccgatgagacacatctactcattctctgtaactctggacatcgcatcttgctttaaaatgcaaatcagtcatgtcttgagcctcttactgagcagtgaatgtgtatccgtgcacattccatttctctttctgctgggattttctttggagtcagtggtgctgtccctaagcagttctatgtgggcttctttcagcatctttgttttgcatggagtattctcagaggtcacactttcggttttggttcccatagcttcttctaaaactgttagaatcctatcaagttggtccaccatgaactttgcatcttcttcagtgaagcacataggtggttttattttaagtacatttctatgaggtccatcggcactgagaagcactcgtttttctttcatcttgtagatgatgtgctgagcttcagctgtggcaggggtccttttcagatggtccttcactaaatcaattccaataaaaaggccaatgcccctaatatctcctatcaaagtgtgtttagccttctgttttttcagtaactcagtgagataattccctactctcttggcatttccttgaaggtcttcattttcaattatatccaggacagccaaaccaacagcacaagatactggatttcctccatacgtattaaaatattccatcccagagctgctgaaggcttctgcaatttctttggttgttaccacacatgccaccgggtggccgttgcccatcggttttcccattgtgacgatgtctggaacaaagtcttcaccatacatctggaagctccagaaatgtttcccaactctgccaaagcccacttgaacttcatcagctataaacacaccccctgcaccgtgtacatattctgccactttctggaagtagcctgctggaggaattatttgtccgccacaactctgcatggattcagcaataaaggcagcaatcttccttccactgttatgagcatcttcaatgattttcttcacttcatctgcataagcactggctgagtctgcatggtcttctctatattttcctctgtaagtatctggagttggtgccacatgtacaaattcttttttgacatcttttcctttctgaaacttatatgggctaatctcaattaaggatgataggtgaccatg

SEQ ID NO: 63915 - DNA, 1979 bp, Homo sapiens
ttttttttttttaacagctacaatttattgagcacttactaggtcttaaatatttgctaaatacatacacagtactcacaatagccccaggaaattatagatgtatttaagttttggatcaatgagtaatcgttagctgagtagaaagctcttttctaccctacaataagctcgacattaaagactgacattccaattaatataattaaccctggacttatagaactgttttctcataataatgcacatctactgctaaatgactactctcaaagttgttttctttttcatgttcaaagaaaattacatttctttcctttcacttttccaatagaatactcttcagttctactctagaatctcttaggaaattatttgaaatagaaatcaatttaagccctataactagagctttttctcttgttgagctgctttgcagggagaaaatggcatacatatacaaaataatactctgctgaaacacataacactgactcccaagaatactgcttacttactctttgtcaaacactgttacatgctaccaatattagatgtatcaggactcccttttcagtaactatggttcttggagtcctggataacttaaaaaaatagagacctgtctggctaaagaaatttaaaagttctctaactctcaaccagacaccttgggaactacaatatggatatgtcctacccagttcccaggagtacattatgaagaagttcatatacatcccacatccactgcagtatctcaaaactctcctagtaacagcatcctcccatcaccacaaataccaagagtattaattaaagagggacaagcctgccactatatccttcactcacaattccaaagatgtttgtcctggaaattctatcttatttttgtgagctcttagcatattgtgatagcatgacatcttcacatcaagtatactgcttggctagcatcaataatagttcaaacaaatagcaacaatttatatactttacatcaactaggggaaaggtgacaaacattgtttaagacagtttgaagcacaggttatcaccaaggtctgtgtttggaagataaaacatgcgagataaacagaggactaacactgattaattctggagaaacatggagaagaactataaactgcttagcagggagaaaacagttctctgatttataataaaatctattcacaacacttatttgtagttacttttataatagataatattcaagttatattaaagtgcttcaagcaaaatttagcaactcctgtaaggcttcctgctgttcatcatcaagttgtgatacacattccaaccataaatcttcagaagtctgtacctgacgcacgacattagctaggcgtttggcacaaggatcctcatagttaatagtctcattaatttttccttctgcaattatactgattattttgggaagattggaattatttggaccaattacaactgggtggttactttcaattaggtcacagagaaaactcaaagtctgaatagcttcctctttatcttcatgcagtggaagccatgataaccagtgtggaagaacttcatctacatttacacagttaggcttaaacttcaaaatcttccctattgctgagatacagttctctgtagcaatgacattttttttggttttggaatgtgcacgcttaataacttttaccagaagtggaacagcttctgaacataaagaacgataatcatctccaccaaactgtgccatgacacccaggccataagcagcagcttgcctgacttcagggttgttatcttccatattatataagtgtgattgtgtcttcaacaacagctgcatcacatttgatgcatcctgcataaattgttccttcccagcagcaagaccaatatgaataatgctctcgatagttattcctctcagaagcttgagttcctttgacagcagctcctggtgaatacgaagc

SEQ ID NO: 63916 - DNA, 1205 bp, Homo sapiens
acaaggaagcctctagagactcccagctttaagggcaaccctgatgtctcagtgagaagcacacaactggctcaggacataggccaggccctgctccaccagaaaggtgtccaagacaaaactgggaagaaggacatcacccagtgctctgtgcaacctgaacctgcccctccctcagccagtcccctgcccagagggtggcaaaagagtgttctggagctacagacggggccagggagctcacaacactatggagccatgagaaccgtgactgaacagtatgaggaggtggaccagtttgggaacacagtcctcatgtcttccaccacagtcaccgagcaggcagagccacccaggaacccaggctcccacctcgggctccacgcctcccccttgctgaggcagttcctgcacagcccagctgggttcagcagtgacctgacagaagctgagacggtgcaggtgtcctgcagctactcccagccagctgcccagtgaggcccaccgcctcccaccacacctgccacctgttcctggcctccactgccccaggactgaagtgggtacctgcctcctgtacactggagcaaggaccaagaggaaatggcatcttcagaggattactgtgggccatttccctttcgcagttctttcaataggcccagttcttccaaatggaaaaagaaaggtctggaagaggcccacagagttgcacaggcgtgggggtaggatgggggctcccagctgcttgtggaggatgtaatatatacagacacacacatgtttttcacacaggcctggcccacgcatcgacatgtgtgaatttgcacaccactgcctgaattggagccccccagagtgtccctctacccagagtttttatttctttaattagtctgagtgttcccagccatctgctccttaatccctggagaggaacagagccaactggacacagcgttggtctctgtttggaatcactgtgaggtctccagaaggacctggccgccagccccttcatcaccatctccatcattcagctggtcatctggtggcccaaaggtcacccaaagagtcagcaatcagcatgtccctagaagccaaatgcactgcctttctctgtccccatgactgtcccccactctgcaccccaaatgggaagcatacggtctgaataaatccaagttttattctctaaaaaaaaa

SEQ ID NO: 63917 - DNA, 1534 bp, Homo sapiens
cggacgcgtgggctccaggccaaccctttctacgaccgctaccgcgacaagatccagctgctgcgcaggtcagacccagctgcttttgagtcccgcctggagaaacgcagtgaatttcggaagcagccagtggggcattccaggcaaggtgattttatcaaatgtgtggaacagaagacagatgccttggggaaacagtctgtgaacagaggattcactaaggacaagactctcagttcaatctttaacattgagatggtaaaagaaaaaactgcagaagaaataaaacagatttggcagcaatattttgcagcaaaagatacagtctacgcagttattcctgcagaaaagtttgatttgatctggaaccgggctcagtcctgtccaacatttctatgtgctctgccaagaagggaaggttatgagttttttgtaggacaatggacaggtactgaactccacttcactgcacttataaatattcagacccgaggggaagctgcagccagccagctgattttatatcactatcctgaacttaaggaagaaaagggcatagtgctgatgactgcagaaatggattccacatttctgaatgttgctgaggcacagtgcatcgccaaccaagttcagctcttctacgctactgatcggaaagagacctacgggttagtggagacctttaacctcagaccaaatgagttcaaatatatgtctgtcatcgctgaattggagcaaagcggacttggagcagaactgaaatgtgcccagaaccaaaataagacttagaactgtacaggttggcccttcacctagttgactcagccctcgatagtctagagcccaccccctcctcaggaactcaagagctcagcatttataatgagcagttggtaatgagttgccctatgtgcttgtcgcaagcagtcacagagatgagccctattacttgatattcaggaacaaaggtacctgaacattctgataattatctcagcatacttgaggtttccttttttaagtgttcgaggttataacaagagacagccaaggacctacaagacagttgacttgattttgcacagtgtaacagcgcagttgcattctggccactttgaccttatagctcccaaatgatgagtttgtcatctttatgaactcatgacaggataataagcttgaagacctgctgtagttagatatgggctttaatccttcccatgcaccagtcagctgaacaaaagcataagccaaacatcctgtttaaactgtagaataaccagatattcccatcaggttaaagacttcatctagatgatgccccccagagatgcctttagtgtaagtagctggcttggggtatcagcaaatttcaggtatagttagataaacaggtacagggcctgcatactattaaaccatagtttgtggcacccgcttttctaactccacctgttagaagctatgtgtttgaaggaatgaatcagtgcagtataaataaaattcttttgtaaggagaagattaaaaaaaaaa

SEQ ID NO: 63918 - DNA, 1900 bp, Homo sapiens
atggcctatagggtcctgggccgcgcggggccacctcagccgcggagggcgcgcaggctgctcttcgccttcacgctctcgctctcctgcacttacctgtgttacagcttcctgtgctgctgcgacgacctgggtcggagccgcctcctcggcgcgcctcgctgcctccgcggccccagcgcgggcggccagaaacttctccagaagtcccgcccctgtgatccctccgggccgacgcccagcgagcccagcgctcccagcgcgcccgccgccgccgtgcccgcccctcgcctctccggttccaaccactccggctcacccaagctgggtaccaagcggttgccccaagccctcattgtgggcgtgaagaaggggggcacccgggccgtgctggagtttatccgagtacacccggacgtgcgggccttgggcacggaaccccacttctttgacaggaactacggccgcgggctggattggtacaggagcctaatacccaggaccctcgatagccagatcacgctggagaagacgcccagctactttgtcactcaagaggctcctcgacgcatcttcaacatgtcccgagacaccaagctgatcgtggttgtgcggaaccctgtgacccgtgccatctctgattacacgcagacactctccaagaagcccgacatcccgacctttgagggcctctccttccgcaaccgcaccctgggcctggtggacgtgtcatggaacgccatccgcatcggcatgtacgtgctgcacctggagagctggctgcagtacttcccgctagctcagattcacttcgtcagtggcgagcgactcatcactgacccggccggcgagatggggcgagtccaggacttcctgggcattaagagattcatcacggacaagcacttctatttcaacaagaccaaaggattcccttgcttgaaaaaaacagaatcgagcctcctgcctcgatgcttgggcaaatcaaaagggagaactcatgtacagattgatcctgaagtgatagaccagctccgagaattttatagaccgtataatatcaaattttatgaaaccgttgggcaggacttcaggtgggaataagcccacgaaaggaaagggctctcaagggctcttctgctcatctcttccgcgagatttgctcccagaccctttgatctccctccaacaaaccctggctccagccccctttcccaacttgagttgcatcatcttggaaccaggaagcccagctaaagccaagagaccagagagtccctgccactagttttcatcagtctgttcaagcaaagttgatctgctcctggcacgtccagtaaattccagaatcattctcctttctgcccataaagggccttggagaattgctttaagaagagtgaatgttccaatgatgatagatattataagcgatgatggttctgttgctatgaacacagcagtcggtccctgtcattgtccaacccaggaatggcccttgttaaattcccaatggcatgtaaccttcccctctgagcttcatttccttcaaagatgctctgggtggtgggatgggagaccatcctcagccctcctcagaccttatcaattcattgagagattgcaaagctgaaagcacctccggccactccctgggagacagaccctttggtgatgaaataaaccagtgacttccagagcctatggtctcaactgtgcttgaaaaacactgtctctgaaaacaactttgtgattctccctgctccctgtggacaaaagcacataattctgctgttacgggtactttgctcatacgagctttcatgttcagcatgcaatggaatcatgcttgtccatgtgaaataaatatggctctctcgtgtccttaaaaaaaaaaaaa

SEQ ID NO: 63919 - DNA, 1170 bp, Homo sapiens
cactcccttctcaggcccccccacttctcaagctgacttggattatgtggtccctcaaatctaccgacacatgcaggaggagttccggggccggttagagaggaccaaatctcagggtcccctgactgtggctgcttatcagttggggagtgtctactcagctgctatggtcacagccctcaccctgttggccttcccacttctgctgttgcatgcggagcgcatcagccttgtgttcctgcttctgtttctgcagagcttccttctcctacatctgcttgctgctgggatacccgtcaccacccctggtccttttactgtgccatggcaggcagtctcggcttgggccctcatggccacacagaccttctactccacaggccaccagcctgtctttccagccatccattggcatgcagccttcgtgggattcccagagggtcatggctcctgtacttggctgcctgctttgctagtgggagccaacacctttgcctcccacctcctctttgcagtaggttgcccactgctcctgctctggcctttcctgtgtgagagtcaagggctgcggaagagacagcagcccccagggaatgaagctgatgccagagtcagacccgaggaggaagaggagccactgatggagatgcggctccgggatgcgcctcagcacttctatgcagcactgctgcagctgggcctcaagtacctctttatccttggtattcaggtgggtgtaggagagagatcagggagttggtgttttttctctgtgtgtgcatcactttctttcagaccttcaaaaccgtgggagagagccttgactgagtttcacataagtgaagtggttgcccaagcccagtggcctcaaatggcagttctgagacttgaacctgggtctccttaatcctagtcctggatcatttcccctctacaacctagatctggaccccgctagttgcatttgaggattactctatcagtggacagactggaaaaactgaggtgatatccaggattttcttcccaaactgtggtcatggatcctcttcctttcctccagaggcagatgtggcactgatatcttcctccatcctgggggcacagcctgagtggtagcattgcagatggatactgacttgcccaagtcacatagtgagtcagtgcttg

SEQ ID NO: 63920 - DNA, 916 bp, Homo sapiens
ggcggagcgtggctgcggccagcggaccgggcgcctggggcactgaccactactgcctggagctgctgcggaaacgggattatgaaggttatttatgctccctgctgctccctgcagaatcccgaagctctgtttttgcactgagggcctttaatgtggaactggctcaggttaaagactcagtctctgagaaaacaattggactgatgcgaatgcagttttggaaaaaaactgtggaagatatatactgtgacaatccaccacatcagcctgtggccattgaactatggaaggctgttaaaagacataatctgactaaaagatggcttatgaaaatcgtcgatgaaagagaaaaaaatctggatgacaaagcatatcgtaatatcaaggaactggaaaattatgctgaaaacacacagagctctcttctttacttaacactagaaatattgggtataaaggatcttcatgcagatcatgctgcaagtcatattggaaaagcacaaggcattgtcacttgcttgagagcaacaccatatcatgggagcagaagaaaggtgttccttcccatggatatttgtatgctgcatggtgtttcacaagaggactttctacggaggaaccaagataaaaatgtgagagatgtaatatatgacattgccagtcaagcacacttgcacctaaagcatgctaggtcctttcacaaaactgttcctgtgaaagcatttcctgcttttcttcagacggtttctctagaggactttctaaagaaaattcagcgagtggattttgatatattccacccatctttacagcagaagaatacattacttccattatatttgtatattcagtcatggagaaaaacatattaaaataatttcatggcactgatgttaattctagtctattagtt

SEQ ID NO: 63921 - DNA, 842 bp, Homo sapiens
gatggagagaggaaaagtatgagcgttgagaggacattcagtgagataaataaagcggaagagcaatacagcctatgtcaagaactttgcagtgagcttgctcaggatctacagaaagaaagacttaagggtagaactgttaccattaagttgaagaatgtgaattttgaagtaaaaactcgtgcatctacagtttcatctgttgtttctactgcagaagaaatatttgccattgctaaggaattgctaaaaacagaaattgatgctgattttccacatcccttgagattaaggcttatgggtgttcggatatctagttttcccaatgaagaggacaggaaacaccaacaaaggagcattattggctttttacaggctggaaaccaagccctgtcagccactgagtgtacattagagaaaactgacaaagataagtttgtaaaacctctagaaatgtctcataagaagagtttctttgataaaaaacgatcagaaaggaaatggagtcaccaagatacatttaaatgtgaagccgtgaataaacaaagtttccagacatcacaaccattccaagttttaaagaagaagatgaatgagaatttggaaatatcagagaattcagatgactgtcagatacttacctgtcctgtttgctttagggctcaagggtgcatcagtctggaagccttgaataaacatgtagatgaatgtcttgatggaccttcaatcagtgaaaactttaaaatgttctcgtgttcacatgtttctgctaccaaagttaacaagaaagaaaatgttcctgcttcttcactttgtgagaagcaagattatgaagcccatcc

SEQ ID NO: 63922 - DNA, 1742 bp, Homo sapiens
gctcgaaagagcattccagacacatatgcagagcacctcattgctggcggactcatgacgcaggaggaggtgtctgaaataaaatcctcctactatgccaagttgaatgatcacttaaataacatggcccactacaggccccctgccctgaacctgcaggcccactggcagggcctggctcagccagaagcgcaaatcaccacctggagtacaggtgtgcccctcgacctcctgcggtttgttggcatgaagtctgtagaggtgccaagagagctgcagatgcacagtcacctgctgaagacacatgttcagtccagaatggagaagatgatggacggaatcaagctagactgggccaccgcggaagctcttgccttgggttctttacttgctcaaggttttaatgttcgtctaagtggccaagatgttggtcgtggaactttcagtcagaggcatgcaatggtggtttgccaggagacggatgacacctacatccccctgaaccatatggacccaaatcagaaggggtttctagaggtcagcaacagccccctgtcagaagaggccgtcctgggattcgaatatgggatgagcattgagagcccaaagttactgcccctgtgggaggcacagtttggcgatttcttcaatggtgcccagatcatctttgacacattcatctctggaggagaggccaagtggctcctacaaagcggcattgtcatcctccttccacatggctacgatggggctgggccagaccactcatcctgtcgaatagagcgtttcctgcagatgtgtgacagtgcggaagagggggtggacggagacactgtgaacatgtttgtggttcacccaacaactcctgcacagtatttccacttgcttaggagacagatggtccggaacttcagaaaaccactcattgttgcttcccctaagatgttactcaggctcccggcagccgtgtcaactcttcaagaaatggcaccaggaacaacatttaacccggtcattggtgattcatctgtggatccaaaaaaggttaagaccctcgtgttctgctccggcaaacatttctactccctggtgaaacaaagagaatctctgggggccaagaagcatgactttgccatcatccgagtagaggaactctgccccttcccgttggattctttacagcaagagatgagcaaatacaaacatgttaaagatcatatttggagtcaggaggaacctcagaacatgggtccgtggtcgtttgtttctccaaggtttgaaaagcagctggcctgcaagctccgtctggtgggccggccccctttgccagtacccgctgtaggaattggcacagttcacttgcaccagcatgaagatatcctcgccaagaccttcgcttgatgatgacttttgaagaaacactatttctctttaagaaaatggccattaaggccgggtggggtggcacatgcctgtaatcccagcactttgggaggccaaggctggtggatcacctgaggtcaggagttcgagaccagcctggccaacacggtgaaaccccgcctctactaaaaatacaaaaaatagccgggtgtggtggtgggcacctgtgatcccagcttcctgggaggctgaggcaagagaatcgcttgaatctgggaggcggaggttgcagtgagccaggatcacaccattgctgtccagcctgggtgacagagcaagactgcgtttcaaaaaaaaaa

SEQ ID NO: 63923 - DNA, 595 bp, Homo sapiens
atagcactccccagatgcaacttaatctaacactctatactttagattttctagacatacatagaaatcagaccactacttctgcagaacattttactagtaaaaataataggccacgtgagggaaaactgatttggtggaaagacaacaaaaacaaaatatgggaaataggtaaggtgataacatgggggagaggttttgctcgtgtttcaccaggagaaaatcagcttcctgtttggatacccactagacatttgaagttctacaatgaacccatcagagatgcaaatgaaagtgcctccgcagagacagaaaacccacaatcgagcatcatccacccgcaggatgaacaaaatggtgatatcagaagaacagataaagttaccatccaccaagaaaacagcacatgtggagagcccgggagaagaatagaaagaaaaagagacggagatcagagacagacacagaaagtgagattggggagatagtgttaaagagagagagagagagagagagagagaccataagagaagggagacaaagagataaaaggtgcgagtcatcaggtgaggagaaagactgaaaactatgagaa

SEQ ID NO: 63924 - DNA, 1892 bp, Homo sapiens
  misc_feature (1)...(1892): n = a,t,c or g
ttcatgatgcaaatacatgttcatattatcagttttttaaaaaagcaaagtttgttaatatttattatcttatttttaagaacnaagaaatacacattaaaataagattgtttttaagaaaaagcacccccccaccccaaaaacacaaagtccaaggatctctccccatctccaaggcttaaagggcagctatccagctgtagtctattttcctaaattttctcagttctttttcttcagattttgacaactgatgtataatgtcttctcctaaacctgtgttacttgtatcctggactttttcggtaaaatcattttcttcatctgaatcttcactttctttttcttcttccatatctacatcttcaggaatttccttagcactcttagtctctttagacagcagcaatgaatttacaaacatggagcacaggaaagcagcagatggcaggacatgggctggagtgtgaagaagctcactaattgcgggtatgttttctgttaagggtagttgtaccagctcattctctaaagtttcgtttagtttttcatcctgctgttgcctgtgttttcccaatatgaaataaaatggggttgtgggaagactttcttctgctagcagctgtttgcttgttggtgtgagtttttcttctggagactttgtactgaatgtcaataaactctgtgattttgttaggaagtaaaactgggatctatttagccactggtaagcttctgaggtgaaggattcagggacatctcgtggaacaaacactccccactggactttctctctggagatacccttttgaatatacaatggccttggctcactaggtttaaatacaaacaagtctgaacccactgaagactgagagattgcagcaatattctctgaattaggatcgggttccataactctaacatttaattttgcattccactccaatgcacagctcagcagattccaacagcaaagaatgccattttcagtagcaccaagtagatactttgaacacgtcaatctcccaaagcaaaggtgccttattttcccagctcgttggcaaaatgtacatttaagttcccatgttacagaatcccatattgtgactatttcctcaaaactaactgctagtaaagaaccatcttcggagaaacaacagttagttgcttgatacttgtgataactaccaacaaagtcacaggtccagccaacagcttttttgtatatgtcagagtcatctgttaatatccatactttgaagtaaccatctttgctagctgtaaccaaggtgggctgttcagatttttctgcattacagaaacagagagctgtaatgcagtcttcgtgtggcatgttaattttagtgttaagaataaacccttgtgttttcttattatacatccacagtttcatttgcaattcaagctcagtttccttttcttgccgctgttccactgttgcaagccagttaccaaagcagccaaatgcagcctttgttagttcaatttggatcagaccataatcattaatatattcttgctgtataatatctaaattgtataactgtttatcactctggagagaataaaactgcaggtggccaggttttccattcaaaaccaaagctttagttcttggatcaatcatcaaaccagtgaagatactcctatctttcactaggccttgaattactgcggatgcttcaaggtttcggtgaataattattatcttattatcagagtgagaagtgcagaataaatctcctgcaggcgagactgagatatgttcaatagtagctcctaaacgcgggagaaactccttattcttctctgttgcatcgcgccactctacaagtacagattcacgaccgccactcagcagactggtg

SEQ ID NO: 63925 - DNA, 1784 bp, Homo sapiens
  misc_feature (1)...(1784): n = a,t,c or g
ttttttttttttaaacagatcgaacccactttatttctttgtgcttttccagtcacttatatacaattacaataaagcaaatcattctctatatttttgttaaatcatcacaaaatgtatgtttaaaaagtagtttaagtttactagaaagtactatctccaatagctgtatagcctancctatgtaaatccatatttatgcctaattgaagagaatatatttccacccttccaggatattgtattccattttttcctagcccttaataaacattttataaatactgacactggggataaagttactgataatattatatttactttggcttcgcagagtaaaaattgttattcagtcacatacaacattctcgcatttttttagtcaatcctcaaactacctgagatgtaaccattattactcagttataaaaagaaaccaagattcaggtatactaaataatttgtgagtattcatgacagaacatggcaggtttgattgcaactctgtttgattccaaagtgtttgctctttccacttcatcgtaatgtatttccactttatcataatgtatttctggcaagaagcataagaatcaaaaacgtgacctgaaaaactactatggaattatttttaagtggtttgcatagactttgtttttagactttgtttaacttttcccaaaaagttgtactcagttgttcaaaggctaagacaacgttgtcgtcttcattttcacatagctcacgcaaggaaacactgatagatttaatggtgagtgcaaaatccttcaacaaataataagcatctccttcattcatcctgttatcctggactaatcctatcaaggaaccatgtttgtagaaatccagtgcataggcattaagcgacattttccttcctcggttatcaaatttctgtgacaacagcactggagcctgagagcgattgacaccgattgtgcctagagtaacatggtttggagtttctagtcgaagcaaatcatcatcaaagttcccagacagacaaacaaatggtgaaattgctactcttccttccttgcagctcatcaaatgagatacgagttgagagtcttcacattctttacctgtgaatttgatttttgacaatgggagttgatattcctgattcatatcagccagtttggaaacaattcgtaggaaagtggtaaagtcctccataattttcatgttatattcatctaaagcatcactaaaatcctcagggagatcatcaaggaacacctttgattgataaaactcgaagtgtgcatcttggaactttggtggaaaatatcttcttccaaagagatgtgccaatactaatactagcttttccataacgtcttgagaaaaatgttttgagcctttcctggttggctgacagagatcatggaagagtccatttacaagaaaactgacaaaaacaagattagaaggttcatgataatgcaaatgtgatacaagtccagcaaaccccataggattaccttcttgatctaaatagccctctttcaccaggaactgcaaagaaaacaggaagtaaagttttaacatgtccatgactctgggttgcttgaaggacagcaatgaatgctttagcactgatagcacctttgccttggcatcctctgggtcatctcccttggaagccagcagcatgagtcgcaggaccagggttatgctgagagggaagtgtcctctcagctcaggaacattggattttatgagttttcctattttggggaatggaatatcaaaag

SEQ ID NO: 63926 - DNA, 1977 bp, Homo sapiens
gggagattcattataaaagtcagtttattttccctttctgtgtttcgtattttccctttttgtcagtaaatgagcaatacactgactggaaatctgcatgattaaataacattaacaagttcataaacacaccccatatcagagtataaagcaagaggttgaaaaatatcccctaaccgaatgcaaattaggtatccctcaaaattgcacattctcctcctagtttgcttgcataatttaaaatatgtatatacagaatgatcttaaaatattgataactagtatggaattcacagccctgaagatatatatactctacatttttctaaagaacggacacccctcaggccctagtaatccattcatgtgattcaatgtcatgtacagacagtcctcagcttctgatttttggactttacaatggtgtgaaatggttgcaatttcaacataatgtacaatattcaataaattacatgatatattcaacactcgattataaaatagagtttgtgttagatgattctgcccaactgtgggcaattctaagtgttctgagtacatttagggtggacgaggctaagctgtggtgtccagtcaggggtattaaatgcatttgacttccaatgggtttactgggacataaccccatcataagtcaaagagcatctgtacttgacacttactagaagaaaaggtctttcccttttctctaattctagtcttctgctgaggtaactccaggaagctggttgtgccagagatcaatcctctaaaaatagactaagcagattagcttcctagaggatcctaaagttcccagacaacaaatctgggatggagtgcttcggctgtgagttacacgtcggaatgttcaagataaatgatgtaccttatggtcctttacacgtcagaatgttcaagataactgatgtaccttatggtccttgaaaggaagactcaatacttccaggagtcaaagttaatttgaatgaaaatggaagagaacaagttgccaataatttgaagcaattcatgcttctagggctgaatgacgtttagatcagacacagagtgactgagccaatcaacaggcatgtagtgtgatctttcccaccacagtgaacagagggattctttgtccaaggcaggcttgcagctcggtccagcttgagcatttgatcaggatttgatgcttcaaagatgacccactctctgtaaactcattaccaaagcaaaatgcaatgatctcttccatttgtggaacataccaccaacacaaaccacgcgtggctttgcctcctgttcactccattttcaaggctagagaaagttcaagtccaaaacaacagttaaggttaaaacgctaaacctcaataggccaaacaaagacgcgggcagagtcagaggtcaaagatgctggcagagtcagaagtcactcggcacattcatgaaacaacagcaaaaatcatcaacagtaattcctgtagtgtagaaaactagtgcagccttcactgctggtcagcatctcaggtggctggcagtgttgagagacgcctgacaatccaagatcaggctggagctcctagacaaacccaaattagggcagactcgaagccccagcggtcctgatgtggctgacattgttctttctgtctcgcgggcaccggtcactccctcaatatgtgagcctgtctccttagcacgagagagaatatttccctcactattaatggcgagataaacacaattgtacaacttgtcatgagaatgaaaaagtagaaaacccacatccatcctagcttgtcccggatcagagacactaaatactggcccactgcagctccaatgctccccgaaccatccacaattcctgtgacagtggccaaagcttcactgctcctttggatgagctcctggcgacccaagtccgcagaaatagcagatctgatcatattagacggtcctccaataaacaat

SEQ ID NO: 63927 - DNA, 1308 bp, Homo sapiens
atgggtataactctggagtcttttctttcagatgaagagcttgtcatcaaagctgaaggccttgctagatcctcgttgtgccctgaggttccagtccctttctcttctccaccagcagcagcaaaggatgctttttcagatgtggctttcaaaagccagcagtctacatccatgacaccttttggacgtccagccactgacctgcctgaagcctctgagggacaagtgacttttactcagttgggtagctatcccctcccacctccagttggcgagcaggtgttctcatgccaccactgtggcaagaatctcagccaagacatgttgctgacccaccaatgtagccatgctactgagcaccccttaccctgtgcccagtgccctaagcactttactccacaggcggacctcagcagcacctcccaggaccatgccagcgagacaccccccacctgcccacactgtgccaggacttttactcacccatcaagacttacctaccatcttcgggtccataacagcactgagcgtcctttcccctgtcctgattgccccaagcgctttgctgaccaggctcgactcaccagccaccggagagctcatgcaagcgaaaggcccttccgctgtgcccagtgcggcaggagcttcagcttgaaaatcagcctcctgctccaccagcggggtcatgcacaagagcgccctttctcctgccctcagtgtggcattgacttcaacggccactcggccctgatccgccaccagatgatccacacaggcgagcgtccttacccctgcactgactgcagtaagagcttcatgcgcaaggagcacctgctgaaccaccggcggctgcacacaggcgagcggcccttcagttgtcctcactgtggcaagagcttcatccgcaagcaccacctaatgaaacaccagcgcatccacaccggggagcggccctacccctgctcctactgtggcaggagcttccgctacaaacagacactcaaggaccacctccgttcaggccacaatggaggctgtgggggtgatagtgacccatcaggtcagccacccaacccaccaggtcccctcataactgggcttgaaacttctggcctgggtgtcaacactgaaggtctagagaccaaccagtggtatggggaagggagtggagggggagttttgtaaatccaaatctctgtggcttcatgctttgtatatgctcacagcagggcacaaaatccaagagaaggtctgtgagccccatccaacacccacagtaattataatcttggcacatcaatggaattt

SEQ ID NO: 63928 - DNA, 1430 bp, Homo sapiens
tttttttaattttaaagtgtggttttattaatgcacttcagggtaagtgccagtcttattttagcttcttctggaagaaatactaccaattataaataatcacagcaacattttcattagacaaaaactgtgtgtgtgggtgtggtaggggggtatcatttatagcatactgcaaatataaactcaattcttgagctatattaacaacactgagcaacaatatttctttctaaaattttcttttctttaaggcagatctgtttattactaacatggtgcagtgtagttttagtaaatttactattttagtttctcagtgacaataacacagatggtcagaaaacaggcaacaaaatctcttttctagttcctctacctggccaccatttaaaaaacacaagttcctcatatatatagatatatttatatattactgtatcaaaacacattttaacacacttcacagctcatttaaagcttcagtttatagtcattcatgtgaaaggtttctataaggaatgttcacttagaattcctcactgggattccagtgttctatgtcagaaatgcagaagtcctttttcagtgcagtgctagacatattacctttgttcattcatgattttctttcaaggatttcctaacttcacttttgtatcttcatttttgtttgcttgactaatttcctttagtatacgttcaggtaaggtaggttgatatctgtataaataaccatatggacgaagatgataaacgaggtattctaactcatacatggttgtagaatcaacatagtgaaaagaaactgcaagatcagagcagcaaccaggaccctctacaggaggataatagttgtaattccagtaccaaaacgttctaggtagataacctttaattaaatggtgttctggcacaaagggatgaaaagtttcttttccaatggtatctctggaatctcctgcttctacattcataatttccatgcatctccccagtgctaagtcttcaatggaggaactatgtgtacacttgtctgttttaaatgcatcaacaaatcttttcaaggcttctttgcttagtacatatcctgctcctccactcatgtagccctgctttacataaggcttaaatcttctcccaaagtaaatgggttcttcagggtcgtattttgaaagaagccacctcaaattgtctagtatgacatacgtgtcatcatctgctttcaaaaaccaatcagcatcttctaaataatgttcatgaacatactgaaaagctttaattgttttccagtatagttgatctctgccttctttggttttcagtcccacagcagggaagtctttattttcttctgaactcataaacaacactttgttacaacgctgggcccaagtagctttgacgtgtttggcctttttctctaggttttg

SEQ ID NO: 63929 - DNA, 1313 bp, Homo sapiens
tagaagggacgcttccaaccgattactaccagctatgactatgatgcacctatatctgaagcaggggaccccacacctaagctttttgctcttcgagatgtcatcagcaagttccaggaagttcctttgggacctttacctcccccgagccccaagatgatgcttggacctgtgactctgcacctggttgggcatttactggctttcctagacttgctttgcccccgtgggcccattcattcaatcttgccaatgacctttgaggctgtcaagcaggaccatggcttcatgttgtaccgaacctatatgacccataccatttttgagccaacaccattctgggtgccaaataatggagtccatgaccgtgcctatgtgatggtggatggggtgttccagggtgttgtggagcgaaatatgagagacaaactatttttgacggggaaactggggtccaaactggatatcttggtggagaacatggggaggctcagctttgggtctaacagcagtgacttcaagggcctgttgaagccaccaattctggggcaaacaatccttacccagtggatgatgttccctctgaaaattgataaccttgtgaagtggtggtttcccctccagttgccaaaatggccatatcctcaagctccttctggccccacattctactccaaaacatttccaattttaggctcagttggggacacatttctatatctacctggatggaccaagggccaagtctggatcaatgggtttaacttgggccggtactggacaaagcaggggccacaacagaccctctacgtgccaagattcctgctgtttcctaggggagccctcaacaaaattacattgctggaactagaagatgtacctctccagccccaagtccaatttttggataagcctatcctcaatagcactagtactttgcacaggacacatatcaattccctttcagctgatacactgagtgcctctgaaccaatggagttaagtgggcactgaaaggtaggccgggcatggtggctcatgcctgtaatcccagcactttgggaggctgagacgggtggattacctgaggtcaggacttcaagaccagcctggccaacatggtgaaaccccgtctccactaaaaatacaaaaattagccgggcgtgatggtgggcacctctaatcccagctacttgggaggctgagggcaggagaattgcttgaatccaggaggcagaggttgcagtgagtggaggttgtaccactgcactccagcctggctgacagtgagacactccatctcaaaaaaaaaa

SEQ ID NO: 63930 - DNA, 4715 bp, Homo sapiens
ggcggcggcgggggcagcgcggcgcgtgtctgtgcgctgcggtcgctcgggaccgggaccggggcgaggcgccgcggggctgagcccagcagacattgcgttggcctccgagcagggcgcatcatgcagcgttcgcgcaccggagagaaaactgagaatgaaattgctttggcaagctaaaatgagctcgattcaggactggggtgaagaggtagaggaaggagctgtttaccatgtcaccctcaaaagagtccagattcaacaggctgccaataaaggagcaagatggctaggggttgaaggggaccagctgcctccaggacacacagtcagtcaatatgaaacctgtaagatcaggaccataaaagctggcaccttggagaagcttgtggagaacctgctgacagcttttggggacaatgactttacctatatcagcatctttctttcaacgtacagaggctttgcctccactaaagaagtgctggaactactgctggacaggtatggaaacctgacaagcccaaactgtgaagaagatggaagccaaagttcatcagagtccaaaatggtgatcaggaatgcaatcgcttccatactaagggcctggcttgaccagtgtgcagaagacttccgagagccccctcacttcccttgcttacagaaactgctggattatctcacacggatgatgccgggctctgacccagaaagaagagcacaaaatcttcttgagcagtttcagaagcaagaagtggaaactgacaatgggcttcccaacacgatctccttcagcctggaagaggaagaggaactggagggtggagagtcagcagaattcacgtgcttctcagaagatctcgtggcagagcagctgacctacatggatgcacaactcttcaagaaagtagtgcctcaccactgcctgggctgcatttggtctcgaagggataagaaggaaaacaaacatttggctcctacgatccgtgccaccatctctcagtttaataccctcaccaaatgtgttgtcagcaccatcctggggggcaaagaactcaaaactcagcagagagccaaaatcattgagaagtggatcaacatcgctcatgaatgtagactcctgaagaatttttcctccttgagggccatcgtttcggcactgcagtctaattccatctatcggttaaaaaagacttgggctgccgtcccaagggaccgaatgctgatgtttgaagaactttcagatatcttctcagaccataataaccatttgaccagccgagaactactgatgaaggaaggaacctcaaaatttgcaaacctggacagcagtgtgaaagaaaaccagaagcgtacccagaggcggctgcagctccagaaggacatgggtgtgatgcagggaactgtgccctacctgggcaccttcctgactgacctgaccatgcttgacactgcccttcaggactacatcgagggtggactgataaactttgagaaaaggagaagggaatttgaagtgattgcccagataaagctcttacagtctgcctgcaacagctattgcatgaccccagaccaaaagttcatccagtggttccagaggcagcagctcctgacagaggaggagagctatgccctgtcatgtgagattgaagcagctgctgacgccagcaccacctcgcccaagccttggaagagcatggtgaagagactcaacctactgtttctaggggctgacatgatcaccagtcccactcccaccaaagagcagcccaagtccactgccagcgggagctctggtgaaagcatggactctgtcagcgtgtcatcctgcgagtcgaaccactcagaggctgaggagggctacattactcccatggacacccctgatgagcctcaaaaaaagctctctgagtcctcctcatactgttcttctatccattccatggacacaaatttccttcaggggatgtcttccttaatcaaccccctctcctcccctccgtcctgcaacaacaaccccaaaatccacaagcgctctgtctcggtgacgtccattacctcgactgtgctgcctcctgtttacaaccaacagaatgaagacacctgcataatccgcatcagtgtggaagacaataacggcaacatgtacaagagcatcatgttgacgagccaggataaaacccccgctgtgatccagagagccatgctgaagcacaatctggactcagaccccgccgaggagtacgagctggtgcaggtcatctcggaggacaaagaacttgtgattccagactcagcaaatgtcttttatgccatgaacagccaagtgaactttgacttcattttgcgcaaaaagaactccatggaagaacaagtgaaactgcgtagccggaccagcttgacgttgcccaggacagctaaacggggctgctggagtaacagacacagcaaaatcaccctctgaagggagggaccagtggccccttgtttgccaaaggcagagtggggctgagaaacaggctgcggtgattgcaattaccatccggtgttcgaggatcattggtgaagtcagcagatatttattgagttcctgtggtgtgcaaagcattatgataggcaccgtggggaaactggaaatgaatttgacatgaaaaggatgaacgattcactgattctctttgactcatttgagactaaaatgcagaattaccaacatttaaaacatatatatgcacatgtatttggtatgcatgtgtatatatataaaaatatataagagggactttatgggatagtatggactatggaaaaacaaatttgcacaatggcctgggaagttgaggtcactttttacagggaaatagaagaaactgagaacctagtctcgtatattctgagtaaatggaatcagtcctgggaatagagagtgtcctttgtgccagtattacaagaagcccaaactttatttttataaagggagaggatgactttctcaatcaagtgccaccagataaaaacaactgcagaggctggaactgccacaggctgtatgaaaggccactttggaaagggtttggatgagctggtggccttcaacctctgcctgcatctgccactttctgctaccctagggaggccaggaggagcttcggaggaccatcgccccactggtctagccatcatgacacctctggaggtgtcaagctcctgaaacaagctcatttcagtttctggcaaccccgtgtatttccgttttccccctaaagaacatatcataatcattgcacaaataaccatgttctttggtaatgaagccagaaaagaaagcgcaaaagaatggtgactcatttggactcttatctgtcttggaatgtcactgcttcattgccttctctgattgccttttgcatgtaaaactatgtgtctggagtcttttgccatctggatcttagtacctctttattatgtgcaatttattcctcaggtgtggaaatttctactgcaattgactacgtttgattattttgagcttgtgaaagatttctgaacagtgattgtcccgttaatagcccctcagaagatgttccctgctgataacagcatcctattttacttacttttatagcattactgtgcctagtcgtggggaaagagatggggctgtatagattatctgaatcatttgtctaagaggtacattcttccagatggaatcaataactttttttttccaggttcccgtgcttgctatcacagtatcattgttaagtgacacttttgtctctcataacaccatcacactcttccttccaagtctgagctgtgctggggtttgaactaaaagccatatgtggaatattgacatgtgtaagaagcactttcagaatgttgtcctttttaagaaatgattctcaaaataccagtttttattccaaaaatttagagaacaaacccggaatatgaagtgcagattgtaacatggagctatttttttttcctaatcccataatacagctcctaaaagttgtgtgggatttgcgttgcataaatagccatgtgaattccacaagaagcaccagggaaagtttagagatttgcggcaatggaccgaagaacgggccaggaagtcctccaatttcctttggtctttccaggagattggactacacattgtaaagactgactgggtttcaactagtcaaaaagcactttcttctgttttcaatccctgttcgatttgtgcttctgtgcttgtaggagagatggccagggtggcagccctcatgcaggttgaagtatatgtagcctcagcctgatattcttggtgcgaaggtaaaaaaaaaaaaataaataaaaccattggcctggttgagggcgtgaccaccaaaacatatatgttgggcccgggttcatcctgggtatttatactgtatatgtagagtctaaatttatatactgcaatgtaaaatatatatatatttaccttttttaaagacaatggaaattccaagtagctaaaacttagcttcatttatttaatgccactttaaatgtcttaaatttgtttcctggtggacagccgggtaatgcttttagctgctcgcatgcttgtctttctgcatctccatcatctgtttaccttttggttaaactaataaactagtttgggacttggctggcatgtgctgccagacccaaagggaaaaaaaaaa

SEQ ID NO: 63931 - DNA, 1540 bp, Homo sapiens
ttttttttttttgaatgttctcaccaaatgtaaaacaggcccagtcaatgccatttattatacatgtcaaacagcttctaagaccgacgggctcccataataaggttttggggattttttgttttgtttttcattttcttttttgcatcaaacaggttcttccaaaagcctgctcacaaggtagacaaaaacataaatcttcaggaaaatgaaacaagagaagctgaaacaatctacacctgaatgttaaaaaactcatcagacacaaaccacaccaaacactcatcccatttaatttcctgttacatgctctgaggaagccaagaacatcaggccccagggcagcaatgctctaggattccagctcggaccccctctatatgacagattcatgcacacacatccacacaccatagaaccaggcagaaatacacatgcatgcacaggtggctagagaaccatagggcaggatgggaaaaagggctgatcaaggatatgcaatcaactggaaactgggacctagagaatgcttctgttgcaggatgaacatgagttaaaattaaaacaaaggcagaacacaggataaaggtgggatgttcagacaagaggtgggatagatgaagagataaagatgcagggggagttttgggaaagcagcctcagaaggggaggtttttctttattgggaactcaggtgggcagggtcctgtgactccagtgatacactgaggcagaagcaatatgccacagcattacctctgcaatctgtgccctctcccaaagtagagggaaaccatgagcccccaccctctatccctccccattgacactcttaagaactttcccattacccaaaaagaaatgaccccctactacacacacacacacgcaaagttaggtccagcataggccaaagtcaggccaagcacagaaagcctcagtaactcttcttggtggaaccaaagccagagaagcccatcacagctgccatctcatcgtcctcctcaaatgtcaagtcctcctcagccctccttttcttctccttctgtttctctttcttgtacgctttggccttttcctcctcttctctgagctccttcatcctttcctcaaaatcataatccttctgcttctcttccatcttcttcttgttgacctcaaaacgtttcttcacctgatccagggtggaacgttccacacgcatagacatgcccaggtttctctgatgtttctttccattaatgtgatccagaaagttgatggagtccttcaccacacagtcacagacattgcagtaatatcctcccatctcagattgaggggttgtcttggtaatgacaattgtcttcccaagcttggattccaagtccaccttgtagtccctatgccgtaaaagctctcgcttgacaggctgcactggttttccatctttcttttctctctcttccgtgagcctcttctcggcgagtttctcatattcatctttgtcccactttcggcgaaagtccaagttttttgtcccgctgcccgacgccatctt

SEQ ID NO: 63932 - DNA, 2233 bp, Homo sapiens
gcacgaggggatgcaagtgaatttagtaaaaatccccatattgtgagttttgctggaaatcaagtaactattataagagctgatggctccctggttcacatcagcataacaccatatcctgctattctccatgaatatgtaagcagttcaaaatgggaagatgctgtgagactttgtcgctttgttaaggagcaaaccatgtgggcttgtctagctgctatggcagttgctaatcgagatatgactactgcagaaatagcctatgcagcaattggtgaaattgataaggttcagtacatcaattctataaaaaatcttccatctaaagaatcaaaaatggcccacatactactgtttagtgggaacatacaggaggctgaaatagtacttcttcaggctggccttgtttatcaagcaatccagatcaatattaatctctacaactgggaaagggcactggaattggctgtaaaatacaaaacacatgttgatacagttcttgcttaccgtcaaaagtttttggagacatttggtaaacaggaaactaataaacgatacttgcattatgcagaaggtctccaaatagattgggagaaaatcaaagccaaaattgagatggaaattacaaaagaaagagagcaatcatcaagcagccaatccagcaagagtataggtttaaagccctaaatgccatgcgtatctttaagaaattttatcttttgaaacacgttctgattaaccaagggtaagcatgttttggttgctaaagaaaaaagcataatctttaaccgagtataagtacttgctgtgtatttagtgtaaaagtacatgcagaaagatgaaacacaaagtaattgatgtatttctatcttttatattttttagtccaataattagcaaaatattactatgtacttaagagatacctgtgtagtgtcgattatatgtcagttttttgcccattacttcatccctaaatcttcagcatgaacaaatattaatgtcgataataaaacattggactctttgaaatgtatgttaccattaatttctatttgacctctaaattgtaaaatgcctccaaaagtttatttatagaacaaaaatacatgaggatggatttgtacaaatgtataaaatgccactatttatacaccaagttcatagcagcattactggaatagcaaaagatggaaacagctcaagtgtctatcatgaatggataaacaaatgtgctataatacatacaatggaatattatttagctttaaaaaggaatgaaattctgataaatactacctcaggataaaccttgaaaacactatgctaagtgaaataagccagacacaaaaggccaaatatgatgccacttttatgaggtaccagcataggcaagttcacagaaacagaaaggagaatagtggttgccagggactgcagggaggaggaaatggggggtggggttattgtttaacgagtacatagtttctgtttgggatgaacaaattctggaaatggatagcgatgatggttgctcaacattttgaatgttaatgccactaaattgtacccataaaaatggttaaaatggtaaattttgttatgtatattttatcataatttaaaaaatatatctagaatgggcaagaaggattctcctcattcctctcttgacttgagaatgatcagtcaataggccctgaagtctgaatttgtgaaaatttccttgggtgacaaacttgtttgattactctatttagtgtatcccaaagttattaccacataatcttttaaacaataaaacaaataccccttagaaagtcttctgcaaacccatttctgaaaatggtacattatagggtgggtatagatgcatagatatgggattatgtatgatatatatatatatacacacacacacaaagggatagagagattacctctcttaacccccattttaattactatgtctaggttttttaaataaaaatcttttctttttaacatgtttcttttcttttccggaatattggaatattctgttcttgatccagatgaaatctgattgagcagtgtacttacaagttgtactgtgtgtgtgtttcctatattgttatatttcaataagaagcttaaaatgtttaaaaataaatgagttaaaaggttttatattatgaatattataacacaataaatgcaaaaaataaaaagtctgtgttctaaacaaaaaaaa

SEQ ID NO: 63933 - DNA, 766 bp, Homo sapiens
ttcggcatttcagtaaatttttttaatgactttaatgattcttatttaagaaaaagcccttaaataaatgctaccaaggcagtaatatttgaccatatgaaccagaccaaataccctttaattttagtatattaaacctctgctgtaaatgctcttttaacattgccacatgtacaaatttgtctagaacttcacgacacaaaagtgtgcaaatatgagtctaagattgtgctgaaatagggaaaggctaacactgatgtgcaaagtaaaaaagaaagatacccgcttctgcaccaggtaataaaacaaggaaaaaccgagttaggtcctgcatgtgtctccacttcattgcttccatgtttgaaaaagggagtctgttcttttgctaggccatgaggctggaatccacttggcatactgtgttgagaggtctaagttcagtggtgctctcagcagcagccgggaggtgtgattctgaggctgggtgacctgtgctttcagagaagcaggaaagggccctctaggtgtgctgcagtctctcagaaagagttcatcaaagtagcgagcaacgaaagaaactggtcttctttgatcggttttctgttattttcactggtccacctgctcctgctgaattgctgtcattcgatggtggagatgaaggtggtgttgaaggcgtcctctgagaagcggaacaggaggcaggtcttgcctacccccgagtcgccgatcagcaggagcttgaagagataatcgtacgtctccg

SEQ ID NO: 63934 - DNA, 2219 bp, Homo sapiens
catgagctgagaaagtttgagaatatctgtgctataggcaagaaaaatacaaaacatcatttagtttttcacctagaaattttctaaataaatagtcatacaaaaaagggaaaatatatacaaacgtacatacaaagtttgggatttttattgaaatcttgttaggtatccaaacaaattctgctttcttcagataaaaatattctctcagatgtctccagataactgctaagtctaaattggtccttcaatgtcttatttttattgtcctcgtgaaatgttcatatacagttaagatgttcccaaaaggatttttatcgtgtaaaggagcgtacatgacgacctctaccactgcctccactaacaaactttcctcttgagcctccactgccgctatttgcactagcccaggaaggtccaagtcccccacgacctctagaagcacggtcccgaggacttgggcggtaacctgtagaactaaggggtcgtaatggtggaagagggcctctgttaaaattgctctggcctccacgactttcattgtaatttcctcgaggagtattctgagcactccaactggagcctcttgttccttcccgacgactgtagtttccttttgaagcaggtggtgtgaaaaacctattctgactgtggaaagcaccccgtcctcctctattgcctgaaaacccaccacgggaagaaatcttctgtgatactttgagtggccgttttggtggaggtattccatcttgaggaaccacttctttactttcagcagcaacaaagtcatccacatgcatagatggtggtctacttgtgttctgttttctctgacgaaaaatatcatgaggtcgtataccctgtccaaatcctcccctgccccttcctcttggtggtggcacaacatgagctcttttggcaggttcaatgtattcagattttccacttgacgttataaaggtctcatgcttgtgcttcccaagtttgaatcctttagtagtcttggttcttcctggagatgatggttctgacaaaaatgagcgctctaattctgagtgcaaatcaaagtcactacagcatttttcagagagttcaattaagtcaacctttaccaaatccagatctgtatctatctcttcagcctgaaatggagtgaaccacatagatttcaactgatcatccatgacatcagcaagcacataggcagtcctattgttaaacagattctgaagagattctggagctgaaagtactggttctacatcctggtcactgagaggtaaagggtcacctgatgactccagcatctgcttaagtccaactacactgtccaacaaagaatccagattgtcatcatcttttgaatgttccaaaacaagcttctctagttcaaggaacaaattttctggactttcttctttgctttgtagaagctgttttaactctgcagcattaatactcatcgtccgtgatgtatgagctccctctacttccatgagaccattatcatctccacagcatccaattgtgtcagagttaagaatttgtctcataaattctaaaaatgaagatgcaagctctcctgtgtccttactaaatgtgctgaccactcgtttcagtaaactatgcagagcactactgtttttccttaaagaactttttaaatgaaataatccataatcatgctctgcaagaaacatcattgttctgacacatgtcagtaaacagttgtaactgctctcagagttagctagcgtagccaacagacagtcacagattgaggtcatcaattctttatttggtagagaattggagagctgctccagttcagaaatagaaccttcagaagagcttggtaagataagtgcaatgtcctgatcacagagagactgcaaaatggatgtgacatattcaacacactgttggcgaataacactgtctccaggagaccgcaccaaagctaaaagatcctggaatatctctgcatatctttcatcacctttaatagttccattaattagatgcaaaatagctaatttacaagctttgtgtgaagccagagcataaagaagagcaagcaacctggtggtttggctagtatactgttgttctttatcttctgaagtgctttgcaagtcttctacaatcaaatccaacacagttctcataatcagaagtgcagttggtgaggcaaggtcacacaattcaacatatgttac

SEQ ID NO: 63935 - DNA, 1431 bp, Homo sapiens
ttttttttttcatcaaaatattttatttcaagagttaacacttttttcaaaaagtaaaaacaatataattacttccctgagtataaagaaccaatttctaccaatcaaggacccattacaaaattaagcaattagaggtacataattctctgcattcaattatactctatttcaaatttattcttaaaaatgtcatgttttggaactttaatgtttcaaaaaaacctcagaacaactcattttgcacctatggtgttaaggttatcagtctgatctgtctttatcaaattcaagggcaatcttcaaagcggtgctattgaggccaacagattgcatgttacatatgatagaaacaatgattcctcttgggggaaccttgttatttatagtctctgtatccagttcttcaggaaggaccagcaggacactactggcacccactgcccctccagtatgtgaagcataatgccgttgctttctacacgaaccatacgtttgtttcctttccacaacaccccacgccattgcatatttaccctctttatcccaagacatctctgtgttagggactggggtccacatcataaccattgtttctggtttgaggtatccaggtaaaagattttcatttgagttcttaaacagcccaacttggtaaccataaagcattgcattcccaaatttcagaaggtcacccactgtagacagaaatccaccaccagcccatttataggagttatccacgtaaggtgtgttgacaagacgtttctttttattgtaaacataaaatcttgctctattgtaaatcactggctcgttttcttcctgcacagtcgtcagcatatccaagtcatggaatattttctgcatatagtccaaatatttacatcctgaagctctctctactatggctgccagtagggtatagccaaaagttgaatacaaaaactgactaccaggtttgaagaacaaaggatcatttttaaataatcttagggattcaattgaattttcaaacttttctctcaaatataattcgccttgttcaaaatcattctttttcttgccaggttttgaattccggcatttggcttcattctcctgctctgttttaaatttagtaaaatcattcttttcattacttttgccttctttttcttgctcaaatgcaacattctctttcatcatcttcaaggctttataagctttctcttctttcaccttttttatgtccttttcataatgacgaattccacttaaatgggaaatcagtaatcttgttgtgacagaaaccttttcaccttcatattctttttctgggaattcgggaacataatgttgtactggaatatcaagatccagtttccctgcttcccacaatttggcaagagcaaccatggtgagacttttgctgatgctagcaattcgcat

SEQ ID NO: 63936 - DNA, 1374 bp, Homo sapiens
gcacgagaaaagatggattcttgtattgaagcctttggtaccaccaaacagaagcgagctctgaacaccaggagaatgaacagagttggcaatgaatctttgaatcgtgcagtggctaaagctgcagagactatcattgatacgaagggtgtgactgctctggtcagcgatgctatccacaatgacttgcaagatgactccctctaccttcctccctgctatgatgatgcagccaagcctgaagacgtgtataaatttgaagatcttctttcccctgcggagtatgaagctcttcagagcccatctgaagctttcaggaacgtcacgtcagaagaaatactgaagatgattgaggagaacagccattgcacctttgtcatagaagcgttgaagtctttgccatcagatgtggagagccgagaccgccaggcccgatgcatatggtttctggataccctcatcaaatttcgagctcatagggtagttaagcggaaaagtgctctgggacctggagttccccacatcatcaacaccaaactgctgaagcactttacttgcttgacctacaacaatggcagattacggaacttaatttcggattctatgaaggcgaagattactgcatatgtgatcatacttgccttgcacatacatgacttccaaattgacctgacagtgttacagagggacttgaagctcagtgagaaaaggatgatggagatagccaaagccatgaggctgaagatctccaaaagaaaggtgtctgtggccgccggcagtgaagaagatcacaaactgggcaccctgtccctcccgctgcctccagcccagacctcagaccgcctggcaaagcggaggaagattacctagacgcatgctttccagacagggcgttttggctgcatcacagccactggctggtcctattcatttccatttttatgtatgttttgaaaagaaaaggtccggggatggtggctcacacctgaaatcccagcactttgggaggccgaggcaggaagatcattgagctcaggagtttgaaaccagtctggacaacatagggagaccccatctctaccggaggaaaaaaaaaagagtcaggcctggtggtgtgcgcctgtaatcccagctactcgggaggctgaggcaggacgattacttgagcttgggaaatcaaggttgcagtgagctatgattgtgtggccacactccatcctgggtcacagagtgagaccttgtctcaaaaaagtaacataaggaaaaaagaagccttgctttagcacaggtatgaagccagaagccagcatctcaactgtgcttgtcttatgcagaaatataaagcgatggccaggttggacttcaaaaaaaaaa

SEQ ID NO: 63937 - DNA, 1165 bp, Homo sapiens
ggcacgagagaactatggttcctggggacaaagcttctttgaagggtcttttcagaaaatccccgctaaacgaattggtgttcctgaggaggtctcctctgtggtctgcttcctactgtctcctgcagcttccttcatcactggacagtcggtggatgtggatgggggccggagtctctatactcactcgtatgaggtaccagatcatgacaactggcccaagggagcaggggacctttctgttgtcaaaaagatgaaggagacctttaaggagaaagctaagctctgagctgaggaaacaaggtgtcctccatcccccagtgccttcacatcttgaggatatgcttctgtactttttaaaagcttatagttggtatggaaaacatttttcttatttttaagtgttattaattatatctatggaaaaactattcctgaaatatatacagtcttatgtcccaatcagagtcttttaacctatgatttaaaaatgtataagtaacagaaattaacatattttaatgactttactttttatttctaagaaaagtatttgaaaaatggaataattttaaatcaatgataattctagggatcatgaactcccagaagattttattatttaattgtaaaggtagaggccagacgcagtggctcacgcctgtaattccagcactttgggaggccgaggtaggcgggtcagttgaggtcaggagttcaagaccaggctggccaacatggtaaaaccctgtctctactgaaaaacaacaaaaacaaaaacacaaattagtcgggtgtggtggcacacacctgtggtcccgggtacttgggaggctgaggcaggaggatcgcttgaaccccgggaagcggaggttgcagtgagctgagatcatgctactgcagtccagcctgggctacagagtgagactgcatctcaaaaaaaaacccaaaaaacaaaaacaaacaacaacaacaaaattataaaggtagaaaataaacctaaattgtgtcggtaattaagattattaaaattagaattatacaatgacttatttttggtggcaaatactttaggagcaataatgccttatggtaattattgatgtatagtttcttttgtttatgaagtcaaatttgtataaattctcttaattcaaaaaaaaaa

SEQ ID NO: 63938 - DNA, 1289 bp, Homo sapiens
ggcacgaggcgattagcgccaacagctcagagaaaacgtgacgaaaaccagtctgtaaaacccgagcctgggagaggggcttcggtgcgcggggggaatttgcagacgctccctgctggcggagatttcctgacctgtccttcggcgcgggactttcggcgggtcccggccgggcagacccaagtgccggcggcggagactgcagtggagccagtaccggctgtagtggccggggccgtggcgggagagtcatgtcagagccgcagccgcggggcgcagagcgcgatctctaccgggacacgtgggtgcgatacctgggctatgccaatgaggtgggcgaggctttccgctctcttgtgccagcggcggtggtgtggctgagctatggcgtggccagctcctacgtgctggcggatgccattgacaaaggcaagaaggctggagaggtgcccagccctgaagcaggccgcagcgccagggtgaccgtggctgtggtggacacctttgtatggcaggctctagcctctgtggccattccgggcttcaccatcaaccgcgtgtgtgctgcctctctctatgtcctgggcactgccacccgctggcccctggctgtccgcaagtggaccaccaccgcgcttgggctgttgaccatccccatcattatccaccccattgacaggtcggtggatttcctcctggactccagcctgcgcaagctctacccaacagtggggaagcccagctcctcctgatcatactctggtacctggcctgtgcatcggcctcctgcttcatgtcaacctcctactcctgccagggaatgtggacacctggctccctggtgtccaaagaccctggcacctgggtgggtttgagctggacagaagcttagagacaaaggcttcaagaagcagtggctgcagggagtcacagaagggcaggacctgaacgctgtctgcttccctggaatccaagatgctgagtggaagtggaccctgggtgggcccggccctgtctttttcaggaaaattacatcctcccatggaggatgagagactgaggctcagggagggcaaggaataggcccaagatcacttggcaagctgggcacccaggacccccaggtgcttgacagagtcaccccatggtggtatggctgaacaaggagcggcagacaactcagggagaaactcaggagtgcagtaccagggacacctcaggacagattctctggccaggcccttccctgacccaataaatcctgaagaggtgaaaaaagaaaaaaaaaa

SEQ ID NO: 63939 - DNA, 1819 bp, Homo sapiens
ggcaatattgtcatccagaagaaaaaatataacaaacaacatattattcccctggaaaatgtcactattgattccatcaaagatgagggagacttaaggaatggatggctaatcaagacaccaactaaatcttttgcagtttatgctgccactgctacggagaaatcagaatggatgaatcatataaataaatgtgttactgatttactctccaaaagtgggaagacacccagtaatgaacatgctgctgtctgggttcctgactctgaggcaactgtatgtatgcgttgtcagaaagcaaaattcacacctgttaatcgtcgccaccattgccgcaaatgtggttttgttgtctgtgggccctgctctgaaaagagatttcttcttcccagccagtcctctaagcctgtgcggatttgtgacttctgctatgacctgctttctgctggggacatggccacatgccagcctgctagatcagactcttacagccagtcattgaagtctcctttaaatgatatgtctgatgatgatgacgatgatgatagcagtgactaaggacacatttgggagtatttaatcaggtgtggctatctgagaaatcaactttgggggaaatgtaagattctgagctctctctctgttttgttctagccatgaatttgcctgagaaacttgtaacctatgtgcctcaatatattccatagaaagtaggtccccctgccttctcccactcctcacactcttctacagggataggcttttgcaaatatatcagataaattttttgtttcttgtttatttttaggttattttcttggaaggttgggaaaagatgtttgttttaacaggtcatgtactacgttgttgttttcatttctgttataagtaaaactaaaagcacagaatggtgggaaaggggctataatgtggttcattaataatgttagcagcttttttctaaccatcctgtctaatggttaagacaccagtaacaaaaacacatgatttggaaatactttggctttttcatatacctagtggtgccttatcataatagcactgttacatgaaataagcccctaccttcttactttctggtttgttgaaaaaatacactggtgctctttgaagtgataaaatgagtgtttatgaatgggtgtaattaggaaatacttctcatctgacagctacaaataactaagtttggaggtattttcactctatatgaataaatatttttccataaaatagttgtgattatatttttgttttatataggtcccaaattataattgtcaaatatatattttaaattaataaaagttgtcattcttaggaatttggtttgaaatttatcagttatacagaattgtcatactgcattagcttctacctttagtaagacatattttttaggtataaattcttatgctttaacattatttctggattgaaaatcttataaaacccttgaaaataaacagtctcttttttacaaagcctgtgttagagcacagatttacctaggcttgaagatttggaagaaataatatgtaagaatggcctcaaggcagaccactttaagtttggctagacttcatatcgtggaagtattgtctatttcagtgtgaaactatcttgaatttgcaaatatagtgttatattttataaagttttgtaaaatcccaaacaatatttctatttttgtaaaacaattgtatgtataatctgtatttgaaatcattttgcaatctatggaaatagagtagcaattgctatttctaaattgtgaactttaagtcaatctagatttatt

SEQ ID NO: 63940 - DNA, 1104 bp, Homo sapiens
ggcacgagggagacccttatgtttgaaaaagattgtgccactaaactaaaggagaagcagctctttaagatatttccagccattaaccaaaatgagaatgtcacatctcatactggccagaagtctaaagagaaaaagccaaagaaattaaaagagactgaagaaacaccaagtgaactgtctttccaggactttgagtacccagactatgatgactacagagcagaggctttccttcaccaacagaagaggatggagtgctacagcaaggccaaagaagcttatcggatagggaaaaaaaatgtcgccaccttttatgcccagcagggtactcttcatgagcagaagatgaaagaagccaatcaccttgctgccatagagatctttgagaaagtcaatgcttcgctgctgccacagaatgttttagacctccatgggctgcatgtggatgaagctctagaacatttgatgagagttttagagaagaagactgaagaatttaagcagaacggtgggaagccctatttgtctgtgattacggggagaggaaaccacagccagggaggagttgctcgcatcaaaccagctgtcattaagtacctcataagccatagcttcaggttctctgaaattaaaccagggtgcttgaaagtcatgctaaagtaaaataaacatccttgaattagaagtatgaaggtttgtaggttaaaattacttttatttgcagtaattcagtcaattctaccctaaagatgtgttttattataaataatattcaattatgaaacaaaaaaattatgatgtttttcaaaatgcaagtgaggtttgattttttactgaatcaaatgcaaatgttacctgttaaagatattacagagaaattttattgattacaaaatatgtaagaaaattatcagctacagttttaaagtttaaaatgctctgattgtttctcgagaaaaggttacctttgtattaattgttgtatgacatttagtaatgtcctaaaagtcttttgtgagaggtatttaaagtgctttgagacctgattcatggcccccaaagggtggtattaaaagaggaaaaaggacatagtagtggtag

SEQ ID NO: 63941 - DNA, 1525 bp, Homo sapiens
aggtcccgggtcgacgatttcgtcgcgttggctgggtggcctccattgtcgggctgctgctctcagcggcggggctcgccagcgcttcagtgggcggggacgcggcaggtgactccagaccaaggaggatgagctgctgtccctggaagagaacggatggagggaagcagctcctacgaagttccctctgtggctgctgctgatctggaggagggtgctggtcagactaggagcttgcctgccaccccctccaaagatgttcacaagggtgttggaggcatcatcttttcctcctcaccgattttagacttgagtgaaagtggtctgtgccgtttggaggaggtctttagaatccccagccttcaacaattgcatctgcaaaggaatgccctgtgtgtgattcctcaagatttctttcagttgcttccgaacctgacttggctggacctccggtacaatagaattaaagcgcttccttctgggattggagctcaccagcatttgaaaactttgcttttagaaagaaatcctatcaaaatgttacctgtggagctggggagcgtaaccacgctgaaagcactgaacctaagacactgccctctggaattccctcctcagctcgttgtgcagaagggattggtggctatccagcgcttcctgcggatgtgggcagtagaacactctctccccagaaatccaacttctcaagaggctccaccggttagagagatgaccctccgtgacctcccgagcccaggactggagttgtctggagaccacgcgtctaaccaaggagctgtgaacgctcaggacccagagggggctgtgatgaaagagaaggccagctttctcccgcctgtggaaaagccagacctgagtgaactcaggaagtctgcggactcctcagagaactggcccagcgaggaggagatcaggcgcttttggaagctgaggcaggagattgttgagcacgtgaaggcagacgttctgggagatcagctcttgacgagggaattacctccaaatctcaaggcggccttgaacattgagaaagaactaccaaagccaagacacgttttcagaaggaagacagcctcctccaggagcatcttacccgacctcttgtcaccgtaccaaatggcgatccgagcaaaaagactggaagagagccgagcggcggcgctccgagagctccaggagaagcaggctctgatggagcagcagagacgagagaaaagggcactgcaggagtggagagagcgagcccagaggatgaggaagaggaaggaagagctcagcaaactcctgcctccgcggaggagcatggtggcatcaaagattccctctgccacagatctgatagataacaggaaagtaccactgaatccgcctggaaaaatgaaaccaagcaaagagaaatcgccacaagcaagtaaagaaatgagtgccctgcaggagagaaatttagaagagaagataaaacagcacgtcctccaaatgcgtgagcaaagaagattccatggcc

SEQ ID NO: 63942 - DNA, 840 bp, Homo sapiens
ggcacgagcagctgtcagtagtgttctcagtacaggtgtaccaacagtaccgttattgccaccacaagtaaaccagtccctcacttctgtgccaccaatgaatccagctactacattaccaggtctgatgcctttaccagcaggactgcccaacctccccaacctcaacctcaacctcccagcaccacacattatgccaggggttggcttaccagaacttgtaaacccaggtctgccacctcttccttccatgcctccccgaaacttacctggcattgcacctctccccctgccatccgagttcctcccgtcattccccttggttccagagagctcttctgcagcaagctcaggagagctgctgtcttccctcccgcccaccagcaacgcaccctctgaccctgccacaactactgcaaaggcagacgctgcctcctcactcactgtggatgtgacgccccccactgccaaggcccccaccaccgttgaggacagagtcggcgactccaccccagtcagcgagaagcctgtttctgcggctgtggatgccaatgcttctgagtcaccttaactttgaaccattctttggaattggcgtggtatatttaaccacgggagcgtgtctggaaacgcaaactatcattaatttcatactagtttgtaccgtatctgtaggcatcctgtaaataattccaaggggaaaactaaacgaggacgtgggttgtatcctgccaggttgagtggggctcacacgctagggtgagatgtcagaaagcgcttgtattttaaacaaccaaaaagaattgtaagggtggcttgctgccaggcttgcactgccgt

SEQ ID NO: 63943 - DNA, 395 bp, Homo sapiens
  misc_feature (1)...(395): n = a,t,c or g
ggcacgagacagatttcaacccagatgatacaatgtctgtcgaagatccacagactgatgttttggactccacagcctttatgcgctactaccatgtgtttcgagaaggggagctctgcagtctgctcaaggagaatgtgtcagagctccgtatcctgagttctgggaatgatcatggtaactggtgtatcattgcagagaaaaagagaggttgtgattgattggatccttttagacaactcctccaaaagatgaaccacattcttttctcttggtttgagatggttacctgaatttgcattcagtgttatttgttaatccatttacgctttggtctgcagagactattaattatttggntgttttggtttcatttttgaataagcacagattct

SEQ ID NO: 63944 - DNA, 803 bp, Homo sapiens
ttttttttttttgatttggtaattaaagtttatttgaacacaaaatactttctctgtctataaaattggctgttagcagtagcagcagcatgtcctggccaaggggagtagatttctccagactactaaagccatgtatatagccattcccacttcccatattctgtggatatgtacatgtgcatggtagctagagtccctccaccaggagtatctctctcatggatggtttcttcagggagaggaagaggagacctggggtgaagagctgggatggttttgaagtggggcaaagccattaggcttgtaccttgaaagccccagtctctctgggaatagcttgtactgccaggtgtcctctgaggccccttctctgtactctgtcctgcttgaggggaatgggggtatttgggactcccataggaaaggcacttagcctaagtcaccaaatgactgcttggtccccactgaagcagtgtagctctccatagtatttttggtggttatggattacatgtgtggccagctcatgctttttcttgagcaggggctgtccatgacctgtgctcataccatgctttctaagttctctttggacagggcctcagctgctgcctcagcctgagtttcagagagtgtgtaggagtcctggtaatcttgaagcagtttgaccacctccagatggttgaactgcacagcatcatccaggggaatgttgccccacctgtccttggcaaaaggattcactttgcaagcctcgatcaggaatttaacaacttcgatgtgtccttcagctgcagcaa

SEQ ID NO: 63945 - DNA, 1200 bp, Homo sapiens
ctggagacgggctgatgcacgaggtggtgaacgggctcatggagcggcctgactgggagaccgccatccagaagcccctgtgtagcctcccagcaggctctggcaacgcgctggcagcttccttgaaccattatgctggctatgagcaggtcaccaatgaagacctcctgaccaactgcacgctattgctgtgccgccggctgctgtcacccatgaacctgctgtctctgcacacggcttcggggctgcgcctcttctctgtgctcagcctggcctggggcttcattgctgatgtggacctagagagtgagaagtatcggcgtctgggggagatgcgcttcactctgggcaccttcctgcgtctggcagccctgcgcacctaccgcggccgactggcctacctccctgtaggaagagtgggttccaagacacctgcctcccccgttgtggtccagcagggcccggtagatgcacaccttgtgccactggaggagccagtgccctctcactggacagtggtgcccgacgaggactttgtgctagtcctggcactgctgcactcgcacctgggcagtgagatgtttgctgcacccatgggccgctgtgcagctggcgtcatgcatctgttctacgtgcgggcgggagtgtctcgtgccatgctgctgcgcctcttcctggccatggagaagggcaggcatatggagtatgaatgcccctacttggtatacgtgcccgtggtcgccttccgcttggagcccaaggatgggaaaggtgtgtttgcagtggatggggaattgatggttagcgaggccgtgcagggccaggtgcacccaaactacttctggatggtcagcggttgcgtggagcccccgcccagctggaagccccagcagatgccaccgccagaagagcccttatgacccctgggccgcgctgtgccttagtgtctacttgcaggacccttcctccttccctagggctgcagggcctgtccacagctcctgtgggggtggaggagactccctctggagaagggtgagaaggtggaggctatgctttggggggacaggccagaatgaagtcctgggtcagggaacccagctggctgggcccagctgcctatgtaaggccttctagtttgttttgagacccccaccccacgaaccaaatccaaataaagtgacattcccaaaaaaaaaa

SEQ ID NO: 63946 - DNA, 919 bp, Homo sapiens
ttttttttttcagccataactattttatttaactacttccccaaggatgtggaccttacacttactttacagccagcctcagaaaacttcctagtggcaactaaggctagagcagctgtagagtggtctggagggggctcttccattctcacacgtgtgtgcatgaaccctttctcctatcctaaaggcccttcgggaagaagctctagctggttgatgagagcaaggtttgggggccgctacacttcggcagtgcagtgttgggaaggtgagaacacagttctaaagaacaagaattgttgagtctgaggaatatggggtctggacccccagcacatccccttcataggtctccatgggttgggagagcagggtcaccctcatttttgttgcaggattcacttgcagtgtgaatttcaattgtgctggcatcagaaccttcagacagcatgctcagggcttcgtcagaagtctgcccacccacttgagacaccttcccggaagcagggttttcatggggcatcagtggggatgggtgagccccctcagcagccgaggtggtcagtgattcccactggatctccttcctgggagactgaaaacccaggctgcatcctgtccagccgtagaaggccaaagacaagagaaatccctgggctggattcaggattcccataataaaccatgtggtcttggctgcagttctgacaggtttcaaagaacctccattgatatctgtttgcatctcaagatagaataaaaggctttcattgatgatattcgacaaccaacaaataattaaaaccagcatgattttgaaaaatcggatcttgatcacggctcccatcctcctctcgttctccgtgtaaatgccttgtcttcctttaagtaaagaggccactgcagtcactgtcttttg

SEQ ID NO: 63947 - DNA, 1420 bp, Homo sapiens
tcatggtcataatcctgaccctgagccagtgccaggtctccaagtgccttctgaatgaccacaggcgattggttttagtggtaggtgtgtggggatctgttctggtcatctggatgctggtcatcggtgtgcagtattgatcaggacctgcaaacccaaaagcttatgggagctggcacgtcacaaaaagaaaaaaaccaagcccatcatcttcgtttcggacagagcaaacagcaacaaggagctgggtgtggaccaggagtcagaggagggcaaaggcaaaacaagccctgataagcaaaagcagtccccacagccacagcctggcagctctgatcaggaaagtgaggaacagcaacaattccggaacattttcaagcagatagcaggagatgacatggagatctgtgcagatgagctcaagaaggtccttaacacagtcgtgaacaaacacaaggacctgaagacacacgggttcacactggagtcctgccgtagcatgattgcgctcatggatacagatggctctggaaagctcaacctgcaggagttccaccacctctggaacaagattaaggcctggcagaaaattttcaaacactatgacacagaccagtccggcaccatcaacagctacgagatgcgaaatgcagtcaacgacgcaggattccacctcaacaaccagctctatgacatcattaccatgcggtacgcagacaaacacatgaacatcgactttgacagtttcatctgctgcttcgttaggctggagggcatgttcagagcttttcatgcatttgacaaggatggagatggtatcatcaagctcaacgttctggagtggctgcagctcaccatgtatgcctgaaccaggctggcctcatccaaagccatgcaggatcactcaggatttcagtttcaccctctatttccaaagccatttacctcaaaggacccagcagctacacccctacaggcttccaggcacctcatcagtcatgttcctcctccattttaccccctacccatccttgatcggtcatgcctagcctgaccctttagtaaagcaatgaggtaggaagaacaaacccttgtccctttgccatgtggaggaaagtgcctgcctctggtccgagccgcctcggttctgaagcgagtgctcctgcttaccttgctctaggctgtctgcagaagcacctgccggtggcactcagcacctccttgtgctagagccctccatcaccttcacgctgtcccaccatgggccaggaaccaaaccagcactgggttctactgctgtggggtaaactaactcagtggaatagggctggttactttgggctgtccaactcataagtttggctgcattttgaaaaaagctgatctaaataaaggcatgtgtatggctggaaaaaaaaaa

SEQ ID NO: 63948 - DNA, 1684 bp, Homo sapiens
tttcgtgggaggacgtgggatggtggcggagctggctgcagcagagctaccaagcagtcaaagagaagtcctctgaagccttggagtttatgaagcgggacctgacggagtttacccaggtggtgcagcatgacacggcctgtaccatcgcagccacggccagcgtggtcaaggagaagctggctacggaaggctcctcaggagcaacagagaagatgaagaaagggttatctgacttcctaggggtgatctcagacacctttgccccttcgccagacaaaaccatcgactgcgatgtcatcaccctgatgggcacaccgtctggcacagctgagccctatgatggcaccaaggctcgcctctatagcctgcagtcggacccagcaacctactgtaatgaaccagatgggcccccggaattgtttgacgcctggctttcccagttctgcttggaggagaagaagggggagatctcagagctccttgtaggcagcccctccatccgggccctctacaccaagatggttccagcagctgtttcccattcagaattctggcatcggtatttctataaagtccatcagttagagcaggagcaggcccggagggacgccctgaagcagcgggcggaacagagcatctctgaagagcccggctgggaggaggaggaagaggagctcatgggcatttcacccatatctccaaaagaggcaaaggttcctgtggccaaaatttctacattccctgaaggagaacctggcccccagagcccctgtgaagagaatctggtgacttcagttgagcccccagcagaggtgactccatcagagagcagtgagagcatctccctcgtgacacagatcgccaacccggccactgcacctgaggcacgagtgctacccaaggacctgtcccaaaagctgctagaggcatccttggaggaacagggcctggctgtggatgtgggtgagactggaccctcaccccctattcactccaagcccctaacgcctgctggccacaccggcggcccagagcccaggcctccagccagagtagagactctgagggaggaggcgcccacagacttacgggtgtttgagctgaactcggatagtgggaagtctacaccctccaacaatggaaagaaaggctcaagcacggacatcagtgaggactgggagaaagactttgacttggacatgactgaagaggaggtgcagatggcactttccaaagtggatgcctccggggaggtgagtgggcctggtgggtcagagggaagcgagcctaatggtcctgggtgtgagagctctccccagccagcccagctgtcccctcaggagggtccctgctcctgtctgaggtgacaggtggtgggaaaggagctggagcttcctgctcagacccacaacattggtcatcagcaggctgcacttttcctcagttccagggtggatagagggtcaagttcttgaccttagctctgtatcaaaattgcctgagaaactgcttaagaaaacagatgtcatgctgagcgcggtggctcacacctgtaatcccaacactttgggaggccaaggtgggaggattgcttgaggcgaggagttcaagaccagcctggccaatatagtgagaccccatttctgtttttgaaaaaaaaaaaaaaggggcggccctttag

SEQ ID NO: 63949 - DNA, 3650 bp, Homo sapiens
ttttttttgacataatcatttttatttgatttaattgataaataaatacaagagaactgttgtgaaaccacttggcaatatagtaaattttaaagattttatttcaacttcactcacttatatttcttgggaatggggatatatacattattcaccaataaatcgctaatgctttaaatttacaattaccctatttgtagaaacctgaaagatcattccaattaaatgaaaaaaaaattgtacaaaaacgttcttttgctcttacaattcaaaatacattcaaattcacattcttaccagcagccaaaacctttaacccaaaattcagaaactgcagtcctacaagtgaacaaactagtgttttaatttaattatcatgattgttgttaacactgaaaaaaaaacatgatggctcctgaaacaagacaggttagcaactggtacagctttcccttctgggcactcaaagctttgcccttgattattatttttatttcatcttttcaaacacagacaattgctccaacttgaaagtttcaatggaattttggcatttaatattgctaatgcttgctaagatttaagatctcccaatgatgagaatcagaaaatgacgcacgactaaattaaaatcatcctaaaagacttactacatagtggtatctggtattcaatatcaatagtgtttttgaattacatgatatgtttttcacaaacatagcacctcatcaaatatctggtaaacactttgcaatcacaataagtgttgggagaccaagttccaaagacaattatgtgattcacttaaaggtaacattgtaagacaagtctcaggcataatgaagattaggaatgcagtctgctggttcccatgatctaaagggatgctcacctatatgggcaccatcctattaagacgtggtaatatgtttccaaaccaaaaaaagtcggtaagtgttaaaatggactcctgctttataaatgatctgttaaatgtacttgtaaaattaaaaaaatttccaaaatgtcaaaagagatatgattattgtatctcattattccaagtaattctgttaaaaagatactaaatgaagtccaattttatcttgtaaagttttagtgtaaaaactaatgtactgaaattcagtaaagtttaactttcatctaaatgtaacgaaacaactattcattttggtgagttttcacaagctgtactcctgacctgaagaatcactttttttatgccgaggagatggagtagtctttgtaggagatggggacgcagtaccaggtgagtcagttcctccatcggaagtacttggtgatgatgccagatagggaactttctttcttccaaggaatcctcccccttcaaatcctcctttcttcctaaactctattttattttcattttcatcttctgatgaccttttcttggattctgaaaaaccttcagctattttatgcacttccaatccactatccaattctctcaaactttttatttctactccaggagactttctctcagatatattacattcccctgttgcccctttcacttcagcttgtattggacccaagttaccattttcagggacagctctttctacatttctgttcaaattaatagtctggaagtccctataactgtgaaagctctcagtccttcttgcccttgctaataaaggactttctctgtaaggcctcatggaaccgtaagtagctgcttcatgggtggtatcatggtgctgaagctgaaggctagaatttgattctcgtaagtggctatgctgaactacggaagttgctggactgatgttaggagtagcacagcgagatgtgctcaaatcacattgatcgagtaatttgagtagctcttcttcggttggaccacctacatccttatcttcacttttgttaaccatatccatagcagtggtcagatcccacatttgaatactgccatttgtatggcctgtgaacaagtagcgccttggtcttgagcccatcctactggatccctcacattccctccctgtaaatgaggatattgtagtacagtcaacagcctggatctcacatattctttttccagtcgatgagagtcttacaaatagtttgttggtgatgggaacaactttctggataaacacctgttgatcgtctcgctctccaaaaggtcctatgtcatttccagaggaatagctaccatgactttctgtctcctccagggatagtatcttgaatgacgctaaaggagtagaacctggctgagtagagatcattcctctgaatcgtgttactgtccacgtccggacatgattattatctgcacagactgatacaagatgcttctctgatagcatgatttttgttacgggacttcggtgaactgtgaaagtctgaaaaagctgaggacctgacccaactgtctctgggtgttgtacaatcactcgtactgctccagagctcgtaccataggcgatctcgatccagttaccactgacacttgttttgggtgtgaggtaaacactcagagcagtaatagcatcatttgaaggatcatgatacagttcagttacaagaagatcattatctttcattcgcaaggggaacttctgcatatctatgtaatatattgatccattgttacatccaagcagaaggaatgatccagcagtgtcataactagttataggaacaacatcttgaacctgccagtgctgagtgacagcattccacactcccactttccctgtatgactcgtggccaccaactggttaccaataaagaagagagcatctacaggaacacccaggctgaacactccaatttcacttccacttcccccatcctgaacactccacaagatgatgctactctctgaggcaacagcaaccattttgtctttgtctccatgtggccctccaaccacctttgcatttaaagctactcgttcgatagtccaatccaaatatgggctcgtaaacacttgctgccatcctgaagattctttgattctgtaacacacagcaaaatgggcatatgcagctacaatccagttgtgatggccagctactattagcacctttcgtggatccacaggaaatcctagcctaacagtttcttctcccgttccagagagaacaggctgtgtaccatttccccgggcttcaccttctgtagaatttagaccattcctagaatcagcagatctgactgtgttgtttattttacgactaggaatacctggtgggggcaagtaaccatgaaaaaggacactgccacaagaggaacgctccaattcttcacataagagaagccttcttactaatggagtgatcccgtaaaattctgcttcatgcctgagaacattaatactcactccccttaagtctagttcttttgtccgaagaaaatttaaaatgggtgcaaatgctgctggatctctatcaataaatatagcaccagtttcatctcgaagtgttgaaattctcccactcagcaaactggaaaaaaaagaatctggaatccacataagagtttgtcttgaggtactaaatctggtcccccctacgttcagttggacgatctcgccgctgccggccgccgccgcggggaagctgccgcagtgccctcccgccat

SEQ ID NO: 63950 - DNA, 6639 bp, Homo sapiens
tggaatttgatccggaagaattttactacctattggaagcagcagaaggccatgccaaagaaggacagggtattaaaaccgacattcccaggtacatcattagccaactgggactcaataaggatcccttggaagaaatggctcatttgggaaactacgatagtgggacagcagaaacaccagaaacagatgaatcagtgagtagctctaatgcctccctgaaacttcgaaggaaacctcgggaaagtgattttgaaacgattaaattgattagcaatggagcctatggggcagtctactttgttcggcataaagaatcccggcagaggtttgccatgaagaagattaataaacagaacctcatccttcgaaaccagatccagcaggcctttgtggagcgggatatcctgacttttgcagaaaacccctttgttgtcagcatgtattgctcctttgaaacaaggcgccacttgtgcatggtcatggaatatgtggaagggggagactgtgctactttaatgaaaaacatgggtcctctccctgttgatatggccagaatgtactttgctgagacggtcttggccttggaatatttacataattatggaattgtacacagggatttgaaaccagacaacttgttggttacctccatggggcacataaagctgacagattttggattatctaaggtgggactaatgagcatgactaccaacctttacgagggtcatattgagaaggatgctagagagttcctggataaacaggtctgtggcacacctgaatacattgcaccagaagtgattctgaggcagggttatggaaagccggtggactggtgggccatggggattatcctctatgaatttctggttggatgcgtgccattctttggggatactccagaggagctatttggacaagtcatcagtgatgagatcaactggcctgagaaggatgaggcacccccacctgatgcccaggatctgattaccttactcctcaggcagaatcccctggagaggctgggaacaggtggtgcatatgaagtcaaacagcatcgattcttccgttctttagactggaacagtttgctgagacagaaggcagaatttattccccaactggaatctgaggatgacacaagttattttgatactcggtctgagaagtatcatcatatggaaacggaggaagaagatgacacaaatgatgaagactttaatgtggaaataaggcagttttcttcatgttcacacaggttttcaaaagttttcagcagtatagatcgaatcactcagaattcagcagaagagaaggaagactctgtggacaaaaccaaaagcaccaccttgccatccacagaaacactgagctggagttcagaatattctgaaatgcaacagctatcaacatccaactcttcagatactgaaagcaacagacataaactcagttctggcctacttcccaaactggctatttcaacagagggagagcaagatgaagctgcctcctgccctggagacccccatgaggagccaggaaagccagcccttcctcctgaagagtgtgcccaggaggagcctgaggtcaccaccccagccagcaccatcagcagctccaccctgtcagttggcagtttttcagagcacttggatcagataaatggacgaagcgagtgtgtggacagtacagataattcctcaaagccatccagtgaacccgcttctcacatggctcggcagcgattagaaagcacagaaaaaaagaaaatctcggggaaagtcacaaagtccctctctgccagtgctctttccctcatgatcccaggagatatgtttgctgtttcccctctgggaagtccaatgtctccccattccctgtcctcggacccttcttcttcacgagattcctctcccagccgagattcctcagcagcttctgccagtccacatcagccgattgtgatccacagttcggggaagaactacggctttaccatccgagccatccgggtgtatgtgggagacagtgacatctatacagtgcaccatatcgtctggaatgtagaagaaggaagtccggcatgccaggcaggactgaaggctggagatcttatcactcacatcaatggagaaccagtgcatggacttgtccacacagaagttatagaactcctactgaagagtgggaataaggtgtcaatcactactaccccatttgaaaacacatcaatcaaaactggaccagccaggagaaacagctataagagccggatggtgaggcggagcaagaaatccaagaagaaagaaagtctcgaaaggaggagatctcttttcaaaaagctagccaagcagccttctcctttactccacaccagccgaagtttctcctgcttgaacagatccctgtcatcgggtgagagcctcccaggttcccccactcatagcttgtctccccggtctccaacaccaagctaccgctccacccctgacttcccatctggtactaattcctcccagagcagctcccctagttctagtgcccccaattccccagcagggtccgggcacatccggcccagcactctccacggtcttgcacccaaactcggcgggcagcggtaccggtccggaaggcgaaagtccgccggcaacatcccactgtccccgctggcccggacgccctctccaaccccgcaacccacctccccgcagcggtcaccatcccctcttctgggacactcactgggcaattccaagatcgcgcaagcctttcccagcaagatgcactccccgcccaccatcgtcagacacatcgtgaggcccaagagtgcggagccccccaggtccccgctgctcaagcgcgtgcagtccgaggagaagctgtcgccctcttacggcagtgacaagaagcacctgtgctcccgcaagcacagcctggaggtgacccaagaggaggtgcagcgggagcagtcccagcgggaggcgccgctgcagagcctggatgagaacgtgtgcgacgtgccgccgctcagccgcgcccggccagtggagcaaggctgcctgaaacgcccagtctcccggaaggtgggccgccaggagtctgtggacgacctggaccgcgacaagctgaaggccaaggtggtggtgaagaaagcagacggcttcccagagaaacaggaatcccaccagaaattccatggacccgggagtgatttggaaaactttgctctgtttaagctggaagagagagagaagaaagtctatccgaaggctgtggaaaggtcaagtacttttgaaaacaaagcgtctatgcaggaggcgccaccgctgggcagcctgctgaaggatgctcttcacaagcaggccagcgtgcgcgccagcgagggtgcgatgtcggatggcccggtgcctgcggagcaccgccagggtggcggggacttcagacgggcccccgctcctggcaccctccaggatggtctctgccactccctcgacaggggcatctctgggaagggggaaggcacggagaagtcctcccaggccaaggagcttctccgatgtgaaaagttagacagcaagctggccaacatcgattacctccgaaagaaaatgtcacttgaggacaaagaggacaacctctgccctgtgctgaagcccaagatgacagctggctcccacgaatgcctgccagggaacccagtccgacccacgggtgggcagcaggagcccccgccggcttctgagagccgagcttttgtcagcagcacccatgcagctcagatgagtgccgtctcttttgttcccctcaaggccttaacaggccgggtggacagtggaacggagaagcctggcttggttgctcctgagtcccctgttaggaagagcccctccgagtataagctggaaggtaggtctgtctcatgcctggagccgatcgagggcactctggacattgctctcctgtccggacctcaggcctccaagacagaactgccttccccagagtctgcacagagccccagcccaagtggtgacgtgagggcctctgtgccaccagttctccccagcagcagtgggaaaaagaacgataccaccagtgcaagagagctttctccttccagcttaaagatgaataaatcctacctgctggagccttggttcctgccccccagccgaggtctccagaattcaccagcagtttccctgcctgacccagagttcaagagggacaggaaaggtccccatcctactgccaggagccctggaacagtcatggaaagcaatccccaacagagagagggcagctcccctaaacaccaagaccacaccactgaccccaagcttctgacctgcctggggcagaacctccacagccctgacctggccaggccacgctgcccgctcccacctgaagcttccccctcaagggagaagccaggcctgagggaatcgtctgaaagaggccctcccacagccagaagcgagcgctctgctgcgagggctgacacatgcagagagccctccatggaactgtgctttccagaaactgcgaaaaccagtgacaactccaaaaatctcctctctgtgggaaggacccacccagatttctatacacagacccaggccatggagaaagcatgggcgccgggtgggaaaacgaaccacaaagatggcccaggtgaggcgaggcccccgcccagagacaactcctctctgcactcagctggaattccctgtgagaaggagctgggcaaggtgaggcgtggcgtggaacccaagcccgaagcgcttcttgccaggcggtctctgcagccacctggaattgagagtgagaagagtgaaaagctctccagtttcccatctttgcagaaagatggtgccaaggaacctgaaaggaaggagcagcctctacaaaggcatcccagcagcatccctccgccccctctgacggccaaagacctgtccagcccggctgccaggcagcattgcagttccccaagccacgcttctggcagagagccgggggccaagcccagcactgcagagcccagctcgagcccccaggaccctcccaagcctgttgctgcgcacagtgaaagcagcagccacaagccccggcctggccctgacccgggccctccaaagactaagcaccccgaccggtccctctcctctcagaaaccaagtgtcggggccacaaagggcaaagagcctgccactcagtccctcggtggctctagcagagaggggaagggccacagtaagagtgggccggatgtgtttcctgctaccccaggctcccagaacaaagccagcgatgggattggccagggagaaggtgggccctctgtcccactgcacactgacagggctcctctagacgccaagccacaacccaccagtggtgggcggcccctggaggtgctggagaagcctgtgcatttgccaaggccgggacacccagggcctagtgagccagcggaccagaaactgtccgctgttggtgaaaagcaaaccctgtctccaaagcaccccaaaccatccactgtgaaagattgccccaccctgtgcaaacagacagacaacagacagacagacaaaagcccgagtcagccggccgccaacaccgacagaagggcggaagggaagaaatgcactgaagcactttatgctccagcagagggcgacaagctcgaggccggcctttcctttgtgcatagcgagaaccggttgaaaggcgcggagcggccagccgcgggggtggggaagggcttccctgaggccagagggaaagggcccggtccccagaagccaccgacggaggcagacaagcccaatggcatgaaacggtccccctcagccactgggcagagttctttccgatccacggccctcccggaaaagtctctgagctgctcctccagcttccctgaaaccagggccggagttagagaggcctctgcagccagcagcgacacctcttctgccaaggccgccgggggcatgctggagcttccagcccccagcaacagggaccataggaaggctcagcctgccggggagggccgaacccacatgacaaagagtgactccctgccctccttccgggtctccaccctgcctctggagtcacaccaccccgacccaaacaccatgggcggggccagccaccgggacagggctctctcggtgactgccaccgtaggggaaaccaaagggaaggaccctgccccagcccagcctcccccagctaggaaacagaacgtgggcagagacgtgaccaagccatccccagccccaaacactgaccgccccatctctctttctaatgagaaggactttgtggtacggcagaggcgggggaaagagagtttgcgtagcagccctcacaaaaaggccttgtaacggggagggcccaggggcaggactgtggagacccgtcctgaacgggcgactgtgtcttgactacctttcaaaaccagcactgtgtgggaatgtccgccaggcagagctcggagcctcattgagacaggggagagagaaagacaaagaggggaccttcttccagatgccttcccagttgtaaccggtaaaactgttaccagatagtgtttgtacaaaaaaaaaa

SEQ ID NO: 63951 - DNA, 642 bp, Homo sapiens
ttttttttttttggttttatagatttattttcaaagagtaaaacacatacaatttaaatacaagtccatcagaatcactctgtcagagtcagcaagaatgccaaaatgtgtcctcactgccagacattcgtcactatcatctgagtcctctctcagcaaagccaaagggtctgatactttattcatatacatccttcttatctgcaatgtaatctacaatttcttgtggacacattaacttttcagcatctatatcaggaatttcaaacccaaattcgtcttccatggccatgataatctccacttggtccaaactgtctaagcccaggtctttcataaaatgagaatttactgaaagcttctctgggtcaatcttgtcatagagtttcaatacgtaaagaacacggtcctggatgccctctaacgtcaaaggaggcatgtcgctatactggcggcacaactgtgtaactctaccaggaacctgcgcgagcactaaggccggctgcaaagtcccgagcctcgtctgggtccccgcggagcagagagcggtgctgagaggccgggccacggccagcatccggacccggggcagcggcgcaaaggccgcgggcaggcggctgacataggctgaaaggacacgag

SEQ ID NO: 63952 - DNA, 1972 bp, Homo sapiens
  misc_feature (1)...(1972): n = a,t,c or g
tttttttttttaaatactcaatggtcatttattatataacttaaactcattcaatacattaaataactgttttaaataattacaattttttaaaattaaagaatatgtcactgatcttaacgagacttccaaatcgtctcagcaggggctccagacttccccagcaggcggcaggtttcctgtcatgctttcgccttccttctcatatacaccagtgctagagttcatcatgtgtcaaaattgtatcttgcttcttgttttcaagatgatctaatagttgtcttatctcagcatcatactccacccattctgggacaattctggcagcagcttttagtttggattcttttgttttgggattattgcacagatcaattgttttggctctttgtttggattcatcatcacaccaggtttcacaccacagccagtcttgaggaagagacttaatggcgacttggtaaatcatattattggggagatcctgatctaggtttgaaagactgtttggatcttgactgagagcttgatactggctcctgagcctgtcacctgctccaattctcctgaacttcttgagatccactacatataaagcactgatatggtatttccgtcttaaaagatgtgatgcccagtatcctgttttccagaaacgatatccatccatttccctgcggctatcacaaaatggagtatacccataaggagctccatccagatcgaaatctcgaagttcttttagatcatgtctcacaatctggtcagcatcaacaaaaatgattttgtccactgctagtgggaaaagaacatcaaggaaaagaattttgtaaccccaaataatcctctgtctttcagtctgttgacgaagccaacggggccacctatattgaactagttcatatcggaatccatactctttagccatgtgaggaattacttctttaaatgtcggtgagagataattttttagcaaccagaatttcactggtgttttggtgttacgcaaaacagaaagcatcataattcttaaaaaacgttcatataaatgaccagaagcaactgaaaaaatgtttaggacatctttttcctttttgttttctttatgcaagcttactgtgaaacttttaatggaatcccacagtccttttgttttttcatcttcatcggtaaggatatcttccttaattttgtctgtttcttttttcacttttactttgagtatcttgcttttgaagctgtttaatacaacaatgatatcttctaggtctgcttgagagtcagttccttcatgcccaactatttgataaatatcttcagattttccttggtgtaacctcagtatccaagcacctgggtttgcttttaattgaaaatacccatgatgtgccatcactattgtatcaaccacagcaggtttattttttgtgcctagtgtgaactgcagaccccgaggaggctgttctgtcactttatcaaagcattgtccttccagtagtaagtattctagttcatattctgctgtaacagttttctcagtatcctttaagtgaatattatcaaggtcacagttgctgtgcactgtttcaaccaaccagccttctggagtaatcatgttgaggattaggaggggtgattcaggaatatccaaaaattttgccactggtccaagagaagaaacgtcattagcccctgacatcagttctggttccagaacaaaacggtaaaagctttctaaaggggcttctgaaagcctgcccctacagttcatgaacaactttatcttcaggttgataatcttgccaagtacaaccaacaactgtgccattttctgtgcttctcttgttaatggatcaacaatagcaatgacattgaagaacatatcattctcttgaggattcgtctttataacactgtgattctccctaagaaatgaattccngcncntggctatggtcatcgatnctcaatg

SEQ ID NO: 63953 - DNA, 1892 bp, Homo sapiens
cttggttgaacccccccgaggttggatcccgatttggaggggcgacccaagcgtccggatggaaaagagagcgctagaagattacgccacccagtggcacacttggtttgcttctgtcattgtatacactacatccgatgccttttggaaaccttatttgttcacaaagtttctgcaggacacacacctttgaaaaatttgataatgagttgtgccttttactggggatttacttcttggattgcctactacatttatcgtccactatatacaccaccatcatttggaaacaggcaaatcacagtatctgctatcaattttctgatttgtgaagctgggaatcatttcatcaatgtaatgttgtctcatcccaatcacacaggaaacaatgcctgtttcccaagtccaaattataaccccttcacatggatgtttttcctggtttcatgtcctaactacacctatgagattggatcatggattagtttcacagtcatgacacaaacactgccagttggaatttttacacttctgatgagtatccagatgtctttgtgggcacaaaagaaacataagatttatctgagaaaattcaattcatatattcatagaaaatcagcaatgattccattcatattgtaaaaaaagaatcttatctcctatagaaaacagcaacatataaattcaataaataagacttagttaaggatagttaactattatactccaacaattcatgagcaacagtatatacactgagtaaaaatataaaatagtaaaatttcactaaatttatagaaatgcacatggtaataaaaagtataaattataaatgcaattaactaagaacagctctgaatgtatttgcatgggattggtccttgaataaaattgtcttacttcattaatacttcacaatactatttgcataagacaaaataccacagcaaaaaaaaaaatctgattaaaaaaaaaaaaagcgatctgaacagacatttcccaaaggaagacatatacatggtcaataagtatatttttaaaatgctcaacattaactattcatacagaaatgcaaatcaaaaccacaatgagatatcatctcatcctaattaaggtgactattttcaaaaagacaaaaaatatgacagccgtggtggttcatatctgtaatcctaacactttgacaggccaaggcaggggaattgcttgagttcagaagtttgagatctgggcaacatattgagactctgtctctaaaaagcatattgagactctgtctctacaaaaaaattttaaaaagtaaaaattagctgggcgtggtggcacatgccagtaggtagtcccagctactcgaggttgctccagctcaggcgttcaaggctacagagagccatgattaaaccaaggcactccagcctgggtgacagagtgagactgtctcaaaataaaataaaaataacatattggtgaagatgcggggaaaaaaaaagaactcttaaacactgctggtgggaatgtaaactaaagcagccatgtggagaacaacatggagtttcttcaaaaattacaaatagaactatcatatgatccagcaataccattactggaaaaaggaaatctgtatattaaagagacatttgaaccctatgtttactgcagcactattcacaatagccaagatataggagcaacctaggtgtccaacaacagatgaatggataaagaaaatgtggtatatatacacaatagaatactatgcagccataaaaaccgaattcctgtcattcaggacaacatggatggaattggagggcatatgttaagtgaaacaagccaggaacagaaagttaaacattgcatgttattacttatatgtggaagctaaaaaaatt

SEQ ID NO: 63954 - DNA, 3511 bp, Homo sapiens
caacctccaaagtgggggcttctcctgcaccatcatgtaccggaagattggccccctggtggacaagcagatctacaggttctccgaggaaggcatggtcaatgccaggtttgactacacctatcatgacaacagcttccgcatcgcaagcatcaagcccgtcataagtgagactcccctccccgttgacctctaccgctatgatgagatttctggcaaggtggaacactttggtaagtttggagtcatctattatgacatcaaccagatcatcaccactgccgtgatgaccctcagcaaacacttcgacacccatgggcggatcaaggaggtccagtatgagatgttccggtccctcatgtactggatgacggtgcaatatgacagcatgggcagggtgatcaagagggagctaaaactggggccctatgccaataccacgaagtacacctatgactacgatggggacgggcagctccagagcgtggccgtcaatgaccgcccgacctggcgctacagctatgaccttaatgggaatctccacttactgaacccaggcaacagtgtgcgcctcatgcccttgcgctatgacctccgggatcggataaccagactcggggatgtgcagtacaaaattgacgacgatggctatctgtgccagagagggtctgacatcttcgaatacaattccaagggcctcctaacaagagcctacaacaaggccagcgggtggagtgtccagtaccgctatgatggcgtaggacggcgggcttcctacaagaccaacctgggccaccacctgcagtacttctactctgacctccacaacccgacgcgcatcacccatgtctacaatcactccaactcggagattacctcactgtactacgacctccagggccacctctttgccatggagagcagcagtggggaggagtactatgttgcctctgataacacagggactcctctggctgtgttcagcatcaacggcctcatgatcaaacagctgcagtacacggcctatggggagatttattatgactccaaccccgacttccagatggtcattggcttccatgggggactctatgaccccctgaccaagctggtccacttcactcagcgtgattatgatgtgctggcaggacgatggacctccccagactataccatgtggaaaaacgtgggcaaggagccggccccctttaacctgtatatgttcaagagcaacaatcctctcagcagtgagctagatttgaagaactacgtgacagatgtgaaaagctggcttgtgatgtttggatttcagcttagcaacatcattcctggcttcccgagagccaaaatgtatttcgtgcctcctccctatgaattgtcagagagtcaagcaagtgagaatggacagctcattacaggtgtccaacagacaacagagagacataaccaggccttcatggctctggaaggacaggtcattactaaaaagctccacgccagcatccgagagaaagcaggtcactggtttgccaccaccacgcccatcattggcaaaggcatcatgtttgccatcaaagaagggcgggtgaccacgggcgtgtccagcatcgccagcgaagatagccgcaaggtggcatctgtgctgaacaacgcctactacctggacaagatgcactacagcatcgagggcaaggacacccactactttgtgaagattggctcagccgatggcgacctggtcacactaggcaccaccatcggccgcaaggtgctagagagcggggtgaacgtgaccgtgtcccagcccacgctgctggtcaacggcaggactcgaaggttcacgaacattgagttccagtactccacgctgctgctcagcatccgctatggcctcacccccgacaccctggacgaagagaaggcccgcgtcctggaccaggcgagacagagggccctgggcacggcctgggccaaggagcagcaaaaagccagggacgggagagaggggagccgcctgtggactgagggcgagaagcagcagcttctgagcaccgggcgcgtgcaagggtacgagggatattacgtgcttcccgtggagcaatacccagagcttgcagacagtagcagcaacatccagtttttaagacagaatgagatgggaaagaggtaacaaaataatctgctgccattccttgtctgaatggctcagcaggagtaactgttatctcctctcctaaggagatgaagacctaacaggggcactgcggctgggctgctttaggagaccaagtggcaagaaagctcacattttttgagttcaaatgctactgtccaagcgagaagtccctcatcctgaagtagactaaagcccggctgaaaattccgaggaaaacaaaacaaacgaatgaatgaacagacacacacaatgttccaagttcccctaaaatatgacccacttgttctgggtctacgcagaaaagagacgcaaagtgtccaaaaggaacaaaagaacaaaaacgaataagcaaagaagaaaacaaacaaaaacaaaacaaaacaaacacacggaccaataaacaaagaagcgaagataagaaagaaggcctcatatccaattacctcactcattcacatgtgagcgacacgcagacatccgcgagggccagcgtcaccagaccagctgcgggacaaaccactcagactgcttgtaggacaaatacttctgacattttcgtttaagcaaatacaggtgcatttaaaacacgactttgggggtgatttgtgtgtagcgcctggggaggggggataaaagaggaggagtgagcactggaaataccttttaaagaaaaaaaaacatgagggaataaaagaaattcctatcaaaaatcaaagtgaaataataccatccagcacttaactctcaggtcccaactaagtctggcctgagctaatttatttgagcgcagagtgtaaaatttaatttaaaatggtggctataatcactacagataaatttcatactcttttgtctttggagattccattgtggacagtaatacgcagttacagggtgtagtctgtttagattccgtagttcgtgggtatcagtttcggtagaggtgcagcatcgtgacacttttgctaacaggtaccacttctgatcaccctgtacatacatgagccgaaaggcacaatcactgtttcagatttaaaattattagtgtgtttgtttggtccagaaactgagacaatcacatgacagtcaccacgaggagagaaaatttaaaaaataaaaataaaaaccaaaaaaaattttaaaaattaaaaaaacaaaaataaagtctaataagaactttggtacaggaacttttttgtaatatacatgtatgaattgttcatcgagtttttatattaattttaatttgctgctaagcaaagactagggacaggcaaagataatttatggcaaagtgtttaaattgtttatacataaataaagtctctaaaactc

SEQ ID NO: 63955 - DNA, 2216 bp, Homo sapiens
ttttttttttttgtagagatggggttttgccatgttgcctaggctgatctcaaatccctgggctcaagcaatccacccacctcagccttccaaagtgctgggattacagatgtgagccaccacctacagcctggccaagaacccttttctctcccacattcccctgggagcagaggataggcctgatgattgttttaaacagtagaaagggttcagctaagaactacagtccactctcagccctgtcatgtactataggacaagtcttcattcacaacaaatggatagcaacaccaatctcgtaacactgggaaaactgcatacaatatttagaaggaacactaatacagcagaatctgcacacaacggagtcaaagatctgaggccaaatcctactacactttacgactttgagttggtcacttttctgaaccttagcttctccatcagtgtaaaactgatgtaaaataatataaagctatatgaaagctgatgtgatgtacttgtgaaatagtatgtgcaaaaggactttgtaaaatgtaaagcactatgctggttattgtgatatctgagatatttttaaagttgcaattcaattcaacaagcattcatttagagtcatgtgcaaggcactgtgctaagagatgggaaaatactacataaatacaaaattctgctgaaaactaacttattggcagagttccaaataatgaaacggatacatttaacaaatcagagtattgctacacctgagatttttcacttcaaccacctggaaggagaaaacctaataacagcatgaattttatcatactgttaccattcatagcagcttaataagtatttcacttcaacgtggtcagccaagttttataatttggcaatagtgtaaagaagcgtgaagagaaaaggaagaggaggaagagcttcagtctttgtatctcccagggttataatataaaactgaacatcaaataagccaccccacccttatacttatgatttattatttcttaaagagcgtataatacattgtgggagaagggtagaagattcatttttcctgctcactcaactacacactcaaaagtgaaagccctcttccttgaaaagtgactgtcttagaaaagtttaacaatacatttcttaaaccaggaaaaaattacaccatctattcttttaacagcaggtagtttagagttcttaaaataactttataaatatataatatagtaacatagataaccaaagtggaaaaatttcaagccagggtaccagtgtataaaatgaaacttttcaagccatcttaacaacagttaagtgagcaaaccaccaactctgaactctcaagctgtgttttaaaatacaaagcagcccgcagcaagttctctcttgtccaggcattctgtatgtaaggccaggaggcttctgcttctttcctgggttttgcttgctaggcacagctggaagggcagaaggccacagctgagctgaactcgctgtcaaatttgaacttcctagaaaaatcactgcagaggaaaccacatcaacctactgaagatttcagatcttcagaaatgtcacggaaagtccgctgaggctgagcaggccatggggtctggtttggcgtgggaactgaattcgtgggactcactagcatggcactatagatattggaagcaaccacaagtatgcagagaagaataggaccgatgattgctccttccaggcctaggtagtatgctccaccggccactgccaagcctgtcaggtaaggatggccacctcctgatatgtcagagtagattgcagtatctacaaagtatgttggcaagagatgaaaaatcaacagtaaaatggccttgcatcctaacccttgtgtcagccacaggtcaagaactgcaggtactgctgcccagtatgtccccaggaatggcactgctccaaggattgctgctaatgctgatggtatgaagacaatattgatgccaaacatagtatgagtcagccaggtatacaatccatagaagccagccattttgagggaagcatcaaacacccctctgatagcttcttccacagactggccaataatattagaagaaggacctggctgagatagtggagtcaggcttatcacccacttcactggcttgtagtactcatcactggaacttaatagataaaatagtgtggtcaggaaaattatcagagag

SEQ ID NO: 63956 - DNA, 470 bp, Homo sapiens
aagatgcaatgggaaacagtggctgctgttaaaaaccttcgacaccttctgccctctgggccctgccttggtgaccaaggacagtgtagcaggtaggttcctgatccctgcccccttgtacctaccattgcacagatgaacagccctccagggaggagcacgggttcaggtacatgtggcacctgccctccctggctgccctttcactgctgactccatacagggaaagttttttatcctcagccacgagttctcccatgggcttccttcccaagccccctagagggaacacaactgcagaggatgtgaaactgcatgcgtgaagtaaattacaaagaacactgagctgatgggtggatcgggcttcctgcggctgccaccatctgaaataatctaagttgagcatcatggagcataactatcgcaaggcccaggcattttccacactacagatgatagccagtgtgact

SEQ ID NO: 63957 - DNA, 4623 bp, Homo sapiens
ttttttttttttcgcaggtttcaaaaactcactttattccaatgtgaaatgaggacgtgatggtttaaaaacaagaaaaagttcttgctcagcggtggggatgctctgcttgcccgctcacgcccatcccccttgaaacaaggtgtctggacggaccacacccataagcggctctccgcaaacccaggcagacgcccgtctcctccgggtctcagggtggccacatcctcccccaccagggctctgacagcaggcacagagcagcagcacgggcagggtggagcgggagcagcgtgtgggggcccccgccacccccagagctagtctcagaccaggaagggagctgggcaccagagaagcgacatcacgtcggcacctgtaactcccgggatccgtaattgggccccgcttcccccagcctcgcccccggcccactgtgcgttcggcagctcaggttaaaactgaggggagggatacattcagaccgcaggccccaaggctgcgcccagctgggtgcagggagtagggagccgagtcagagccacccactgggctctgagggcccagcaagccaaccccgacccctccgttcgggagcagcagccagaccacgccagtcacaacggcggctcccgtcccgccccaaactaaagtgcaccccagccctccagccccgccacagagctccggctccccacccctccccaccgggtttttcggcctaaaccctgaactttcagacaggctgggcccgggggtggtggcagccaaagcagcagccatcatgtcgaccatacaaatgacctgagaaatcccgtctgcgcgtcacccactcaggagtcacccactcaggactggctcgggctatgtacaggggagaggaacggtcaacactcacagccaggggcgcactcgcacacgccggccggagggcgggggccgaagcaacacctgccccccagccgggaactgatggccgcacacgccattcacgtgtctccaatggggcctctgcatcatctattcattgaaccagcgcaaaaacaccttctgcggggcaggcaggccaggctcccaggaggacacgggggtggggtggggtgagacgtggaggaagagggccttgcttcctcttccgcccgcaggctcgcccccttctcccgcagtcgggctccctggtgacggggccgctggctggctgtccgtctggctccctctctatccctgcacgctcggagaagggtccttggcagccgggggctgggagcccaggtctcctggggcccccgctggcgcgggctcggtagccatgggctcctcggctctatccctgtttctgctggcctcctggagctggtgccgccgcgccacctcggctttcagattctccaggtctttttggctgagaggaatgaagaggatgccgttaatgacgttcagctgctccaagacgctggccatgctgggggccgtgaacttgaggggcgggatgttggcgctggagccgttgcggtagatctcgttcatggtgcgctgcagggccacggcctgctgggtcaggcacttgaggtactcggagctttccttggtcttctcatggtcctcgcccagctgcgtcttgtagatggtgtaaccctccttctcgtgctgcagggccgaccggaactcagctttgctctcgtagactcgggcgacaaggtggtggctgagggccaccttgagggccttgggcccgtggtacttggtgctgacggccagcgcgttctccaggaagcgcagcgacaggtcgtactccatcaccccgtgcagcaccagcccgatgttgttgtccagcagcgccatctcggggtggtcttccccgaacaccagcagcatgaggtagcgggcgcggtacagcaggctcagggcggtggacagctggctgctggcgaagcagtacagggccaggtgcatgtattcctggatggtgttggggtgctcggtgcccatcacccgctcgctcatcagcaccgccttctgctggttactcagggcctctgcgtagtcgcccatgatgtagtggaggcgggcgaggaggcgcaggcaggcgcaggtctccacgtgcatggctccgtagacgttgttaaacaggttcagggcctcattgatgagctcacagccctccttcaggaagccctgctgcactttggcctgcccgctctggaagaaatggaaggcatccgaggccttggggttgacgtgcttgaccacggggaagatgttgagcacgtcctcctcggtgaacgcgggcttgtggcgactgtcgaagctgtactccttcagcaggacctggatccctgttttcagcgagatctcccgcaggagcgttatcttctgcaggccgtaggtctccacagcctggtccacggtctcacactcgaggtcgaagtcaaagtagttcttggcctcctggcagatgttcttccagagctcctggggggtcatgacagcccaggctgtgttatctgcagcccccgggggccggtttttcctcctcttattccgcttcttggagaccagctcgtcggcgggcaggtgggccacggggtttgggtaggagctcaggaagcagttcaggaagtggctgatggcggctgagaggccggagagctcgactccctgtaagtacgtcttgaagatgtgcttggccgagcgggtgatgagttctccaatgccgattttaaagacgtggtccagctggtggcgggccgggctccgcagcaccagctccagcaccttgcccaggtagcgcatgttgatgccccgctggcgcatcacctctgccagcgttgccccgtccacgggcaggaccgcgtgctccatgcagtccttcaccaagccagggatctggcaggagagcaggaaggcagccgcgtccttcagcagctgcttctggtcccgaacttcatcctggcaggactcagggaaacgaacccctggtgagaagatgtcaggattgaagcgaatgtcgaaggcggtgctgctgatggagccgaccgccttgcacgcgttgcggatcacctcccggctccgagggtctgtgccgtcgtctgcggcgatggtctctgccagctccttcaccttggccaggccgctggcgctgctaccctcctcctcacttcccgcctcctgtcctggaggatcctcagacttggactccaaggaggaaggaccaccattttccagggaggagggggtctccagctggctggcgttctgctgcatcagctgcaaggcggccagcttcataaagaggaggtacctgtgctccacgaaggcgtccaccagctcctggcgcaggcagcagagcttgtgccggtgggcgcgggggaagccggcgcgggcgcattcctcaggcagctcctcgccaggcacgggcaggaagttgaggtccggggggaaggtgcgcagcaggtcgaggatgtagtggcgcccgtcgttgccaatgatgcccttgcactcgaccgaggagcagagctccacctcctcgtcacggtcgttgagcacctggtgccgcaggatcttgaggggccgactcgtgcgctccagcagctccaggtaccgcgggtgtgacaccacggtcttgccgaagtcgatggagccgtagatgacgctctgctcctggtcccgctccaggatgccggggatgatggactgggccgtgacccggtagccgcggtaatccaccaccaccgtgcccagcgtgtacagcccctccacgtccaccgcgttgtacgtgcggacgccattcaggtcgttggtgggcgccacgtaggccgccacgtcccccccgaagtccttgtagtggtctcggacgtcgaagcccaggctgaagaagatgttgttccagatgaacatctgcatcttggtctcctcgctggggttgatggccatcacgttgccgtcaatgacggccatggcgcccctggtggctgccgcggtgaagtcgctgtgcaccttgaatatggccctttctcggagcagccgctcaggcaggttcttgcgaggcagctccctcgtcgtctgcagctcctcattccagtctcgggtctgtccaggaatgtgctcctcatagcccagcctcgaggtgtaggcgtcctctgcacgcacgcaatccatggcatgctccgcctggggggctgtccagctgtacacctggaatggggtggcgatcctctcgaacgggtggcgctggacccttttcttctgcagcacagcgaagttcttcttgaaggtcgggctgatctggttgagcagctccactagggaatggcttaggaagcgggggctggcgggcttggggttgaagtgataagctgtggactgattcaggtaaaagccccgtgtggacgcggtgatgctgacttgccggtcctcggctgtgatcacaaacaggtacatgaggtccccgtgcatcttccggttccccgggggcgggttccatccgctcatggtgagtactttcaggcactgcaagggcttccagtcacggttttggggctgcaggggacacagtggccgctcccggctccctggcaggatgtactcgggtggtgtgcagtcgatggggtccatctccaagcc

SEQ ID NO: 63958 - DNA, 1070 bp, Homo sapiens
cctgatctcaccggcgttgggcacatatatgaggagctgaagaggaaaggggttgaatttcccatggcagacttggacgctctgtctcccatacacacaccacagcggagtgtccctgaagtggatccagctgcgaccatgcccaggtcccaatcacagcagaggacaagtgctggttcctattactcgccgcctcctgctccctactccgcaccgcaagccccagctctgagtgtgactggccccatcacagccaattcagaacagattgccaggctgcggagtgaactggacgtcgttcgaggaaacacaaaagtcatgtctgagatgttaacagaaatggtccctggacaggaggattcatctgatctggagttgctgcaggagctcaacaggacctgtcgggccatgcagcagcgcatcgtggagctcatctcccgcgtgtccaatgaggaggtcaccgaggagctgctgcatgtgaacgatgacctcaacaacgtcttccttcgatacgagaggttcgaacgatacaggtctggccgatccgttcaaaatgccagtaatggagtactgaatgaagtaaccgaagacaacttaatagacctggggccagggtctccagccgtggtgagcccaatggtggggaacacagcgcccccatcttccctctcctcccagcttgcaggcttagacttggggacagagagcgtcagtggcaccctcagttcactccagcaatgtaatccccgtgacggctttgacatgtttgcccagacgagaggaaactccttggctgagcagcgcaagacgtatgtggggccccttttagtggctctctaaagatattggggggattgacccatgcctggtcacaggccagcacaaaaaggcatttatttaccatgtccaggactgccaggaactttaaagcatggctgtaaggacttggcattagatgcagatactgaataaataccaactgcccacctcctcccccacccccccaaacacacacacactctcctgcccttggggttgattggagtgtgatttctcctgtcagttgtaag

SEQ ID NO: 63959 - DNA, 1231 bp, Homo sapiens
tttccgggtcgacccacgcgtccgccaggagaaggaagccaacaggatccgacccggtgttttgtgacaaaggcaagacccccaggtctacttagagcaaagttagtagaggaggcagctaggcgtggctctcattccttcccacagaatggattataagtcgagcctgatccaggatgggaatcccatggagaacttggagaagcagctgatctgccctatctgcctggagatgtttaccaagccagtggtcatcttgccgtgccagcacaacctgtgccggaagtgtgccaatgacatcttccaggctgcaaatccctactggaccagccggggcagctcagtgtccatgtctggaggccgtttccgctgccccacctgccgccacgaggtgatcatggatcgtcacggagtgtacggcctgcagaggaacctgctggtggagaacatcatcgacatctacaaacaggagtgctccagtcggccgctgcagaagggcagtcaccccatgtgcaaggagcacgaagatgagaaaatcaacatctactgtctcacgtgtgaggtgcccacctgctccatgtgcaaggtgtttgggatccacaaggcctgcgaggtggccccattgcagagtgtcttccagggacaaaagactgaactgaataactgtatctccatgctggtggcggggaatgaccgtgtgcagaccatcatcactcagctggaggattcccgtcgagtgaccaaggagaacagtcaccaggtaaaggaagagctgagccagaagtttgacacgttgtatgccatcctggatgagaagaaaagtgagttgctgcagcggatcacgcaggagcaggagaaaaagcttagcttcatcgaggccctcatccagcagtaccaggagcagctggacaagtccacaaagctggtggaaactgccatccagtccctggacgagcctgggggagccaccttcctcttgactgccaagcaactcatcaaaagcattgtggaagcttccaagggctgccagctggggaagacagagcagggctttgagaacatggacttctttactttggatttagagcacatagcagacgccctgagagccattgactttgggacagatgaggaagaggaagaattcattgaagaagaagatcaggaagaggaagagtccacagaagggaaggaagaaggacaccagttaggagctggatgaatgagaggc

SEQ ID NO: 63960 - DNA, 1680 bp, Homo sapiens
aaatggtgcttctggatggaggttgtgagtcttcctgctatgtgagtgacatcacacgtacgtggccagtcaatggcaggttcaccgcacctcaggcagaactctatgaagccgttctagagatccaaagagattgtttggccctctgcttccctgggacaagcttggagaacatctacagcatgatgctgaccctgataggacagaagcttaaagacttggggatcatgaagaacattaaggaaaataatgccttcaaggctgctcgaaaatactgtcctcatcatgttggccactacctcgggatggatgtccatgacactccagacatgccccgttccctccctctgcagcctgggatggtaatcacaattgagcccggcatttatattccagaggatgacaaagatgccccagagaagtttcggggtcttggtgtacgaattgaggatgatgtagtggtgactcaggactcacctctcatcctttctgcagactgtcccaaagagatgaatgacattgaacagatatgcagccaggcttcttgaccttcactgcggcccacatgcacctcaggttcaaaatgggtgtcttctggcagccctgcacgtgtgctttctgagtgtctctgtgtgtgcattaatatatgcattccatttgggagcatagcagctgtgtgaatgtatgtaattgtgtgtggggggttttttgttttaagtagttagaagtctgggaaaatgaatttttgaatagtatgttactgcagctttggtaacattaattctatagaattaatgatcagagcaagtttaatttttaaacataaaggtcttggttacacatgtccatgcattccagttaacacatttaaacatatagaaaattcacttcttctttcaagtccttccctttctatacttttgctgagatcaacccaatatcataagaagtttgtgtgatgcctgtatttttagctaattaccaaggtctctgcctatgcaaaaattcatctttcggtgattgtgggcggccaatacataccttctgtaactcctccctacctattctagatcctgcatatctactggagccatatgagccctcaggggcactggtgtcctgcagtcttactagtcagccacagtccaggttccagcaacactagctacctaccaaacaaaacacttctgagcttttcttgccatttggttgcctgggacctggaaagtgtttagattcttgataaagatggaaatggaagagaaagaaaattatatatgtatatactaaagatccagacatcagggctgggcgcacgggttccgcctgtagtcccagcactttgggaggtccaggcaggtggatctcttgagaccaggaggtcaagaccggcctggccggcgtgggtgaaacactgtctctgctgaaaatgcaaaaatgagctgggtgtgatgatacatgcctgtggtcctggctacttggggggctgaggcatgagaattgcttgggcctggggggtggaggttgcagtgagctgagctcatgcgactgcactccagcctgggtgactgagcaagactctgcctcaaaaaaacaaataaataaataaaatcctgacatcctgccatcttttctcttcaatttaaagttgatttcttaatgatgacttcaaaaattaat

SEQ ID NO: 63961 - DNA, 1598 bp, Homo sapiens
  misc_feature (1)...(1598): n = a,t,c or g
agccaggatagggggtgagaaagccaaggtctggagcttgggattggtgggcactttctcacatgctgtcccttatgagtcgcccaagcctccagggacacagactctcagacagggccctgaaggggtcaatgcatccattcctcaaccccaagcagcattttgtgcaaggaaacggatgaaaggcttttttagtccctgaaatcctgagagatcatttcacgttggggtccactaagacctcagacattttactggatttgtccttcctccatcaccttttctccccaagagagctctatgagggggaggagaatagccagcaaatggtgggggggggggggggtcaaacaagttcctgtactctttatccagcacattcacattatttttaaacaaaaaaattttttttaattttttctttgggtttgtacaagaaatttacagtgtgaaaaatatacaagtgaaaacgaggccataaacctgggtgaagggagaggctgcttggtcacaaacacaaataaacaagacatttctgagttcttcctttggtctgacttcagccccctcactccaggagagaggctgcagagctcaaacctgggaaccgagcccaggcccggccctgtcccccaatgtgggcaggcacatccggagcagctggtgccatctggctttctctggctttggggtcggggggaatgtgaagaggagggagccccttcttcttccctgctcccctggctggagtgggctggaagcgcctgtgaacagggttggcagtggcactggcagcggtggggaatgaagtgggtagtaacaacagcctctgggtaacagtgaacacggggacctttgagctgtctgatcttgctcctccaagtcatagggccaccctgagttcttggcagaagcccagaggcctggatcctaggagacaagtggctttggggccctcagcctttggggccatccgtggaccctggggcctaagtggatctgcagctgctgcccctctggcagagctccctacagagctggttgctgagggccctagatctcagtagcagtgatctcctccaggcagatgcagggggcctgctcggccaggcccaggtcagcgagctcccgggcctccagctccaggctgagctgctgcagctcctgctctagctgccggttgcgccggtacatctggatgtagttgtgctgcagctgcttctggtagcggatcacctgctccttctctgcctgccaggccagccgctccccctcaaagctgtcccgctgctcctcaccccgccgccgctcccgctgcagctccacccgcaatcgctccacctgggcccgcaagctgcccccaaccccggntgctgcccgctgcactttggcctcatcactctctgccaggaggaatgggtcagcggtggcaggtggcacagggggctcccggagtccggccgcctcagcatccaactgcccagctttctcccgcagctgctcagcttcctggcggtgtcgctgcagctcctgggaacaggcttccagctccagctcccgagctcgggcggcctcctgtagaccccgcgcacggccct

SEQ ID NO: 63962 - DNA, 2148 bp, Homo sapiens
ggcacgagtgaacctcaaattgatggaaaggtcatgtcatagtgaaggtaaacctgattcactattgcctggtaatgtcagatatagttataaatgaagtcagtttcattgaaagttaaatgaaggttaggaaaaataatgatgcttatttactagacaagaacaaaattaatatggattgtttcattagctgtttctttaaaaagatgttaaccaccctcatgttttcacattcaggtatccttagtctgttggagcatggagaagagtacacattttctctaccctgtgcatatgctcggtcaattttgactgttccttgggtagaactgggtggcaaagtcagtgtcaactgtgcaaaaactggatattcagccagcatcacttttcataccaagccattttatggtggcaaactgcatcgggttacagctgaagtaaagcacaacatcaccaacactgtggtatgcagagtgcaaggggaatggaatagtgttcttgagttcacatatagcaatggagagacaaagtatgtggacttgactaaattggcagtgacgaagaaaagagtgagacctctggagaagcaggatccatttgaatccaggcgattgtggaaaaatgtgacagactcgctgagagaatctgaaattgataaggccacagagcataagcataccctggaagaacgtcagaggactgaagaaaggcatcgtactgaaacaggcacaccttggaaaaccaaatattttattaaagagggagatggctgggtttatcataaaccactttggaaaataattccaacaacacaaccagcagagtgacacatactatctaaaactcgaccaaatgaggttcttctctgtttaccctaaatcctcccagaatggagtcattgcactgagtgacctgcttcctgattgcgcagactgaaactagctaaacctgaatgtacctactagggcaccataatactgcagcaagaccaaagtggtaaagaaacacagtggaccttttaccaacctgttcatgtgatgtgagcaataccatcttaaaacttgttacctgaatcagtagatgaatcttttatccagttcttgctcctaaagttaagtttgaatcccctatttttgcacaggggcagcagatacacacaacaatgagaactcagtgactttgatttctttgtagtgaaaagtgaagtctccgtttcagagtttgtgtctttctttctgtccataactgaagtattcactactcttgtaaaccaaccaagaggaggagaaagatgacccagaagtggattcagccattgtgcctgaaatcagtgtttaaaaaaaaaaatcaaccaggttgtggtaacaaggcattctatttcttcaaaaagactgtatgcctgtgtctgaggaacttacctattatccacctctgttggaactctcttttaaaaagtacatttatagattgatcagaattataaccatggagaattttttcttctgagcattttaatatacttgaaaacaacattgacttgaaaaatttcagaacatttttcagtacctagttttattaaatattacacttgagagacactttttaaaaatgtgttaatgtcaatatgatgagattttagcctttctccagaactaaggcattaaagaaaatagcaaatattaaaaaataaaactgttacttttttccttctttcttttcacctttaggttaatatccagtattatgtgttatccctttggataagtatgctttattttacctctgttaaaaattaaaataaatgattctattcatatttgtcagtaattcaaaacttatatgtgtaactgaacgcgcatgtaaggtatggttttatttatttattttttttttttgggggaaatttaaatgctaaaaaaccaccaaaatgaaagggtatcaggaaaaaaaaatcaggaagttgttttcgggcccaaatctttttttaaaaaaaaatttggtgggggtgaaaaaattgctggcatttaaaaaaaaaaacctaataagggcttccaccatccattcatggtatttattgagcacctacttattatggtgctccaacacttgttactgcaagctaccttaatttcccaagagtggtgcctt

SEQ ID NO: 63963 - DNA, 372 bp, Homo sapiens
attttgtatccagcaaaatcaaacttcatatatgaaggaaagatacagtctttttcagacaaacaaatgttgagagaatttgtcactaccaagccactaaaaggagctctaaatcttcaaacaaatcctggaaacacatcaaaacagaacctctttgaagcataaatctcacaggacctatcaaacaaaaatacaatttaaaaaacacaaaaaaccaaaaaaaatgtatacaggcaacaaatagcatgatgaatggaatagtacctcatatctcaatactaacactgaattaaatggcctaaattctccacttgaaagttacagaattgcagaatggataagatttcacaaactatatgctgccttcaagag

SEQ ID NO: 63964 - DNA, 579 bp, Homo sapiens
gtcaggagtttgagaccagcctgaccaacacggagcgaacctccatctcaaaaaaacacaaaaaatcaaaacaaaaaaacaaaaaaaaaccacaccaaaaccagaaaacacttgatttactgcacagtaaatgcccatacagcatgcatggtttctttaagagtaagactttggttcaaatgtaagctcagctattcaattgctgagtgatcttgggtaagtcatttaattccaagtaagatgagaatgaaaccatttccacctatggagggtgtggttaagagtacaaatggataatgtaaagcaccaagcctaaatagtcgctaaattgtagtttttcttagaattacaaagaaactgaaacacacttacgattgggccatctcccctttccaagtatggctggtggttaatatgaacaattgcaggcaggagatactgtggaggggggaaagaatgacaaccttacgcttagaagtacaatcttacttagatacttagtaattactgaattaatgcataaataggaaagtgaaaaacagaacttaccactgctatatacaggaagcaatacaaatt

SEQ ID NO: 63965 - DNA, 5166 bp, Homo sapiens
ggtggaattcccgctgctcgtcgaggggcggcgagtgcggctgccgcagtcagccggggacctcgtccgagcccacccgcctttggaggaaagagccagacttctcagaggtcagtctgttcaacaagtgggaccccagggccttctgtatgttcagcaaagagagcttgcagtgacctccccaaaggatggctccatctccattctgggttctgatgatgccactacttgtcacattgtggtcctgaggcacacaggtaatggggccacctgcttgacacattgtgacggaaccgacaccaaagctgaggtccccttgatcatgaactccataaaatccttttctgaccacgctcaatgtggaaggctggaagtacaccttgttggaggcttcagtgacgacaggcagttgtcacaaaaactcactcatcaacttcttagtgaatttgacaggcaagaagatgacattcacttagtgacattatgtgtgacagaattaaatgaccgggaagaaaacgaaaaccactttccagtaatatatggcattgctgtcaacattaagactgcagagatttacagagcatcctttcaagatcggggtccggaggagcagcttcgtgctgcgcgaactttagcaggaggaccaatgattagcatttatgatgcagagacagaacaacttcgtataggaccgtactcctggacaccatttccacatgtggatttctggttgcaccaagatgacaagcaaatactagagaatctttccacttcgcctctggctgagccaccccactttgttgaacatattagatctaccttgatgtttttaaaaaaacacccatctccagctaacacactgtttcctggaaataaagccctactctacaaaaaaaatgaagatggcttgtgggaaaagatctcttctccaggaagttaaaaaacatgaattaccaaagaaagcaccttcttggcctgacagaccattggtggggctggcacgaatccagatctggatcctacatctgttgggtcttaggcctccttccctcctcagtgtctttcaaatgatgactttcatcaaatgactttcaaaataaaaccttattttggcaaaggcatttgttgagacttattttttggtttactaaaaaattgatgtccagtttttttttttggtcggtaataacgggcagaggagaacctacctctcactggtctatcggcagctatttcaggtacgtgggtaagtcttttgtaataagatttataaactgaattcactggtaacaatttcaagaccctttattgaacccaccattcaaataatatctcaagggtgaaatgtttcagcaaaaccaatttaacaattccaaatatatataaaaacatgtaattttcttgaaggtgataatttacccctcccccattttatctgctatacttcattgcaccaaatagggaagactgtttaatcatttgcaccaaaaaaaaaccccctgcattttgacaagtgtaaatgtcaaaaatcccatcaaatcagagtataattataggcttaatatactataactaaggcttccaatactacagtccagaaacccagtgtgaattttcccattttcaggtctcccaaaagcttgactgctggattaagaaggcacaggggccattacttacgacaaagtgacgcagtacttcggaaaagtaggaacgggcagtgccagcgagcttctactgacttaagcagggtgcccggctggatcagcgtgagagagtgctctgctggctcctgtttctgagttgggcccaggcgagctgccagggcagtagaagcttcagtgggagacaggtcaaaggggtacttgttttcagattttaaccaggtgggtgctacgtagcacacggaagagcaagctcttaagggtagcatctatcaggttttcagatactaaacagaaatgagcacagtctgtacttgtgtgccaattttaaaagctttgccagtatttaaaaatatatggtcaggaggagactttacagtttctctttacaaacggtatataatgggagaaatggccttgtggcagaggacagtcccagacagcagccttgccacagctcaagtagacacagtccttactaagtctccacgaagagcagtagctggggagggcttctgatgctcttatttacaatcccacaatcactgctctccttcaagtctagcagtcccactgtatattgcaacttgatcgtactaaagaccgacagcaaaggatacagccagtctcgcctctgtgaagtgttgcagagaacctggagagtgctaatgaaaagctgttttaccaaaaagttgccacgggcaacctcatatacttaggcttatgtttagaaagagcaagggtgctactggtagacacttgaaattcgaagtgttttttgtgaataaaatgtgtttatggtaacttagggaaaagtcgtagtaggacagcaaacatgtggttctacatgtacatgaagttagacaagctgactcccctcctagaaagcctacctttcaggcacatatttgtgccaaaatcccagtgaagcacaaacaacagtaatttatattagtatgtggcacagttcacatttccaatagaacttcatcttccctgaaacaatactcagtacagtctcaaaccacacaatgagtctcatcttaagctctccggtccttctacctgtgagtggtcatcttctgggtgtgggacccctttctggaaggcctcggtctggtcggtgtgctgagggctgggagcccctgggtgtccctcagtgctgctggcctcgagggtgatctgctccggcccactggataggcgctccaccttttctaagtcttcaatatgactgactgagctggtctcactcaaagcatctgaacctcgcagggaccttttaaaaggcttctggcctggaagcctctgcttggtgcgactgcccgagggcgttggaggcagcgtgactcctgcaccttgtgctttgtagacatatatgggttctgtggactccagagagcctgctgtcaagttaaaagttcttcccttctgtaaagcctggaccggagaaaaccaattcagcacggagcccactacagggatctgccgcaacaccccctcttccagaagccgttcttcacttgccttctgcagctccacttgagcttcctgaatgcctttccgaaccacttctgtcatgttttccaaaagcctcgagttatcctctatctcccgggctgtggccgcaatggtctccacgagctcagcagcatggacgttgtcgcttgccatgccgacataaaggcagctcttcatgctcttatactcagggcctattttaaaggttaggtcagattccagttcatttaacttcttcaggagtccagcatggatgttttccccttggggatatgatttcaaactgctcttatcatcattagcatgttcatacctgacaacccctattccagaccagttagggtcatcaacatataggagacctgctgttgcttccacttcctgcttgaactcttcacgcaactggagcgtacagcacagcactggcagtttgctttctatgcaggctacgagctgatccacatcctctccccgagttcctaaaactgctgcggtcatcaaagggctgaaccgcaaacacgtgccctcagcttccagatccatgactgtgaggccgcttgcaggcaccagctgcttcagctgttctcccagccagcgattcagcgcgtcacacgagtgcctctcccggccgactcctgaaggtgtcatgttgggcactgggacggctttaaacaccggatctgagcctggtaattcctggaaaaatctgaacaccaccactggggagctgagctcatcttccaccaagattttgatgtaattcactttcttcaaactttcctgcaaccgttgactcagttgacaggcatgcttgatcctctccacaaacccatcaagtcccaagtattgtaaagataaccacagaggcagggcacggagtttgtctgtgggcttatttgatgtaagaccagcaactaaagtcaaggcagggtcatcgtgtttatacagtgtcaccgcaggaacagctggcaaacccagccacgggccaggagtcatcgtcatgctatcacatttggctgcagccagcactgatgaggagacataacccagagccaatgttgccagattcacaccctccacatgaagccatatgccatactgctcacagagttctttcaatctcccaatcttgtctgtgtgtcctactgctgccgttcctgcatttgcgacaagcaacaggggcagtcttcctcgctctatatcatctttaatcagtttctccaggaaggcaacatccatctgatgctgggatccaaacacagtgttacagggtacacggcacaagcaggggaagggcaagccgagctgattacaaaggtattggcccaggccaggtctagcagcagcactaagatatatgacaggcttcttgttatataacacattgaagccatccactacgaagtcttcatatcgagaatgaatggcaagcctacatatctttgcaagtccttctctttcctcttcgtggaaataagcacacccattttcatatctgaaaattctgcatagccataaggtggtatctgaaagtatcctagttgtaagttttctcagcttctctttgtccagagttgaaatataagctcccagactatgtcccaacaaagccatatgaccttgttctccaatattttggattctggggctctggggctcctcatcttcatctccatgcatgagattctgaactaactggaggatgctcaccatatcttgcccactgccctggagtgggcctggaatatctccggatatgagcttctttccattttcctcttctgttcttctctgactgtcctccagcatcttcactgcctccttcaagttttttcccatttcagctaacgtggggtctgctatcttctccagggacgcgtccatggctgaggcggccggtggtggcctggcggtcccgggctctacttcctcctcccgcgccccgcagctccttccacgctggcagcgctgacgtcccccg

SEQ ID NO: 63966 - DNA, 1117 bp, Homo sapiens
atttgagggcaacgtgtttatgtattatggactgtctaatttctatcaaaaccatcgtcgttacgtgaaatctcgagatgatagtcaactaaatggagattctagtgctttgcttaatcccagtaaggaatgtgaaccttatcgaagaaatgaagacaaaccaattgctccttgtggagctattgccaacagcatgtttaatgatacattagaattgtttctcattggcaatgattcttatcctatacctatcgctttgaaaaagaaaggtattgcttggtggacagataaaaatgtgaaattcagaaatccccctggaggagacaacctggaagaacgatttaaaggtacaacaaagcctgtgaactggcttaaaccagtttacatgctggattctgacccagataataatggattcataaatgaggattttattgtttggatgcgtactgcagcattacctacttttcgcaagttgtatcgtcttatagaaaggaaaagtgatttacatccaacattaccagctggccgatactctttgaatgtcacatacaattaccctgtacattattttgatggacgaaaacggatgatcttgagcactatttcatggatgggaggaaaaaatccatttttggggattgcttacatcgctgttggatccatctccttccttctgggagttgtactgctagtaattaatcataaatatagaaacagtagtaatacagctgacattaccatttaattttatattatgaaagcaaatcatctgcatgtgcatcaaggccagtcctattcaacctagctttcgaatgctgatatctggttagtatgtcattttgaagggggcacataacttttctaaaaaaaagcagtctttgttgtttgcttcttccctacggatgacttctaaaaatatatgacgggtataaaaaaattagctatattgatcatatcaacactgtaactgctgaaatggcattctaatgtttgctttttattcggacaggccacatgatgcatagagcctctttcatgtgacttgtgtctactgcttaaatctttatgctgtgttgatgatattatattgacatatgaagctgtaaaaaaaaaa

SEQ ID NO: 63967 - DNA, 370 bp, Homo sapiens
ggaatattatttttaaactacagaaaatcaaagataaagaagaaaaaccttgaaagaatccagaagaaaaatatatatatctttcctagcaaagaacaaaaaattatatctgacttctcccttagtactcatgcaagaaaagagtggagtgacatgtttacagtgttgagagaaatagaacaccaaactagaattctgtaccctgtaaaaatatccttcaaaagtggaagagaaataaaaactttctcaaacaaaaaattgaggaaatttgtcgccagtagacttgccttgcaagaaatgctaaaagaagtctttcagagagaaggaaaataacataggtcagaaacttgaacctatgtaaagaaaagaa

SEQ ID NO: 63968 - DNA, 1980 bp, Homo sapiens
tctagggaatttggccaccctaggcagaaagtggtaataacacagtcagctcttgattgttctaatataatggccaatttgcatattatccacgtctttgaccagttcttctttcttctgtggcttttcttttagtcattacatttacagctcacccaatatagtacagaagggatattcaaattttgcaacttgttggatgaagaaggtccttggggaggagactgaaactactgattgaaaaatcaggtttataaataatttgaacatttcatttctttgtaattgacatatacttctatatataattatgagtttaatgaagtgagataatttaagatgatcacacaataaaactttacagccaaaatacaaagtcttcatcttattttcctacttcattttttttcatgttcttagtaagtgcatttttctactttattttttgaaaagaacattcatttttgaaaagtttatttcaccaaggaccaatcttttgttgatgttcaaatttaaattgttctttcatatctgtctcataggagaaaaacatgaaaaattgcttctgtggtagtttcttctaggttttcaagtactcttatagtagcaactggttcaaaatactgctttgtttcaaagcatacagtttagatgtatcttcactgatgatgggaacattttcattttgttcctgagctgtcaggtcactttcactgtcagatagtgtacacaggagagtgtcattttcataggttggaaaataatactccagttgatcccacgtctttctatcggggagcagcgaagtgtgtttagtttcttccatgtgagttcttaagtctgctttggatttgaacttcacatggcagccataacatctgcattggtgaacttgcctccgaataaaattgaccagtttcacttgctgatagaaatttaatccaagttctgactttattttgagaagatcaaattcgtgtgcatcctccatgtggacatacaacttctcaattgtttctgcttgcttttcacaaaataagcagactgcagaggcagggtgttcttcccaatcagaccagtcatcttcctgatggtccagcaactcccgatcatcttccaactgaacttcttcccacgattttccaagttccaaataattgatgacataaaatctgtcatattctctgttcttaggattaatcttacgatgctgttttttcctcatgtgatctttaagtgtatttttgtccctgaaggtcttctcacagtacaagcactgcaaattgtcaagctttttctgtaatgtacacaaaaattcattgcagtttacaatgttgtctggcaatccaatgttgaaagcatgttctctggccatgtggttcaaaataacagatctgtttccaaggaattcttcattgcaaaacatacaaacgccatgaaaattggtatcatttcgttcttgctgctgttgttccagaatttctctcagtctctgtttctgaagctcttctctaagaattctatcttctggtaaaacgtcacataacaaaaaataattctcttgttcttcaaatggagcagtggaattaattcttattacactacaaaaatctgtgatgggctgttcagtgaaccttttcctccaatataaaatgtacctttggaaatcagcaaccaacttgacatcagctatgacaatcttatgctcaataatcatgtgcttcagaagtttgtcttgttcagccacaggaaaatgttcttcacagaaaatacaaggcacagatggagaaccttctaaagtggtggtgccacctggactttctggcagggaaagcggctccaggatacaatccttactgtccccataacctacacccccgactgtgctgcagctcccatcacggtcttcctgcattcgggcgacagccccctgggtcttggaagcagccattacccggcagaaaagaacggacgcgtggg

SEQ ID NO: 63969 - DNA, 449 bp, Homo sapiens
gcacagaggtgctaggcagcaaaggcattcatgagcttcggagcagcaccagtgccctgcaccatgccctagaggagtcggcttccctcctcaccatgttctggagagcggccctgccaagcacccacatccctgtgctgcctggcaaagtgggagaatcaacagaaagggaacttctggaactgagaaccaaagtatcccaacaggagcagctccttcagagcacaactgagcatctgaagaacgccaaccagcagaaggagagcatggaacagttcattgtcagccagctaaccagaacacatgatgttttaaagaaggcaaggactaacttagaggtaaggaaactactgcaccagtcagaggcaccaagcctgtcccccacccatcaccatccgttagcagatcttgtaggtgactcttggcctgctttgcgcttccaggagaag

SEQ ID NO: 63970 - DNA, 2886 bp, Homo sapiens
gtcttcaatggtgtggagagccaaaacgtttagaaactgaagcttctactgggcaacagctgaactctctgaacttgtcttctccttttgatttgaattttccattgccaggagagaagggccctgcatgccttgtgaaggtttatgaagattgggattgtttcaaagtaaatgacattcttgagctatatggcatactgtctgtggatcctgtgctgagtatactgaataatgatgaaagggatgcctctgcactgctggatccgatggagtgcacagacacagcagaggagcagagagtacacagtcctcctgcttcattagtgccgagaattcatgtgatcttagcccagaagttgcaacacatcaacccattattgcctgcctgccttaacaaagaggagagcaaaacctgtaagtttgtttcaagtttcatgtccgaattgtctccagtcagagcagaacttcttgggttccttactcatgcccttctgggggatagtttggctgctgaataccttatattacatctcatctccacagtatatacaagaagagatgtccttccactaggaaaatttacagttaacttgagtggttgcccacggaatagtaccttcacagaacacttgtatcgaattattcaacatcttgttccagcatcttttcgtctgcagatgactatagagaacatgaaccatttgaaattcattccccacaaagactacacagccaatcgcttggtcagtgggctcctccagctgcccagcaatacttcccttgtaatcgatgagactctcctggaacaggggcagctggataccccaggtgttcataatgtgacagccctgagcaacctcataacgtggcagaaggtggattatgacttcagctaccatcagatggaattcccctgcaatattaacgttttcattacttcggaggggaggtcactcctcccggcagactgccagattcacttacagccccagctaattccaccaaacatggaggagtacatgaacagccttctctcagcggtgctgccttccgtgctgaacaaattccgcatttatctaactcttttgagattcttggaatatagcatatctgatgaaataaccaaggcagttgaagatgactttgtggaaatgcggaagaacgaccctcagagcatcactgctgatgatcttcaccagctgctcgtggtggctcggtgtctgtctctcagtgctggtcagacaacgctgtcaagagaacgatggctgagagcaaagcagctagagtctttaagaagaacgaggcttcagcagcaaaaatgtgtgaatggaaatgaactttaaagatgtaatacctatgaagagtaatgggcaaactgtagccacataattgtaaaattcagatattcatttataccacattgttttataggtaatttctatcacaaaccagtgacatttcctgaaatcaagcctggtaacacctgatgtttatatgatattcagtaaggacttttaccttactgatttcatggagcttttgaagtttgttttataataattatataaattagtaatgatgtaaaaaaagtatttgatattaaaagtttaatattgataatgttgctgattgtaccatttccttagcttcagctgagtcataggccagactgttgaaatgctgaaatgaagaaggttgttgcagtttcaaagtcagaggaatcgtgcttcggatttcttatgttttctagttctctgtttttccagttcacagtgggttggggtgcattcagtagtccatctttggggaacggaggcgtacttgccattgattcacatgactacatgaaattctgtactgtcatttcccagatgtttggccacagaaactttttcccacttaacatttgttaacagcctgcaaaactaaacttgtacatggcagtggttcccagacttttgtattttatggaccggtagtaatatttccaaaaatctggggtactataaggttgccaatttaccttgccaagtaatccgaataaatcactgtattatcaccatttttttcataaaaggaaaggacaatctatctctgaataagaggagtcctttaaacggaatgaatgtggcttttgggggcaaaagaaaccaagacactacattgtctttattttctcctatcccagtgcatttgagaaccatgcataagggaatgctgtgctacaaagctgtgcccaaatatgaaaacaaaataggaaacttaaaaagcaataccccctttagaaagtttttattttcttaaatgtcattgagttgctttgattctattggatttttggcattttttatgggatcatcagttggttccaagtatgttagatcagctaacatctgctactccagtaacagcctcatacaactgcaggtaggttttctccagaccaattagttttaatagagcaaactaacaacagactgtagtagcatggttatggcaaccagaatcttcagaaaggttaggacattactttttaagctgtcagtggtatcaaataacttacctagttggaggcagataaaggatcccttacgttttttcctataaggcctaaattgaaattgttaaccaaggaaacagggtcagccttgaaaaatcaaggaattcattgtacctaataactgaagtaaaaataactagttgttcaacttttcctaaactcaaatctatttttataaacaaatgtaaataatgtttatattagagttgaactggttttcatttttataactggtagactagaccttccttaaacttttagaaataaaatgaaggcttcactggatttgtgaggataaaatacattttctttaattgtcctagagc

SEQ ID NO: 63971 - DNA, 6583 bp, Homo sapiens
cgacctgctgttgcggctgctgcaggcgccggagttggagacgcgtgtgcaggccgcgcgcctgctggagcagatcctggtggctgagaaccgagaccgcgtggcgcgcattgggctgggcgtgatcctgaacctggcgaaggaacgcgaacccgtagagctggcgcggagcgtggcaggcatcttggagcacatgttcaagcattcggaggagacatgccagaggctggtggcggccggcggcctggacgcggtgctgtattggtgccgccgcacggaccccgcgctgctgcgccactgcgcgctggcgctgggcaactgcgcgctgcacgggggccaggcggtgcagcgacgcatggtagagaagcgcgcagccgagtggctcttcccgctcgccttctccaaggaggacgagctgcttcggctgcacgcctgcctcgcagtagcggtgttggcgactaacaaggaggtggagcgcgaggtggagcgctcgggcacgctggcgctcgtggagccgcttgtggcctcgctggaccctggccgcttcgcccgctgtctggtggacgccagcgacacaagccagggccgcgggcccgacgacctgcagcgcctcgtgccgttgctcgactctaaccgcttggaggcgcagtgcatcggggctttctacctctgcgccgaggctgccatcaagagcctgcaaggcaagaccaaggtgttcagcgacatcggcgccatccagagcctgaaacgcctggtttcctactctaccaatggcactaagtcggcgctggccaagcgcgcgctgcgcctgctgggcgaggaggtgccacggcccatcctgccctccgtgcccagctggaaggaggccgaggttcagacgtggctgcagcagatcggtttctccaagtactgcgagagcttccgggagcagcaggtggatggcgacctgcttctgcggctcacggaggaggaactccagaccgacctgggcatgaaatcgggcatcacccgcaagaggttctttagggagctcacggagctcaagaccttcgccaactattctacgtgcgaccgcagcaacctggcggactggctgggcagcctggacccgcgcttccgtcagtacacctacggcctggtcagctgcggcctggaccgctccctgctgcaccgcgtgtctgagcagcagctgctggaagactgcggcatccacctgggcgtgcaccgcgcccgcatcctcacggcggccagagaaatgctacactccccgctgccctgtactggtggcaaacccagtggggacactccagatgtcttcatcagctaccgccggaactcaggttcccagctggccagtctcctgaaggtgcacctgcagctgcatggcttcagtgtcttcattgatgtggagaagctggaagcaggcaagttcgaggacaaactcatccagagtgtcatgggtgcccgcaactttgtgttggtgctatcacctggagcactggacaagtgcatgcaagaccatgactgcaaggattgggtgcataaggagattgtgactgctttaagctgcggcaagaacattgtgcccatcattgatggcttcgagtggcctgagccccaggtcctgcctgaggacatgcaggctgtgcttactttcaacggtatcaagtggtcccacgaataccaggaggccaccattgagaagatcatccgcttcctgcagggccgctcctcccgggactcatctgcaggctctgacaccagtttggagggtgctgcacccatgggtccaacctaaccagtccccagttccccagccctgctgtgacttccatttccatcgtcctttctgaaggaacagctcctgaaaccagtctccctgggctgagacaacctgggctcttcttaggaaatggctctccctccccctgtcccccaccctcatggcccacctccaacccactttcctcagtatctggagagggaagggaagtcaggcttgggcacgggaggttagaactcccccaggccctgccattgggttgtctgtctccgtcatggggagggtccctgctcagttctggagacactggagttggggtgggggtggttctgcattcccttctcctgctgatagcagtcagcttgaggaggatgaaggaaggcagcctcagacaggaattaaggcaatgcccaggcgggcctgggcactgtattctgagcaagggcctgggcccaggagccagccagggatgagtgccatcatggctctccactcagactgtgcctggcccctgcacttacaacttcctgccgctctgtggccttgccctgtaatcactcagtgcccttagctagcctgactaagtcccagatcccctacagcttccttcggtgtggtatcttttgccacatccagggcgagggttgaggcaaaccagccctccctctgacttccttgtcactgcagccagctttgctgcacttgctggtgcacaggagcctcctgtttgggcctgggtctgggcatggggaggccgtgcctcaaagcccaccctaccccatgccttggagctgtgcctcaggctccttcctggtctggcccagctggcttccccagcccctcagccatccagggctacccactgcttactcagggaccaggcagcccccatggcagtaaaagcagcctagacagaacctgcagctctgtggaaagaggcaaagtcctgaaaaggcaaagggttgtcacttagggcagcttctccaactttaacatgcatccaagtcacctgggaatgttgttaaaatcaggagatctggggtggggcctaggactctgcatttcttacagattcccaggtgagctgatgctggtggttaagggtagcaaatctctaaagcacgaagccctcacaaatctttgccatttcccaaacactccgctccatggtctccagtcatcagagcaactctacctggtattatcatccccattttacagataatgacactgaggctcagaaaggttgaggataagcccactttcctgtcattagtggcagccccagatccagacctaggcctcctggcacccagtccactggcagtggaattgctttcctgagaatcattctgaggctgggctattgcttctcccttgcttcaaagaatctagcagcgggggataggattttgcaacaaaaagctgacccagaggccatacagagcaggaatatcccattgccccctcctccactgggttcagagggtaagaaagcaccctccaataaacccaggctccaggccgtgggggctgctgaaggctctttccccgcaagggccaggtgttgacaccttaaagctggctgcgcccccagccccactcttggctgtgctggccaggtgactcctagttcttggccacatcatcagaaagtcaaaggtctcactccaggtttggggctccttccttccactcccctccctgccagagtctgtcttggccagtgccagcctcgatgctttggttttgaccccacctgatcctcctttcctcatgcagcacaagtgctcaccggggccagagccagggcatggatatgacaagcagggcagcctggacactgccctcacaggacagcgccaataacaatacagtgtctgagtatctccaggggatgatttctggctctttgtctccaatcagtcccactccctcctgaggtccccaagggcagtattcagagaggtttcctgcgttttatttctatttggtataccctccactgttgtccactgccctgtgtggccttctggttgacctctgcccgatcttctgtctctctgagggaatcagagtccagcatccagccccagctggaacagctgaagtcacaagcctcctctaagccaaggccagtgtgttcagaggtgactgccacccatactaggacaaacacagctcagatcaccaggtcaagcacctaggcctggcttctcctgagacagaggactcagaagtggcctttcctccaaagcctgctcagacacaggtctgtagggccagggtgttctgcttggctgggctgcagctgctacccctcggttggggctgagtcagccagatcctccccctacttctccccaagggccaagaactgctcagggacattaaaggtcaaaagtccagccacactcattcatcctttccccaggcccatgaagagaggcatctcattgtagaatgtatgaggaagtgggaagtatctcagagaatcagctaagtttcctaacttgtccatccaaatgtgatcaccacgattcaacaatttggggcattgctgatctagccgttcctagtggggcttgctcaaggttgcacagcgagtcagtagaagccctggctggccccacttggtaccaatccaccaggcagctcagggctcctgcccagcccagcagcttctgttgtctaacgtatggcaggcagactgggagcaggaaaacagagggccccaaagcccaaggcaccagaaggtttgtttcagtttgctgaagctgatttgtaatgattggcactcttcagccaggggagtgggtaggccatagccaaggatcgattccccaaccacagcaaaggcaacactcttcctccagagatcaccaagcccctcttacctccctccctccttcccaaggctggcactaaccaggtaccacattcattgttaaggaatggctgatgactgctacacgtgttgggaacctggttggggctgtgcagtttgggctggaaggagagatgccagccctcgtgctgcctctggtccctgaagtgtcacctctctcaggacctctcctctggcctgtggggttataagtgatggatagcagaaagggagaactgactcctgtcccaaatagctcctctgccacctgtcctgcagtggggcctgtgtggggttatggattctagatcctagacagaggctggggtcagctgtggatggggtggtgccttggtctctcttgactacctcgtccaaagagagcactgcccttagacaagagttgcttgtcctgctgtgggctgggcttccagctgcagacctccagttgcttggtgttcactttgctcctcttgccctctgtcttctggtccaggcagatcaggggctctggggaaactgctggaactcgaggtgaggatcagccttttccagcatcctgtgagagaccagagagagagtttggatttcatgtggggaaccctcaaggcctgtctggagaagtgacacaggatttactggggtgggctggtccaggtagctctcctgaacctcctccttccccaagctgagaagctgagagctggaggacaatatccagggacatggctctggaaaataactttttttttttttaaaaaacagggtcttgctctgttgtccaggctggagggcagtgacataatcatagctcactgtacccttgaactcctgggctcaagtgatcctcctgcctcagcctccttagtagctgggactaccagtgcataccaccatgcctgggtgattttttaaattttttatacagacaaggtcttgctatgttgcccaggctgatcttgaattcccgggctcaagtggtcctcctgcctcagcctcccacaggatcgggattacaggcaagagcctccacgcccggccatgaaatataattcttaatatcatacaggaaaaagtcagcgggtcaagctagcctgtggcccagccacaactagctgacaaagcttcctggccttccctttaacacagttctgctgccatagttccatctataaaatgggaatggagggaaataggggaactgggagagagaacacagccttgccaagcagcaatgttagcctgatccttcctccacctagctcgccatctcgcccttggaaaatggctcctggaggattaggcagccatctgcaaggagaggggcaacctgggacaagacacccagagggtaaggattccaggaatgaagctgccatttctggttgggaggagaagaggaaacttttaagagaaagggctccattatgagcatgggttcagggccctgcattacccaatcagaacagccgggatgagcaggaggccagctcccaggaggaaggggaaccccttcataaagttcaaagtggctgggtagagtgagttgaaaatgccggaggccgtcagcatggccaggctattcacacaggccacagcagaaaagagagcacctgtgaagaaataaataccatactctggagtccgaaagggccatattccaactctggcaccaccacctcacacgctgtgtgaccggcgagtagtcacttaacctatgtctccccttcctcaccagtaaatcctgctacatcatgtactgtgacaaggattcagtaaggtcatatgtggacagtagctggcacagaggggctactaaacaaatggctgctattaaatccacattaaaagtacatgtgatctgacagaacccagcacataaaagaaaaaaaaaagtacatgtgatattgtct

SEQ ID NO: 63972 - DNA, 927 bp, Homo sapiens
ttagatgaccgttgcatccacaatattccgggcttctgggtcaccgccttcctgaaccacccgcagctctcagccatgatcagccctcgagatgaagacatgctctgctacctgatgaatttggaggtgagggagctcaggcactctatgacaggttgcaaattcaagttccgcttttggagcaacccctacttccagaacaaggtgatagtgaaggagtatgaatgcagagcctcaggccgagtggtgtctattgcgactcgcatccgatggcactggggccaggaacccccggccctcgtacacaggaaccgggacactgtccgaagcttcttcagctggttttcacagcacagcctcccagaggccgacagggttgcccagattattaaagatgacctgtggcccaaccccctgcagtactacctgctgggggataggccctgcagagccaggggaggcctcgcaaggtggcccacggagaccccttctaggccctacgggttccagtctggctaagtgctgccttgggatgtgcggcctacataagcttcctcatgcctcctacgggtggcggatctgggctcaggcccatggtgggcgctctgttgtctgctgtctgctgtctgctgtctgctgtctgttctgtgcactcccgctctgcgtggttcggtggactcagctctcaaattgtggccctcgtggccagtctctactgtttccatatggcctcttgctgttctgtgttaacatcacgtggctgtcacatgccgctgcgtctacactaagcacccagtgctgtggatgtgcactgccataatctttacggcatggacctgtgaccgtggccatcccagccatttttgacaagggtacccacaagtcactacttggaggacagtgcctctttgaggcctatgcttcaag

SEQ ID NO: 63973 - DNA, 5564 bp, Homo sapiens
ggccgcggggcccccaggcctggaggccgaggggcgggcgccggagagcgcgggccccgggcccgggggtgacgccgcggagacccccggcctgcccccggcccacagcgggaccctcatgatggctttccgggacgtcacggtgcagatcgccaaccagaacatatccgtctcctcctccacggctctgtcggtggccaactgcctgggcgctcagacggtccaggcccccgcagagcccgcggcgggcaaggccgagcagggcgagacctctgggcgggaggccccggaagcccccgctgtgggccgggaggacgcgtcagccgaggactcatgcgcagaggctggggctagtggggcggcggatggggccacagcccccaaaacagaggaggaagaggaggaggaggagacggcggaggtggggagaggggccgaggccgaggcaggcgacttggagcagctgaacagaaccagcacgtccaccaagtccgccaagtcaggctcggaggcgtcggcctccgcctccaaggacgccctgcaggccatgatcctgagcctgccgcgctaccactgcgagaacccagccagctgcaagtcgcccacgctctccaccgacaccctgcgcaagcggctctaccgcatcggcctcaacctcttcaacataaaccccgacaagggcatccagttcctgatctcacgcggcttcatcccggacacccccatcggtgtggcccatttcctcctccagcgaaagggcctcagccgccagatgattggagagttcctgggcaacagcaagaagcagttcaaccgcgacgtgctggactgcgtggtggacgagatggacttctccagcatggagctggacgaggccctgcgcaagttccaggcacacatccgtgtgcagggggaggctcagaaggtggagcggctcattgaggccttcagccagcgctactgcatgtgcaaccccgaagtggttcagcagttccacaaccccgacactatcttcatcctcgccttcgccatcatcctcctcaacaccgacatgtacagccccaacatcaagcctgaccggaagatgatgctggaggacttcatccgaaaccttcgaggtgtggacgatggcgctgacatccccagggagctggtggtaggcatctatgagaggatacagcagaaggagctcaagtccaatgaggaccacgtcacgtacgtcaccaaggtggagaagtccattgtgggcatgaagacagtgctgtccgtgccccaccgccgcctggtgtgctgcagccggctcttcgaggtgacggatgtgaacaagctgcagaagcaggcagcgcatcagagggaggtgttcctcttcaatgacctgctggtgattctcaaactttgcccgaagaagaagagctcctccacgtacaccttctgcaagtcagttggcctgctgggcatgcagttccagctctttgagaacgagtattactctcatggcatcacactggtgaccccgctctcgggctccgagaagaagcaggtgctgcatttctgtgccctgggctcggacgagatgcagaagttcgtggaggacctgaaggagtccattgctgaggtgacggagctggagcagatccgaatagagtgggagctggagaagcagcagggaacaaagacactctccttcaagccctgcggagcccagggggacccacagtcaaagcaaggatcgccgacagccaaaagggaagccgcgctcagggagaggccggcggagagcacggtggaggtgtcaattcacaacaggcttcaaacgtcccagcacaactccgggctgggggccgagaggggagcgccggtgccgccgccagacctgcagcctagccccccgagacagcagaccccaccactgccgccgccgccacccacgcccccgggcaccctggtgcagtgccagcaaattgtcaaggtcattgtcctggacaagccctgcctggcccgcatggagcccctgctgagccaggctctctcctgctacacctcgtcgtcctctgactcctgcggctccacacccctgggcggccccggctctccggtcaaggtcacccaccagcctccgctgcccccgcccccacccccctacaaccaccctcaccagttctgtcccccaggctccctgctgcacgggcaccgctactccagtggctcaaggagcctggtgtagactctgccccaccaccctgctgtcctgggagggctggccactggggggcctgggctgcccctccactgctccccataccctggcacgatgcgttcctggtcactgatcaccatcattttgggaagagaatcccaatccctggcacctgggtttgcctcatccaaccatccttccctttctcagctgcaccccctctgcagatctgaagacacacctcactctcccagggccctacacagccagacccggcgaggcctcctcttcccctggccaccactttcccccattggaccatggactgaagaaaacgagctgagggtctaacgagcttgcaggctttgagtctgttagtgcccggggcctcgggccttgggcagcagcatgaggctgggccggccggcagtggagcactagacagagtggctggctcgcagcccagaactagtgcctctgtagctgcactgaggggaggagggttggtcccacccctggagggacaggtgggaggagtgaggagggggctttttctgccacccccgcccccaagcctgaaactctcaggagtctacttcttggtccccagggacattggctgtcctgaccatgtccttccccctcctcccagggcctctgcttcctcaggagctgcccagactccagaaaagcctggaaaaagggaggcgggaaggggagcactttcggctttctataggtcagtccagcagggccatgggatcgcgaggtcatgtatctgcaaaatgcacctttttaaagagtgtcttagttccccagccccagctaatacccggccaatgccgtgtacgcacaggcatgtgcacgcaaacacgcatgagaaccaggccattccttccgctgtggaagcagaactggagacggggcaggaatgtgcccagcagagatggggctcagcccgaggcagggctccctcctgcatgaggctcggcccgaggcagggctccctcctgcatgagtctgtggcctccaggagggacttgggtgcagatgtaagcaagaaaaaccggggctccagaggcatgtgcatttcccctgcgcccctcagcctttaaatattccctcctcctagaagggtctagaccccccccttccagcaggggtgcccaagagtccctggaccctcaaaattgcaaaggagacccaagcggggctcgctgacctcccagggcccagcaagatgggatagccagccttaggtggccccacgagcccaagcctggggaagggcccctccccagccagacgagaggcagccaccccagagaccacaggagccgtaccatggcctgcgcagtcaggccctatcaggatgtgtctgtcccaagcctggccaggctccagtcctgtgccagtagctcactgctgtcctatgtgcaggtcccccaacacttggagcctgtggttaaggcctcctgggagaggcagtgagcatgagtcaaaggtgacatggacttgaatctccccaccccgccccgcctgcagtagccgggccaggtaggaggcaaggatcattccctgctcccagaggttccagatgacctagtttcgttttgtgtgtgtgtgtgtgtggtcacccagacgtcactgtgatatcacctagtgaatctatttctggccctgtcttcgtcggcccagtttctgtaacttgcagccaatttgccctctcccctgtggctgccagcccacctgcccctctgtgtccttgctgccctggccctcctctgttttctgtaacagatgctccagtcattgcctttcagagtggagcagatgacagatggggtgcacgcattcagacacctctgatgcccttagccagggcagggatcgtccttaaagtgaaggcctggacaggaggagtcagggacttgggaggaggtggagctgtggggatgggagtggaggaatcaaaatgagggaagctgaaaatagaatgaaaacgatgactaagaggcagggagtgcgaggtatgggggaataggaactatgagctaaatatacttatggggtgggggccgtgggggccagggacactctcccagacagccctgacccgccaggcaggaccccgtcccctgctcacacagctcttcaagcttaccaaggacaggcaggaccccgtcccctgctcacacagctcttcaagcttaccaagtgccctcaacaggggagagcaaccccaggccctccctcccacctcagctgaagccccaatcttccaaatcggaaccagcaagtcttagggctggcacgcatctgggcctctagctgagaacccggactctcaggcacctcagtgcccctgccccagggcagaggcccaccccgtgggttggtgcagtggctgccctgggctccacgggcagcacagggagtctgtccaggaagcagcccagccggggtcagtattccgtggagccagtcctgagctgggaggggcatttaacacccctgagggcctggggcaggacacagctggccctccttcattgttcaggggaagcaagtgcccaacatctgtgaacctccctttccctgctcagtccccagggccaaggttgggacccctctccatccctgtccccagagcctagacctcagggacctaggaaaagcctcttgctccctccccacggcagcagacagggcagggcctccagcccccagagggccggtggggggtgctctcgggccttcctgctctcctaaggttgcggggacagtagagtgctgagccccagacccagtcaccccaagatggccccactctatccactctctagacctttgggaaatctgggtccctctcctgatttgatccattcggccccaactccagagtcgggaatgggagatgaaactaggtttccacccacttttggacaagtcccacccctagatctgaagcaagctctaccagcagcgtgtcctggaagcatgcctgcatgctgcctgcctgcctgcccgtctgcacaggtgtcttgatccagccctgcgtcttcgagcccctgtgccaccggtccccacggcccgccaggagtctctttgtacccactaggcttccctgatgaccatctgtctgtccgtccctgtttttgctgtacataactcctgctgcaccctctccccgcacacccgtcacccatgagagagagaaacctctctagggaaaggcagggtggctgcacccagcaactaatccaaatggcaaatattttgtaacaaaatagcccagaggtattttatctgttcaattcatagagttttagagattatattgaaagatgtcacttgaaaaaaaaaa

SEQ ID NO: 63974 - DNA, 1485 bp, Homo sapiens
aactgcggacctgctacgccagcttggcacgagggaataactctcatgagatctgatggcttttataaaggggcattcccctgcacacaccctctcttgcctcctgccatacgagatgtgtcttgctcctccctgtcttccaccatgattgtgagtgaggcctccccagccacatggaactgtgtcaattggacctctttcctttgtaaattgcccagtcttgggtatgtctttattagcagtgtgagaacagactaatacaagtagataggtatcttttaacttgtttccagtgactcttgctttactttcaggtggatgatgacagaatggaccccttgttcacgaacttgtggaaaaggaatgcagagcagacaagtggcctgtacccaacaactgagcaatggaacactgattagagcccgagagagggactgcattgggcccaagcccgcctctgcccagcgctgtgagggccaggactgcatgaccgtgtgggaggcgggagtgtggtctgagtgttcagtcaagtgtggcaaaggcatacgtcatcggaccgttagatgtaccaacccaagaaagaagtgtgtcctctctaccagacccagggaggctgaagactgtgaggattattcaaaatgctatgtgtggcgaatgggtgactggtctaagtgctcaattacctgtggcaaaggaatgcagtcccgtgtaatccaatgcatgcataagatcacaggaagacatggaaatgaatgtttttcctcagaaaaacctgcagcatacaggccatgccatcttcaaccctgcaatgagaaaattaatgtaaataccataacatcacccagactggctgctctgactttcaagtgcctgggagatcagtggccagtgtactgccgagtgatacgtgaaaagaacctatgtcaggacatgcggtggtatcagcgctgctgtgaaacatgcagggacttctatgcccaaaagctgcagcagaagagttgacctctagcaggctggctggatcacagctctttgcaattacattatttataaacacacacactagcatgtttttcagaccaaatattatcagattacatataatttaatcaaattaatttatttttttgcctgccaaacatccaatgtggtgcttgttttggttacacaaacattttgatttatactatatggcttcataaataattttatatgaatgaattagttggatccagtaatataataaaaagaaaaaggaaaaaaatagatcattatacttaaaacaaggtttcgttgtttgttagggctatctctaaggtgctactctctccccaccaataacattgaattatccagaatgtatactgacttagcataatagtttaggtgtatatgaagagaaactatttttgttttttggtgtcctgctgcagaattagcccattttctgtcacctgcaggagatgtgtaaacataatgaacctg

SEQ ID NO: 63975 - DNA, 1586 bp, Homo sapiens
tttttttttttaagggtcttaccatttgctttattttttctttttcatttttcccaggtcaatgaggcagcaacattaacaaaaagtgagacatactttttttcttgcaagataattcaataattcttcccaaactgatgctccacagataatcctaagaggttttcattacatttagcctaatctggaagatctggcattctacatatcaaaaataactcccaggctgatatgaggccaacccatgagcactcaattccacacaggggcaatacctcaagcagagagagggcttcaggccaccccacttctggctctttccagtcctagcaggtaaaagaggagatccaggctaaattttctggcccttcaggaaggctggcacctctggctctccctacctggggaacctccagggctactggatcagcagggactttgggggttgtttatggacccagaatttgtgcaagaagctccatgcttgctgcccaacaaactcctgaatgatctcagcctctctctccttttctgaacacactcctttgttgaaaaaggagactaaacagattcaagaggctcactgatgtgcacttggcaatgacgctattgtcaaaagaacacagaatttatttgtagcagcttgcaatgtcccagggccagagagggtggattctcttaggacgcctgggagcatctcaaatggtaacatttgggacagcccagctggggaaatgctgcaattttagctgtgcaaattgcaaatgcacgtggaacccttgctgccacgcaaacaggggaagcaccagaatccttttctatgcagccagaggctctgaacggacaggctcccctccttctccttctctctctgattcccaggttggcttgctgagttctctcactcccatcagcttttctctgctgctctgtccaagttatttggataaatgggaacaaagaaaagaaaacagcctcagcctccagccttcccttttgggacctgcctcacaatgcaccctctcttccaggcacttcttgaattacagaggaaacaacagtgagtgagtccactatggagctactaccaggttggtttaatttgcatgggtcccagacgagtctcaagggcccaggagggtcacccacgctgtcgtctcttccgcccccgcagcttcagccgcctggctggcaggctgacgggctgcttcccaaacttctccatgatctctcggatcctggccatgttggttttgctaagtgtgaagtcacaccttgtggcccccatgtcatagccaaccatacagttcttggtggatgcagtgaaaccttcggcctttgctgtgaccacatactctccagggttcaggaggcgccagtaatccccatcgttggctgttcggatgtcatggttaatgccttctacggagataatggcgtttgggattccttttccatgtgaatctctcaccaagcctttaatgccacgatgaacctgctccatgaacacgatcagagattcccggttattctcccactcctcgggcagctggctctcatgtgggtatttatcacagcccacgtcc

SEQ ID NO: 63976 - DNA, 1887 bp, Homo sapiens
ttttttttttttaaagtcagatgagtgtttattgtttgccaggctttttgcatacattagtccatttaattctcagaaacgaccttcatatgaaacaggtactgattttattcctattttataatgagagaaccgagttactgagaggttaaacatctcacagttcttatccactatgttatgctgactcttataaaatgattgtggaaggtgtgttaatacatttcaactggaaaaaaaaggtcagatcccccgaaaatgttgttaggagttgggttaactgctttggaaaaacaatggaaatatttaaattccagttgtactgaaataccttttaacatccagcaggtggcagcactaagtaacaattccatactaggtcatctaacagaaacattaatccattctgcacaaatcaagacttctgtacactccatgccttgatgatttcttcagcagcatccagtgtgctgtcttttttaatgaagcaaaaacgcacaaacttctcaaactgtgatttagtctctgagttacagaatgctgaaacggggatggctgatagtttcttatgtttagtcatccatttcacaaacttatagtcataaggctcattattcttcatatcagagaggtctggatctagcaaagacacatcagcgatgatgaagtatcctccatcaggaactatgggttttaggccaacactttcaagtaaacgtaccatccgatctctttttacttctaactcttttggcaaagaattaaagtaacattctgggtcatccatgcgcttgatgtcaatccagaaagcttgagccaaggcttcctgtaaaggagttgcacaagtataaatcgtgttttgttgaactgtctgtaaatgttttatcaaatgatttggaccaatggaccagccaagcttccagccagttacactgaaagtctttccagcacttcctattgttattgttctctcccacatacctggaaaagtagctatttttaagtgcttatttccagaatatacaagccattcataaacctcatcgctgatgcagagtgtgtcatatttgatgcaaaggtcagcaattacttgcagttcctctctgttatacaccttgccaagtgggttatgtggagtatttagtataatagctttggttttggaattaaatttactttccagttcttgaggatctaatgtccagtcagaactagaccatctttttccataaacaggtttagatctcaggggaataaaaacaggtgttgctccagccattctcaccatgggctcatagcagtcatagaaaggcactattagtatgacttcatctccctcatcaattaatgcttgaatggtgttaaaaagagatccatatgctcctactgtcacaaggatttctttatttgaatcaatttgcttttgataaagcttttcatacagataggacagagctttcacaagtgatggatggccaaagcctcgtgtatactgattcaggctatcgattgctgcaatctttgataattcttcttttacatatgtaggaggggatatatctggaaagccttggccaagattcacaacagaagggtctgcagccaatttggtaaattcaatccacacattactatcaagtccttcaatccgttttgcatttgtgaatttcagtgacattttctatccggtgcgggaacctcgcctccctaggctcgagtcccgactgggcttgagggcccggctgggcgggattcggacgcggggggcggagccgggacagggattgactctggggtttgcactcagtgcgcgctttggcggaggggtaggccaggatctctaggctggaagagactggatgaggggtgtttttttgggagggcagg

SEQ ID NO: 63977 - DNA, 1621 bp, Homo sapiens
tttcgtatgatgtgctgtcagggaaccaggaaaaggcaatcgccaccttaaagaggatagcaactgaaaacggagctcccatgccgctggggaaactcatcatctccagacaggaagaccgaggcaaaatgagggaccttttcacaccccattttagatggacaactttgctgctgtggtttatatggttttccaatgcattctcttactacgggttagttctactcaccacagaactcttccaggcaggagatgtctgcggcatctccagtcggaagaaggctgtagaggcaaaatgcagcctggcctgcgagtacctgagtgaggaggattacatggacttgctgtggaccaccctctctgagtttccaggtgtccttgtgactctgtggattattgaccgcctggggcgcaagaagaccatggccctgtgctttgtcatcttctccttctgcagcctcctgctgtttatctgtgttggaagaaatgtgctcactctgttactcttcattgcaagagcgtttatttctggaggctttcaagcggcatatgtttacacacctgaggtctaccccacggcaacgcgggccctcggcctgggcacctgcagcggcatggcaagagtgggtgctctcatcactccgttcatcgcccaggtgatgctggaatcctctgtgtacctgactctggcagtttacagtggctgctgcctcctggctgccctggcctcctgctttttgcccattgagaccaaaggccgaggactgcaggagtccagccaccgggagtggggccaggagatggtcggccgaggaatgcacggtgcaggtgttaccaggtcgaactctggctctcaggaatagtgaccgatgggggactgagctggtctttgaggctgcagagcttggggggctggcaggccccaactggggcactgattgtcactgccgacatcaagaactcacccaagagtatgacctggaccaacagggttttgtgtcttgactcagtttgctcatcttcattgaggtccacccagggatggggagatgtttgctctagggggttctctgtatatgtggtgaaagctttgttcataacctgtggatctacatgggaagactacccatattaggagggtctggtaatgccagcaaccaatcagacaccacccagagtcacccggccaaaccctcagtgaacaaccaaaatatctctctgtagataccgtccaggctcaggcccatgtgacacctgctgtccacccaccggacctgttcagtaggtttctcccacacccacagccccaggctttcttctttgaaattgcaggcgatctaggtgtggtctgagcagctatttcctggcaggggccccccggtttgcctccctagagcctgaccagtggattctctggcagatggacatggtgcattcaaactggagccacatgcccccacccagccccctctggagttgccgttgttggcaccaagagatccagatgtgtccctggggacagctggtcttgcaccaggtgacaacctcagaacgccgttaccccctgggaactgaggactgaggccaaagtgaatcaagctgaagtcagagcacgggcctc

SEQ ID NO: 63978 - DNA, 411 bp, Homo sapiens
aaaaaaagtgtttattcatcaagtctttaaagatacaaaaacacgtgtcccagtaagagatctgaaaccagccatagtgaaagtctatgattactacgagaccgctgactttgcaattgctgaaaacaatgctccttgcagcaaagatcttgtttatgcttgaagaccacaaggctgaaaagtgctttgctggagtcctgttctcagagctccacagaagacacgtgcttttgtatctttaaagacttgatgaataaacacttatttctggtcggggtcctaaaaaaataattggtgggaaacctaaaaaactgggctttgggaatttttttaaatttaaactttcccccaaatcaaaaaaggccccggggcttggggcccccttctccaagaaatggattaacgggggga

SEQ ID NO: 63979 - DNA, 1473 bp, Homo sapiens
ttttttttttttgaagcggaggcattactttattcaggcagggactagccaggcagggccacagcgtggcagggatggggggagtcagcacatgggagtgccgtcacctccattagccacaggccagacggcccaggagggcgtgctactgcagtgagatggtgcactactgcagtgaggtggcgcagggctggtgagcttgggcacaaaagccagcatgtcaccctccctttggagaagcctctgggccacaggccttttccagctgacgggatgcggagggaaggggacctagtactatcgggattcagctgacttagcctatgagatggagcaggcaagagattccctttgcagggtgggaggttatattcctacagcctccattcttggagtaggctcctttgccacaccccttttcaccttagcgggccaggcctctcagccagaaaccatatgtcaagagatcgtaagttaagagtgctgctcctgagcagggagcgggcttggaggcgtccttcccctccccgcacccctaagtccccagtgccgggcagatggtcttttcctagtcctcccctgaggaccaggactctctatctccttccctctgagtgaacttcaggaactgaccctggcccaggtgaacaggagcccctgcccaagaggtcttcagagcactcccctcctcctcctgaaaggggctccctcggtctccctcagagactagcggcattccttgccccacttcctcagactgctccagcccgttcatcactcccccattcacatgctgtgacttcccctccaagttgggaccctggccattaacaccaatgatgtctgcccctgggcctgcatcctccatcccactggggatctctagagggccagggactttgtcctccctctccaaggaaacagggtcagactcttcctctgagccagaaggctcagcactgtcctgggactccgtttccagggcagtcttgggggcaccagccactgcacccctcaagctgtcatcccaggggacactgacactcacagaatcagactccaggaattcccctctctgggagctactcagggcctggaggctgccaacagaagaccctggcccccaccgcccagcccctggctccctcccctcctcctgatcctcctctccctcctccccactttcttcctcatctgcaaacccatcagactccccatctcgatcccaggctgcaggatccagtagcagctggggcacctggcccagaggttctgccacctccccagggaccccaggaagaaaaggtgcctcagtccccaggtcctcaaattcttctgacaggtcagagtcacggccacactccttttctccctcctccccctcctccttttttgagggtggggcctcaaggccctcggaagccaggacagcaggatcccagccctcctttccagtctccccttgagggggtg

SEQ ID NO: 63980 - DNA, 227 bp, Homo sapiens
tttcgtatttggttcaaggcttgttaggatagttaagaaagctgcctattggctggagggagaggctcaggcagaagccctattactttgcaaggggcccttcagaagtcgctgggctcagaaggctcttagtcgtacttgagagtgagcctttcgaagagatactcgcccagcccagcctccgggccacccagcctgtggaggttggtcagctggctgctcctgct

SEQ ID NO: 63981 - DNA, 1251 bp, Homo sapiens
tttttaagaggttcatgacacaaatatatttatattaggtgaatcaatcacccaggatacccaagatctgatactttcacaaactgcttggaggcaacttaagtatggaagaagcttcagaaccagcccagctttctgctctctggctccaggctgcatcctttttaactatttaatgtggcgtggaaaatgtcagcataatgaggctttctcatctcaatagagaacctaggaaggacaaggccgaattaaaaaaaaaatcttcattaaagaatttaatagggagttgattatgttgtagaatcatatcgtcctattctgtgacacattagaaacataaactttagggctttttcatctccacagcatagaggtctgatcgcttctgtctaaaaacggggatttgctggcgtatttcagccagcttcttcaggtctatgtctgaatacacgattgcttcttctgtgccagctttggctagaacctccccccaagggttcaccacggtgctgtgtccccaggcaacataggaggctttgtcatcccgggcaggagaggctgtggccacatacacctgattatcaacagcccggcttcgctgaagtaactcccaatgggctggtccagtggtcagattaaaagctcctggatataccaacagctggcagcctctctgtgcgtagatttgtgcaagctctgcaaaccgcatgtcgtagcagatgcccagacccactctgcagtaaggagtatcaaatgtggagaaactatcacccggactcaatgttttagattcttgaaatgtaatttttccaggaacatcaatgtcaaacagatggatctttctatactttgctagtaaagttccatcaggcccaaacacagcacaggtgttatataatttcccagcatcctcttcagggatagagcctccaatgagatatatgctgcattcctttgctacttcagaaagcttctgtgtggattcaccaggaattttctctgcatattcaggaaaatatttcgctccatatggagaattaaagcattccggcaaagaaactattttggctccttgcgttgctgcctcccggatgaagctacaagcgcgagtgacgttatctgatttgatggaagaaatctgaagctggatgagggccaagcggaaagaggtcatgactctgcagacaagcaccacctgcggcgcggaatgagcgctggagatccggcggaccgcggcgtcgctacacgaaa

SEQ ID NO: 63982 - DNA, 1149 bp, Homo sapiens
acaggagccgagtggtatctccggtgatagatgtgattgactggaagactttccagtattacccctcaaaggacctgcagcgtggggtgttggactggaagctggatttccactgggaacctttgccagagcatgtgaggaaggccctccagtcccccataagccccatcaggagccctgtggtgcccggagaggtggtggccatggacagacattacttccaaaacactggagcgtatgactctcttatgtcgctgcgagggggggaaaacctcgaactgtctttcaaggcctggctctgtgggggctctgttgaaatccttccctgctctcgggtaggacacatctaccaaaatcaggattcccattcccccctcgaccaggaggccaccctgaggaacagggttcgcattgctgagacctggctggggtcattcaaagaaaccttctacaagcatagcccagaggccttctccttgagcaaggctgagaagccagactgcatggaacgcttgcagctgcaaaggagactgggttgtcggacattccactggtttctggctaatgtctaccctgagctgtacccatctgaacccaggcccagtttctctggaaagctccacaacactggacttgggctctgtgcagactgccaggcagaaggggacatcctgggctgtcccatggtgttggctccttgcagtgacagccggcagcaacagtacctgcagcacaccagcaggaaggagattcactttggcagcccacagcacctgtgctttgctgtcaggcaggagcaggtgattcttcagaactgcacggaggaaggcctggccatccaccagcagcactgggacttccaggaggtgagtaatctgttcaggaagagcctggtagtgctgctggtcagaaggaactgctggttggcattggatcctgggctcttccaagaggtcaggtattagggacctctgcctctgcttttgaacttagtggctgggcagtaaggcctcagggggaggaaagggcaacccagcagcaaagttggcccactggcatcttcatatgtaatgatttgccaggtctctgtgtagctctgatgcttgtcattgcagagagagggatacacctctttttgaagtttattcc

SEQ ID NO: 63983 - DNA, 943 bp, Homo sapiens
caacgctgcctgcccagcaacgaagacaaggaggagttcccgctgtgcgccctggcgcgctactgtctgcgcgcgcccttcggccgcaatctcatcttcaactcctgcggagagcagggcttcagaggctgggaggtggagcatggcgggaacggctgggccatagaaaagaacctaacaccggtgcctggggctccttcgcagacctgcttcgtgacctctttcgaatggtgctccaagaggcagcttgtggacctggtgatggaaggggtgtggcaggagctgctggacagcgcccagattgagatctgtgtggctgactggtggggcgctcgagagaactgcggctgcgtctaccagctccgggtccgccttctggatgtgtatgaaaaggaagtggtcaagttctcagcctcacctgacccggtccttcagtggactgagaggggctgccgacaggtctcccacgtcttcaccaactttggcaagggcatccgctacgtatcttttgagcagtacgggagagacgtgagttcctgggtggggcactacggcgcccttgtgacccactccagtgtgagggtcaggatccgtctgtcctagcgactggactactgcctgacgttgtcagtcaagaccagccttgcagccaggtgcagtggctcacacctgtggaatcccagcacttcaggaggccgaggtgggaggatcactggagctcgggagttcaagaccagcctgggcaacatagtgaaaccgtctccacaaataatttttaaaaaattagccaggcatggtggtgccgcctgtagtcccagctactcaggaggcttgggtgggaggattgcctgagaccaggaggttgaggctgcagtgagccgtgatttcaccaccactccagcctgggtgagaaagcaagaccctatatcaatgaaaaaaaaaa

SEQ ID NO: 63984 - DNA, 1398 bp, Homo sapiens
tgtgtgcagtccccagtgccctcccaggttgtcaatgttcgaaccattggtcagcccaccaggcttcggagtgtggcccagaagattttacttcagattaactgtaaattgggtggtgagctctggggagtggatattcctctgaaacagttaatggtgatcgggatggatgtttaccatgaccccagtagaggcatgcgctccgtggttggcttcgtggcaagcatcaatctcaccctcacaaaatggtattcccgggtggtgttccagatgccgcatcaggagattgtggacagcctgaagctatgcctcgtgggctccttaaaaaagttttatgaggtgaaccactgtctaccaaagaagattgtggagtaccgtgatggaatgtctgatggccaactgaagacagttgccaactatgagattcctcaactacagaagtgttttgaagcttttgagaattatcagcccaagatggtggtgtttgctgttcagaataaaatcagtactaatctatatctggctgctcctcagaactttgtaactcccactcctggaactgtggtagatcatacaataacaagctgtgagtgggtggatttctatcttcttgcccatcatgtacggcagggctgtggcattcctacgcattatgtctgtgttctcaacaccgcaaacctgagccctgatcatatgcagaggctgactttcaaactgtgccacatgtactggaattggcctggcaccatcagagttccagctccttgcaagtatgcccacaagctagctttcctgtcaggacacatcttgcatcatgaaccagccatccagctgtgcgagaacctgttcttcctgtgactgcacagcttggagatgggctggtgagaagaaaggcggcctcagaactcagctgtgactcttgcagaatcaacagagactgaagtgggcttttgtgttataattttccctttctccaaccctgtagaataagatttctttcttgtcttttaaacctaatatcaccaagaagcaagtttctgagtaacagctgaaaatggccttgttgcctgtgtagagcaagttacggtggtactgccactctgcaggtggagcgggtgactctgggggaccattaagacctccagaccgggtgcggtggttcacacctgtaatccaagcactttgggaggccgaggcgggtggatcatgaggtcaggagatcaagaccatcctggccaacatggtgaaaccccgtctctactaaaatacaaaaaaattagccgggtgtgcggtgcacgcctgtagtcccagctactcaggaggctaaggcaggagaatcgcttgaacccgggaggtggaggttgcagtgagccgagatcacgccactgcactccagcc

SEQ ID NO: 63985 - DNA, 1024 bp, Homo sapiens
ttttttttttttgagatcacaggctttattcctacaaccacagggcttgagcctgactggggcaagaaaacagagtttcatctgagaatgtctcttatgggctgggttctgttcaggggagggtgggaacagaggacaaggaagacaagctcctctggccctaggaacaaaacacatttactccttcaaagaagcagatgatctgaataccctctggagactgaatctgcccatacagcccctggagccaatgggcagacagtactggcatctggcacaaaagggaattcagacccagaacagaagcagcaaaatattttaaaaatagtaaattgttcctggactcacaaatcattgtttttaagggcaagtgcatgcccaatataagtactggggcttcctaagagagctgacataggattacacagctgcctccctgcttcagtggaggccctcacatcccctttgaacacttaacttgggtaggagaggtagccttttcgtctctgttctgggttctgagagctctgcagtctggaggcacagcagactgaggctgacctgggccctgtcctttctgcctggcagtcacaggatgttgtctctacctggagacaaagctggtttccggtcccagacagctggtcaagggagggtagtgtgggtcaacactggccctcagcactcctgagggggcaaagaggatgggcaaagtttggagcaggaggaatcctaggtaaaggtcaggatcatgttcactggatggtcaggcagcggtggctgaagaggtgactgatgacagatgggtcagccacagtagacatgtccccgaggtcatggtcattctgagcaatcttccgaagcactcgcctcatgattttccctgagcgggttttaggcaagccaggtgcattctggatgtagtctggtgtggcaatggggccaatcttttctctaatctgcttcttgagctcctcggtgagcttggggctgaaggtgtggccatcacacaaggtgacaaagc

SEQ ID NO: 63986 - DNA, 696 bp, Homo sapiens
gatgacaacatggttcagagactagaaacagacttcaagatgactcttcagcagcagagcaccctggagcagtgggctgcgtggcttgacaatgtgatgatgcaagcactgaaaccctatgaaggaagacccagttttcctaaagccgccaggcagtttctgctaaaatggtctttctacaggtatcatctaggtttttcctaggctttcttcttcatattctgcaaatatgtgtgtgtatgtgtttgtatatgcttctgtgacaaaagaaaagaaagtaataaagactttagtttgtggaaactccctgttacaactaccttcaacccaactcagtgattacaacaccatggaaatgtaccaggaaacttagagaaataaactttctgctaggaaaagaaatctcttgctcaaagccctacatgtcctcagatgggaacgtctgagattccagtctagataatgtgttcagcagtaatcagaaaagggcaactgtcctccctcttgcaacatacattatttaggcttctttcttgaggcctaacactagtctcctttttgttctctgtttagtgatgttcagaatgtggtccctaaaccagtagcaccactatcaattggaaacatgttagaaatgcaaattcttagcacctcctccaaatctacctgtatcagaacctgtagaggtaaggccca

SEQ ID NO: 63987 - DNA, 1799 bp, Homo sapiens
tttttttttttttgagggcatattgataaatctttattgacaaaatattgacattgacatacttcttggaagtatatagtgtgttagaattctaacaaattaacacaaaacacaaaaatatttacattctggtatagaagacattaaggaagcatttgtcactctctttagtaagtctatgatcttggaatagaaactcagtgcttgaaaacttgccgccgtgcgcttggccacacttaacatcatccccgctaactacagtccttcaggttttgcaatagatagatttaaagtttggaataggcattgcagtgaatggttgaactcggccaatttctccaaccactgaaaggagaagtttgcatcagggttttaagcctcaggatgttaggaaagggaatgtccaagaaatataattaatttaggggtttttttcccagtacaagtcctgattctttttgtgggcaccctcccccgccacccccagccccccggtcgtcctgctccccgtttctctgtaagaggaccactatcgctgagcctacttcatttagcttgcacaatcactttgacatcagaaggtatcaaaaagtgtttacagactgcacatttcttgggaaaaaaaatcaaaataaaaagcacacagaacctgtctttaaaaggaaaagaaaattacaattcattttcggtctttaaacaccattcgcccaacaactgctacatgcatttcaaggatttgaaacaggtgtgggatggggctagatatggaatttttgttttttattactaattatttttaaagatgggggggaaacacagcgaagtgcaaaaaacaaaaaagtcctgtgcctggttgggtcgtggtttttatcatcatcatcattttttaagtggactgtgataaacggaatacctgccaatcatcttgtctccccggtttggtgtttgattgacagctccccttgtcagagtgcacgttcagctttctctctctctctctctctctttctctctctttctctctctccctccctctttctccttctctctgtgtctctcactcagctgcctctttagacgagggtcgcttgttgatgaaggagcctccatcctctgccatcttggcgcggcctcggtttgggaccctgtgccctcgctgtccagagtcttcgccgcattccgctgctccctccgattccctctccctttctcggtgaacgtgtatgcggtttgtttttgttttgtagggttttttccttctccacctctccctgtctcttttgctccatgttgtccgtttctgtggggttaggtttatgtttttaatcatctgaggtcacgtctatttcctccggactcgcctgcttggtggcgattctccaccggttaatatggtgcgtcccttttttcttttgttgcgaatctgagccttcttcctccagcttctgccttttgaactttgttcttcggttctgaaaccatacttttacctgagtttccgtgaggctgaggctgtgtgccagctgcttcctttcggcgcccaccacgtagtgattcttctcaaaggcgtgttccagccttagaagctgggacggggagaaggcggttcggatccgcttgggctttcgggccagcgcgttgtgcaaaaggaaactctcggggctagtgtcgttcccttggaagcgatgacccagatatcggtagcggtggatgagccaggggtagaaggtggacggatcccgctgctgcgaggcgaatagggggtgtggcgagtgcgaggagggtagggggtgggcggc

SEQ ID NO: 63988 - DNA, 2549 bp, Homo sapiens
cagctgcgggcgcttacctgccccccctgcagcaggtgttccaggcacctcgccggcctggcattggcactgtggggaaaccaatcaagctcctggccaattactttgaggtggacatccctaagatcgacgtgtaccactacgaggtggacatcaagccggataagtgtccccgtagagtcaaccgggaagtggtggaatacatggtccagcatttcaagcctcagatctttggtgatcgcaagcctgtgtatgatggaaagaagaacatttacactgtcacagcactgcccattggcaacgaacgggtcgactttgaggtgacaatccctggggaagggaaggatcgaatctttaaggtctccatcaagtggctagccattgtgagctggcgaatgctgcatgaggccctggtcagcggccagatccctgttcccttggagtctgtgcaagccctggatgtggccatgaggcacctggcatccatgaggtacacccctgtgggccgctccttcttctcaccgcctgagggctactaccacccgctggggggtgggcgcgaagtctggttcggctttcaccagtctgtgcgccctgccatgtggaagatgatgctcaacattgatgtctcagccactgccttttataaggcacagccagtgattgagttcatgtgtgaggtgctggacatcaggaacatagatgagcagcccaagcccctcacggactctcagcgcgttcgcttcaccaaggagatcaagggcctgaaggtggaagtcacccactgtggacagatgaagaggaagtaccgcgtgtgtaatgttacccgtcgccctgctagccatcagacattccccttacagctggagagtggacagactgtggagtgcacagtggcacagtatttcaagcagaaatataaccttcagctcaagtatccccatctgccctgcctacaagttggccaggaacaaaagcatacctaccttcccctagaggtctgtaacattgtggctgggcagcgctgtattaaaaagctgaccgacaaccagacctcgaccatgataaaggccacagctagatccgctccagacagacaggaggagatcagtcgcctgatgaagaatgccagctacaacttagatccctacatccaggaatttgggatcaaagtgaaggatgacatgacggaggtgacagggcgagtgctgccggcgcccatcttgcagtacggcggccggaaccgggccattgccacacccaatcagggtgtctgggacatgcgggggaaacagttctacaatgggattgagatcaaagtctgggccatcgcctgcttcgcaccccaaaaacagtgtcgagaagaggtgctcaagaacttcacagaccagctgcggaagatttccaaggatgcggggatgcctatccagggtcaaccttgtttctgcaaatatgcacagggggcagacagcgtggagcctatgttccggcatctcaagaacacctactcagggctgcagctcattattgtcatcctgccagggaagacgccggtgtatgctgaggtgaaacgtgtcggagatacactcttgggaatggctacgcagtgtgtgcaggtgaagaacgtggtcaagacctcacctcagactctgtccaacctctgcctcaagatcaatgtcaaacttggtggcattaacaacatcctagtcccacaccagcgctctgccgtttttcaacagccagtgatattcctgggagcagatgttacacaccccccagcaggggatgggaaaaaaccttctatcacagcagtggtaggcagtatggatgcccaccccagccgatactgtgctactgtgcgggtacagcgaccacggcaagagatcattgaagacttgtcctacatggtgcgtgagctcctcatccaattctacaagtccacccgtttcaagcctacccgcatcatcttctaccgagatggggtgcctgaaggccagctaccccagatactccactatgagctactggccattcgtgatgcctgcatcaaactggaaaaggactaccagcctgggatcacttatattgtggtgcagaaacgccatcacacccgccttttctgtgctgacaagaatgagcgaattgggaagagtggtaacatcccagctgggaccacagtggacaccaacatcacccacccatttgagtttgacttctatctgtgcagccacgcaggcatccagggcaccagccgaccatcccattactatgttctttgggatgacaaccgtttcacagcagatgagctccagatcctgacgtaccagctgtgccacacttacgtacgatgcacacgctctgtctctatcccagcacctgcctactatgcccgcctggtggctttccgggcacgataccacctggtggacaaggagcatgacagtggagaggggagccacatatcggggcagagcaatgggcgggacccccaggccctggccaaagccgtgcaggttcaccaggatactctgcgcaccatgtacttcgct

SEQ ID NO: 63989 - DNA, 480 bp, Homo sapiens
cataatttttaatgagtcagcaatattaagtaaaatacacctgtttatactaagattttccagcaaatcttatataactgagaattatgaagtataatgttttaaaatattttcttaaaaacaaacaaaatttcaatccatggaaacaactggctccaaaagtttatctccagggacatccatccatgtcatttcaatggcaccagggtcacctggagagcaaggtgttagcagatcatctacaagatggttaggatcagctcgggaaggtccgcgaacctgaaataaacagtaatctgaaatatgtatttgaaacaaaattgaacattaagacttaatccattaccaggaaagttaaaatgtataataattttgtatgttttattagaatgtttacttttggaaaaaaaattaagaatatacaacaaaaagtagttatcccctgggtaatgggatagattttggttgcttttagttttt

SEQ ID NO: 63990 - DNA, 2477 bp, Homo sapiens
  misc_feature (1)...(2477): n = a,t,c or g
cgtcgacccacgcgtccgatcttaacagacgagttgtttaaaagaactatccaactgcctcacttgaaaactctcattttgaatggcaataaactggagacactttctttagtaagttgctttgctaacaacacacccttggaacacttggatctgagtcaaaatctattacaacataaaaatgatgaaaattgctcatggccagaaactgtggtcaatatgaatctgtcatacaataaattgtctgattctgtcttcaggtgcttgcccaaaagtattcaaatacttgacctaaataataaccaaatccaaactgtacctaaagagactattcatctgatggccttacgagaactaaatattgcatttaattttctaactgatctccctggatgcagtcatttcagtagactttcagttctgaacattgaaatgaacttcattctcagcccatctctggattttgttcagagctgccaggaagttaaaactctaaatgcgggaagaaatccattccggtgtacctgtgaattaaaaaatttcattcagcttgaaacatattcagaggtcatgatggttggatggtcagattcatacacctgtgaataccctttaaacctaaggggaactaggttaaaagacgttcatctccacgaattatcttgcaacacagctctgttgattgtcaccattgtggttattatgctagttctggggttggctgtggccttctgctgtctccactttgatctgccctggtatctcaggatgctaggtcaatgcacacaaacatggcacagggttaggaaaacaacccaagaacaactcaagagaaatgtccgattccacgcatttatttcatacagtgaacatgattctctgtgggtgaagaatgaattgatccccaatctagagaaggaagatggttctatcttgatttgcctttatgaaagctactttgaccctggcaaaagcattagtgaaaatattgtaagcttcattgagaaaagctataagtccatctttgttttgtctcccaactttgtccagaatgagtggtgccattatgaattctactttgcccaccacaatctcttccatgaaaattctgatcatataattcttatcttactggaacccattccattctattgcattcccaccaggtatcataaactgaaagctctcctggaaaaaaaagcatacttggaatggcccaaggataggcgtaaatgtgggcttttctgggcaaaccttcgagctgctattaatgttaatgtattagccaccagagaaatgtatgaactgcagacattcacagagttaaatgaagagtctcgaggttctacaatctctctgatgagaacagattgtctataaaatcccacagtccttgggaagttggggaccacatacactgttgggatgtacattgatacaacctttatgatggcaatttgacaatatttattaaaataaaaaatggttattcccttcatatcagtttctagaaggatttctaagaatgtatcctatagaaacaccttcacaagtttataagggcttatggaaaaggtgttcatcccaggattgtttataatcatgaaaaatgtggccaggtgcagtggctcactcttgtaatcccagcactatgggaggccaaggtgggtgaacccacgaggtcaagagatggagaccatcctggccaacatggtgaaaccctgtctctactaaaaatacaaaaattagctgggcgtgatggtgcacgcctgtagtcccagctacttgggaggctgaggcaggagaatcgcttgaacccgggaggtggcagttgcagtgagctgagatcgagccactgcactccagcctggtgacagagcgagactccatctcaaaaaaaagaaaaaaaaaaaaggaaaaaatgggaaaacttcctcttggccccaaaatagggtctaattcaataaattatagccctttaaggtaatataatattactggcccctaaaaaaaatagggaagctgtttatttccgggttgggaaaaaccatattaatatgttttaaccttttaggtgggggcaaaactaatgggggtttttgccattgaaagggctttgaaataaaagggtaaagaaatttatcccaaatgtagtaccaggggttggggtctgggaggttggattacggggagcattggatttctatgtggggaatttctataaggttggaatggttaaaaaggaatctgtattttttttataagtagaaaaaaaataaggatggtttttacagcctacacttcctaaaaaaaaagggattttttttttaggggccccgggttttttccctttggggggggggaatttaattttgggccgggccgggctttttaacaccgggggcagggggaaaaacccgggggggtcccccctttaatgcccttggggacaaaaaaananaccattgtgccggagg

SEQ ID NO: 63991 - DNA, 1297 bp, Homo sapiens
cccacgcgtccgcccacgcgtccgcccacgcgtccgcttctgaccccgtcttggacttcaactgggagaatgtggagccatttgaacaggctcctcttctggagcatattttcttctgtcacttgtagaaaagctgtattggattgtgaggcaatgaaaacaaatgaattcccttctccatgtttggactcaaagactaaggtggttatgaagggtcaaaatgtatctatgttttgttcccataagaacaaatcactgcagatcacctattcattgtttcgacgtaagacacacctgggaacccaggatggaaaaggtgaacctgcgatttttaacctaagcatcacagaagcccatgaatcaggcccctacaaatgcaaagcccaagttaccagctgttcaaaatacagtcgtgacttcagcttcacgattgtcgacccggtgacttccccagtgctgaacattatggtcattcaaacagaaacagaccgacatataacattacattgcctctcagtcaatggctcgctgcccatcaattacactttctttgaaaaccatgttgccatatcaccagctatttccaagtatgacagggagcctgctgaatttaacttaaccaagaagaatcctggagaagaggaagagtataggtgtgaagctaaaaacagattgcctaactatgcaacatacagtcaccctgtcaccatgccctcaacaggcggagacagctgtcctttctgtctgaagctactacttccagggttattactgttgctggtggtgataatcctaattctggctttttgggtactgcccaaatacaaaacaagaaaagctatgagaaataatgtgcccagggaccgtggagacacagccatggaagttggaatctatgcaaatatccttgaaaaacaagcaaaggaggaatctgtgccagaagtgggatccaggccgtgtgtttccacagcccaagatgaggccaaacactcccaggagctacagtatgccacccccgtgttccaggaggtggcaccaagagagcaagaagcctgtgattcttataaatctggatatgtctattctgaactcaacttctgaaatttacagaaacaaactacatctcaggatggagtctcactctgttgcccaggctggagttcggtggcgcgatcttggctcacttcaatctccatcttcccagttcaagcgattctcatgcctcgacctcccgagtagctgggaattacaggtgcccgctaccacgcccagctaatttttggatttttagtagagc

SEQ ID NO: 63992 - DNA, 889 bp, Homo sapiens
ttttttttttttcaaagaggaaaaaagcacgtttgttgttggtaggcgggcgtgaatgggagggttcttcaccttctccaacacctcgtatagatgggacgttgcagggcaatagaaaaggcagcagatgggggcgtgttttgccccactctgtacaatatagaagaatctcatatagatactttgtataaaagccacgtgtcctcatttgtgtcctcttattggctggctgggctgggggtactgggggacaaagaagctggggtgatagaccaggacacagggataccccatggtccccttcctctggctgtcccctggtggggtcactttggatccttggtgggagcatagcacagctccagtggccgggacaccttccagaatttctcattcaccagctccagggtcagcgagccattcaacgtcgtgaacgccccgcctccaggtgcgatgtagatggtgtactgcttttcactgacgccctccaggctgggcaaagcaggctcctcaggaccgtcacctcctccggcacccccaccctccccgccacacccatcaggtcctccggtgtcagaggcgccccctccaggccctcctggctcccctgcttcctgctgttgcctccgctcgagggcaatgcgcagggccaagtacttggagaggtggtccactgtggcattcccagttgtcttcacatacctcgtctggcagtattctcccttctccacgagcagggggtggggccggaacacgagctcaatttctccacctggctctggggggctgggggccccaggagggcttggggggcccagcgttccccctcccagagtccctccccggtcaccagagtcttccgaaccggcacccccacccaccccaccag

SEQ ID NO: 63993 - DNA, 386 bp, Homo sapiens
tggggctcctcctcctcctccttcccagcctccccggcagccgccacaggccgctcccagcagccatccacacagcgacctgacctttaacccctcctcagccttagagggtcaggccggagcgcagggagcgtccgacatgccggagccttcgctggatctccttcccgaactcacaaatcctgacgagctcctgtcttatctggacccccccgacctgccgagcaatagtaacgatgacctcctgtctctatttgagaacaactgagggccacccggtcggggccatccctccacactctgcatcctaccccacctacccaacacacttttccacctgggagcctgtgccctcagaccggcccgcaccagaggcacgggctgag

SEQ ID NO: 63994 - DNA, 791 bp, Homo sapiens
cgaattaatcaggtttacagacagggtcccactggtattcacattcttgttattgatcagatggttcagaattttcaagatgagagttgttttttattctccacagtaaaagctgaaagtagtgatggcatccacataattttgaagtgatgtcttatatagactgaactgtattcagtaccaaatagtcacgcttaaaagtgtgtgaagactgaatccaagaagtcttgggattggattttaccatatgaaatgtttcatattgaaaacacaagatgacctttctaatgagctgtatgagaggtgaatctcctcactgtcactgccatagccaagcatcctcatgagagtgagcacatcggcacagcatgcatccagctctggaggccacggtgcaggcatagctgcctgctgctctggcagaggccagtaaatacagttcctagaagcagcctttgctgtctttttacactgtatgcggtttggaaatgaatgtagaaacttactgtgggcatttacctttctgtgccagtttggcttttattgcctgaaccttatgctgacctggagaggagatgggggacagtgctgttgtggggccagcagtgaatctgtatgcggagagttgtgttgtgctgatgtggccgttggtggtcaggtaagaggctcggcaccttcttggaagaaatcatgtctcagggtgtacgtttgatatgatcatgccagattggagaagatccaagccaggaagatgggcttgaagcaaactgcattatcaggagtaccttggt

SEQ ID NO: 63995 - DNA, 2404 bp, Homo sapiens
taactttttgataggttaaaaacttacaaaaaacgtggatagagggggtctgtcttgcccactagaccgatatggttaggttaggttaggttaggttaggttaggttagaacccgacattgtgctctgtacttcctagccattcattcgcttcaagtgctctgaaatttaatttaaaaaatcatagttggaatcctttcggtcactttctctttctcccttcgttcctccctttccctcttgattcttccttgaggcgcaaacacctgagagaggcttctgtccctcggcggtctccgtaagtaagtgaaccgttattggctggagggcgctgacgtctgattgttgcgcggtcgcatttttccggggagcgcggattcgcattcccaattttaggtggcagtcgcaacccatactattcggacagatggcacagaaaccgctgcgcctgtgagtgaccgtgaatggaagcctctctccctgtgtctctttcgtgtgtcttggcttgtggagatgttgaaggaaagtttgatattttattcaatagagttcaagcaattcagaagaaaagtggaaactttgatctgctgttgtgtgtaggaaatttctttggctccacccaagatgctgaatgggaggagtataagactggcatcaagaaagctcctattcagacatatgtgcttggtgctaataaccaggaaacagtaaaatatttccaggatgctgatggatgtgaattagctgaaaacattacttatctgggtcgtaaaggtatcttcactggaagctcggggctgcagattgtgtacctcagtgggacagaatccttaaatgagccagtaccaggttatagttttagtcccaaggatgtgtcttctctgagaatgatgctgtgtacaacctcccagtttaagggtgttgatatcttgctcacatccccatggcccaagtgtgtggggaactttgggaattcttctggagaagtggataccaaaaaatgtggttctgctttggtttccagtcttgccacgggcttgaaaccaagataccattttgctgctttggaaaagacctattatgagaggcttccatatcgaaaccatatcattctacaggaaaatgcacagcatgccacccggtttatagctctggcaaatgttggaaatccagaaaagaaaaagtatctttacgcgttcagtattgttcccatgaagctaatggatgcagcagaactggtaaaacagcctccggatgtcactgaaaacccttacagaaaatctgggcaggaagcatccataggaaagcaaattcttgcccctgtggaagaatcagcctgtcagtttttctttgatttaaatgaaaagcagggaaggaagcgttcatccacaggtagagatagcaaatcttctcctcatccaaagcagcctcgcaaacctcctcagcctccaggaccctgctggttttgccttgctagccctgaagtggaaaaacatttggtggtcaacatcggcacacattgctaccttgccctggccaaaggaggcttatctgatgaccatgtcctcatcctgcctattggacactaccagtcagtggtggagctttcagcagaggtggtagaagaggtggagaagtataaggccactctgagacggttctttaagagtcgagggaaatggtgtgttgtatttgagagaaattataagagccatcacctccagctacaggtcattcctgtcccaatcagctgctctactactgatgacattaaagatgccttcattacccaggcacaggagcagcagatagagctgttggaaatcccagagcactctgacatcaagcagattgcacagccaggagcagcatatttttatgttgaacttgacacaggagaaaagcttttccacagaattaaaaagaattttcctttgcagtttggaagggaggtcctggccagtgaagccatccttaatgttcctgataagtctgactggaggcagtgtcagatcagcaaggaagacgaggagaccctggctcgccgcttccggaaagactttgagccctatgactttactctggatgactaaaacaaagggaagaactttttatgaactccacaggaagtagtaaagcttttttttttttttaattaaaaaaattttttttgaaacaaagtctcgctctgtcacccaagcaggattgcagtgagccaagatcgctccattgcaacccaacctgggttgaacagtgaaactcccatctcaaaaataaaagaataaaagtatgtctgtcatccagctcctatgtctgttatccagctccaagtacagcttgtgtatatcaacattttcaaaaacctttaaactaccaaatgaaatccagatgtttttccatggtta

SEQ ID NO: 63996 - DNA, 479 bp, Homo sapiens
gtcccaggtctcgaaaaccaaagaagaagaacccgaacaaagaggacaagcggccgcgcacggcctttaccgccgagcagctgcagaggctcaaggccgagttccagaccaacaggtacctgacggagcagcggcgccagagcctggcgcaggagctgagcctcaacgagtcacagatcaagatttggttccagaacaagcgcgccaagatcaagaaggccacgggcaacaagaacacgctggccgtgcacctcatggcacagggcctgtacaaccactccaccacagccaaggagggcaagtcggacagcgagtagggcggggggcatggaggccaggtctcagtccgcgctaaacaatgcaataatttaaaatcataaagggccagtgtataaagattataccagcattaatagtgaaaatattgtgtattagctaaggttctgaaatattctatgtatatatcatttacaggtgat

SEQ ID NO: 63997 - DNA, 943 bp, Homo sapiens
gtgagcaagaccggcgaggcggagaccatcaccagccactacttgtttgcgctaggcgtttaccgcacgctctatctcttcaactggatctggcgctaccatttcgagggcttcttcgacctcatcgccattgtggcaggcctggtccagacagtcctctactgcgatttcttctacctctatatcaccaaagtcctaaaggggaagaagttgagtttgccggcatagccccggtcctctccatctctctcctcggcagcagcgggaggcagaggaaggcggcagaagatgaagagctttcccatccaggggtgacttttttaagaacccacctcttgtgctccccatcccgcctcctgccgggtttcagggggacagtggaggatccaggtcttggggagctcaggacttgggctgtttgtagttttttgccttttagacaagaaaaaaaaatctttccactctttagtttttgattctgatgactcgtttttcttctactctgtggccccaatttttataaagtgtttttgagtgtcctatgggccggggcagggtccaagatcttttcccttccccaggcccctcggctccctcccagatcccacccccagccccactggttgccaaacactaaatctgccgacacccatctgccccacctcctgccatggccatgaaccgcgacccccactaaatttctagattggggatagggagaaagggaggcccaggaaggtctcccctgattttttttcatagtaatttttttccccagagtttgaattttttggtcttctcctggttttttggcaaattaggggggcccggggctcaagtgcgggaagggggctggcccgaggatcccatggctctcacaccatgtttttgtacagaactgatggttgaatctttgttctcttgaaataaacagaagaaaatg

SEQ ID NO: 63998 - DNA, 666 bp, Homo sapiens
ccgacttccatctcatggaccctccagcggagaagccgggagaggctggcggactgcagatcacaccccagctgctgaagtcacgcacaggcgagttctccctggagtccatcctgctactgaagctgcgtggcttgggactggctgacctgggctgcctgggagagtgcctgggcctggagtggctggacctatcaggcaacgcgctcacccacctgggcccgctggcctccttgcgccagctagccgtgctcaatgtctccaacaatcggctgacgggcctggagccactggccacctgtgagaacttgcagagtctcaatgccgcaggcaacctactggccaccccgggccagctgcagtgtctggctgggctaccgtgcctggagtacctgcggctccgagaccctttggcccggctcagcaacccgctctgtgccagcccctcctactgggctgcagtccgggagctgctgcctggcctgaaagtcatcgacggtgagcgtgtgattgggcgtggtagtgagttctaccagctgtgccgagacctggacagctctttgcgtcccagctccagtccaggccccagagccaccgaggcccagcccatgatggagccaggctatactgaggtctgcctcaggcggagcagcttcatccctggag

SEQ ID NO: 63999 - DNA, 1283 bp, Homo sapiens
attgaccggctgtaatagcaccgcctgcaggaattcggcacgagtggaggtgacgtctgctcctctgattccttcaacgaggacatcgctgcctttgccaagcaggttcgctctgagaggcccctcttctcctccaacccagaactggacaatctggtccacgacctgtgcgacaacttctgtcaccgctacatcacctgcctcaagggaaagatgcccatcgacctggtcatcgaggatcgggacggcggctgcagggaggacttcgaggactacccagcctcctgccccagcctcccagaccagaataatatgtggattcgagaccatgaggatagtgggtctgtacatttggggaccccaggtccatccagtgggggcctggcctcccagagtggggacaactccagtgaccaaggagacgggctggacaccagcgtggcctctcccagttctggtggagaagatgaggacttggaccaggagcgacggcgaaacaagaagagggggatcttccccaaggtggccaccaacatcatgcgagcctggttgttccagcacctctcgcacccgtacccctcggaggagcagaagaaacagctggcgcaggacacggggctcaccatcctgcaagtcaacaactggttcattaacgcccggagacgcatcgtgcaacctatgatcgatcaatccaaccgcacagggcagggtgcagccttcagcccagagggccagcccatcgggggctataccgagacgcagccacacgtggccgtccggcctccgggatcagtggggatgagtttgaacttggaaggagaatggcattatctatagaggctgatgcaggagagacccagcctccggctgtgacccccagcctcacacctgcctctggttcccgcctggtcctccagcttcaggaccccacctccaaaggcccctctgctcaatgcctacctccctagggccctgctgggacatgggggcctgagtgcccatccaagggctctcaaggacaccggcaaggcctccaggccctgagccccacttctgccttcacctctgcctgggacccgagctgggctcctgggccttggtccccagaagatggcggctagggcctcgccgccaggacagagaagggacggggtggctgggcagtcagggaaggagggtcgcccggatccgacattttggagagattccttcactctcctgtcccccctacctcccttctctaatttcttcttttttttaatgataaagtcttaaaaacacgg

SEQ ID NO: 64000 - DNA, 569 bp, Homo sapiens
ttttttttttttgaagagagacggacaggctctcactctgtaggccaccctaggatggaatacagtggtgtgtctatggctcactgcagcctcaacctcctgggctcaagcaattctccttcttcagcctcccaagatgctaggactacaggtgcatgtcaacatgcccagctaattggttttttttttttttgtagagacagcatctccccaggttacccatgctggtccaaacacctggtctcaagaaatccttctgctgtgacctcccaaagtgctaggattaaaacatgacccaccatgctcagagtccattttcatttctgatttgagtaattttaaacttttctctttttttcttagtcaatctagttaatggttgtcaattttgttgattttattttgaagaatcaacttttggtttcattaatttcctctattctttttccattctccattttatttatgtccactctaatccttattatttccctcattcactgtgcttgggtttagtttgttcttctttcatatcctgaagtattaaagtaggttgttgacctgaaaaa

SEQ ID NO: 64001 - DNA, 2797 bp, Homo sapiens
tttttttttttttctcttacaaaactgtaacctttatttgttgatccaacagtacgttaaccacttttaccccatccccactttacacggtacaccaacctgaacagattttgtgccacaatttcattcaaagggtttgtcattcactttatgattgtgctggataatctagatgtaagcaactctggagattttaaaatatgggtcccctggtatgaaagtaggcatagtttatagcatacttttaaaaatggcattcggtaattttgccttctggacagaaagatatcttcaaattgcaaacacatctatttccacaaaacaatttggtcaggaaattttatttgaacattctaaagcaataatgcttttagatgttacttaagtgtcccagacaggattaacaaaattaagtgtctctaaattacaaatttggctcctgtaggagtctcagaaaataaacagaagaaaacaacccccctcccggaagaagtatgacacacacattttgaagaaaccccaatgtttcatgcaatggtaggcaagatgtaaaagcccacccaaatcacacatttctacaccaatcatcataagaaaaaagtactctgtagtcgatctgtacatccaaatgcatttgggaatctacacctacgttacattatttaatgttatatacatttattacccaccccccttgtttttaataatttcttatgtaaaaccttcattcaaacccaaaagatttaagactaacttggggggaaaaaagataatcactttagacattcagttaaaatgtagtttatctaaatctcaaaatgtttaataaaaacaagtatcttctccatttaacactttgctttctaactgtacagtaaattgcattgtagagagtacacttctgtcttcaaactgtatcttctttggatggaattaagatgtaactgtatagttttaagataaataaatgggaagttggtccaactaagatgacagcagatatattacatgcaggatttaatattttctaattctctcttttaaaaaaaaggatgctgttggattgggaaaaaaaaaaagtcaaaaaagaacccagattcaatatataaaaatgtcccacaataggtcgacaatggcagtaaaaataagaggaaaaaagtaatctttctggaacatcatttttcaataacatagaaacactaagtgccaggaagattcctattcatgtaattttagcatccaagtttccctctatttattttattggaacaaatgctttaaataaactatttgtcctcttcactgaagagagctggtctatttcatctttaatgagctagtttttgggaagattagccatgtactgtagtaatgcctactgcataaaatccaagcatttgctgtgaacagttggagaaagcagtcaggaagaacctaggatcaatggaaatagatgttactttaagccaccgacgaaagagagacccacaaagtacccagtgtgttaaagcccaaatctcttcttgcgtttgtttgtttttgctgtgcaagttccacccctatgaaaaagaaattgatccaaagttccaggttttcttgggtctctagtcaattttcacattagtatagatttttcggacaaaggcacttgttcccatgtaaccaatcgctccacacattatccccaaggctgtgctaaataccgccatatatccaaagtaaaatgatgtttgaaataagccatacatctttgttttgaaaaaatagtagtaaaaggaatacatgtaaacatagattgcagttgatgcagcagagagaaaacttgtccattgccaccggtaatcttctgcatttagtagaaaatatgtgcacacaatagtcacacagacagtcacaatgcacaggataaccagcaccagcatcatgaagccatagacataatagatcttatatgcccagaaagacgtgaagatgaaatacatttcaataaagattgaaccaaaaggtaaaattccacccaggcaaacaataaccgcaggctccatgaaccattttttctccggtataggacgaggcacagcattgacacgacaaggaaagttgggctgacctgacagatttcggccaagtattgtaccaacaagatttagaggaagaataacaaaaaaacagatgcaacaaacggccaccattgttccaaaaggaatggctcttgaagcatggtaataaatggctatgaaattgatgaagaaggcagtgccacacaccatagctgggataaggaatgccccaataaacatctgctttatccatctccttcctccttgtctagcatacagacttcctccaaaataaccattcactggagacgtagcagcatagacaaatatggctgtactgagcattgatcccctctcagtatataaatcttctatcattgcaacaataataacgatgagagacacagcaaatatctgacatccagaaccaatcagagaggaaaatatcagtgggtgacttgatggtctaaatacatctccatgcacctgtttccatccatattcatctcctaggtctctatccatatcatccatttcttcctctttactgtaccgagcataatcttttcttaatgttctcattaaaatcattggggctaagcccaccaagaagatcaccatcatgaagtagttgaagattgatagccaatgaatctgatgttgaaaaaaggtcggatcaacatatttgtcgattcgatcttcggatttctcatttgactttttccatttgaacgaaa

SEQ ID NO: 64002 - DNA, 2112 bp, Homo sapiens
tttcgtatgatgatcataatggacacatagatttcatcacagctgcatcaaatcttcgtgccaaaatgtacagcattgaaccagctgaccgtttcaaaacaaagcgcatagctggtaaaattatacctgctatagcaacaaccactgctacagtttctggcttggttgccttggagatgatcaaagtaactggtggctatccatttgaagcttacaaaaattggtttcttaacttagccattccaattgtagtatttacagagacaactgaagtaaggaaaactaaaatcagaaatggaatatcatttacaatttgggatcgatggaccgtacatggaaaagaagatttcaccctcttggatttcataaatgcagtcaaagagaagtatggaattgagccaacaatggtggtacagggagtcaaaatgctttatgttcctgtaatgcctggtcatgcaaaaagattgaagttaacaatgcataaacttgtaaaacctactactgaaaagaaatatgtggatcttactgtgtcatttgctccagacattgatggagatgaagatttgccgggacctccagtaagatactacttcagtcatgacactgattaatacaagttgtcttaacgttactccaggaccacttgattttggaaagagtgcacttaattcagaagctaaagaaaatcagttcataatactatggatttctctttcattaagccttaattttaagggaaacatcagtaagaaactgcactgaagaattataaaacattttggggcatagcatacacttgtctaacggttcacacgtggctattatcacaagcaactttgaactggaatgctatttacaaaagttttgtgtattaatctgtgtattaatctctctggataaaaagaaggaaaaaatatgtatgaccagaatagatatggatgaagaaattgaaagcaacgaatgcaactattcaaaaagtttaattttatgaatttcttttttgtttagtcttgaagactgattttctatgcaaatagtgtttggcatcctgcacctctgatatgatttggctttgagaatttaataccactgggaagaagtatggtagtggtggatgaagggtggatattttaaattgtgcagttacagtttactgtcctattacctctgctcgtttaaccagtttgttatatcactgtgtccccaaaatcaggatttttgttgatagcatcagtgttgtaggagcaataggtcagatgagacatattaacttagactaaacgtgaacagtattatatggactctcacaacgctcttagagaatccgtgaatgtgaacagacaaatgtggctaaccatttgattcttcagtatgccttctaatgtggctattttatttatgtgagactctaaacctgattgtcctaatatataaaactaaaagattttgtaaagggagtgtctttagaaatagatgaaatgtagaatgttaaaaattattgctagggtagtcttttttttttccagaaacctaattagggtattaaattttgggttttttttgtttttttttttaaacaaaaccatgttatttctttcccattcccaaaaggggagttaatgaaaataaaaatttattttttaaggtctttattgaaaaaaactttgttttctgatatgaactattgcaaaggtttttataaatactttcattaaaatgatgtaaacagtagtacccaacactgtaaactcagtgaaaatagtaaatgattcttttattactaagactgtcatgcattctgaagcagttggcttttttttaaccataggaagtaatttccctctagctcctttccttctactctcctgctcagaccattagtaggtactttgttaaataaaaaactagattaacatcaatattactccaatttggtatcttttacactatgtattatacctactttctttttatttcatttacaaatagtttaaattactttatcaaccagctgtattgtttccctcttgtaaaagtaccatcaagtggggaaaatgtatgtggaagtggagagtgaatttgtatgactaaaggataatctgtacatgggga

SEQ ID NO: 64003 - DNA, 1513 bp, Homo sapiens
cttttttttttatcattgataggactaaactgtcttcaacttactaactggagtttctttacccagcagttcagagcagtgagaactacagaaggcgaggaggagacagagagcaggtaacggggctttaccgtgacagcagtgcgttcccctgctccacactcccactgactcagtcttgccaatgccactatcaaggtccttgcaaaaatctggttttcttttgtctggaaagggctggttttctcctctgaaactgaaccccaactgttggccctatttaaatctcaggtcttggatttcttacttacataagcaggggcttaggtaatagagtgggttgtgcctgtggagcctcccaatcagctctcaacctcctctgttggcagggtccccggcagcacacggccacagcgctccttcctctcaagggtggtccgggcagccctacccctgcagctgctcctcctgctgctgctgctcctggcctgcctgctgccctcctccgaagaagactacagctgcactcaggccaacaactttgcccggtccttttaccccatgctgaggtacaccaatgggccaccccccacatagagggcatagctggccacagtgctacaccacctgcctgattgccaagggtgcccagcacgtggccccagaccaatctgagtgacttagtgttggcaaggtcccgggacctgtgcagacttcttctgggcttacccagcacgggctccctggagcccagggcagctttcagattgtgttcctccccaggagcagggaacctgtgtggcaggtgccccgggtattttggcagaactagttgattagtttagggatctctggaaatgtcagtttcctgaagagccaagcactttgtgaattctggtttgtttgtaaaacagcattattataatgtaggtatggtcaatgagcagtggtgtccatcacatatattatagaagcaagcgaggacattccaccctagaaatggttcagaaactcataggcacccttagctgatggaaacaatcaatcatatttaatacgcttagaatcagttttactccaatcagctggcaattttgagctgccggttatacaccaaaatgttctgttcagtacctagctctgctcttttatattgctttaaatttttaaagaaattgtattgcatggatgtggttatttgtgcatattttttaacaatgcccaatctgtatgaataatgtaaacttcgatttttttttaaaaaaattagattttagctggagcttttgactaatgtaaagtaaatgccaaactaccgacttgatagggatgtttttgtaagttaattttctaagactttttcacatccaaagtgatgctttgctttgggttttaactgtttggccacggcgggggtgggggcggggggttggtacaaaaacttgaagctgtttgtgatatgtacaactcagatgtttctcattaaaaaacaaaattagccagaaaaaaaaaa

SEQ ID NO: 64004 - DNA, 1085 bp, Homo sapiens
  misc_feature (1)...(1085): n = a,t,c or g
ttttttttataggtggagaaattcaggtctaatcaacacttctttattgaagagaccacccctgtgtatagactttggagtggccctgggggagataagtgtgggtgggagagaagatcccaaactaccaaaagtttgctccatgtcacaacctgccctaggcctccaggccaatgtgaacagacaggcacaaggttgagcaggatggatggtaaatgccaagctgggtgcagtgacaggggcagtggcagtctgggtcgacctcccataaagaagggattcacaaggagacattggaaggttgggaggattttgaagaaggggaaaaaaaagaggttttccctgaggctggaaaagctgagccacagtgtggtttttgacagggcctggcctaaactggatgtccacagttgaagtagaggggcatcatgggatgtcaggctggaaagggcagtgcaggtcccacacaacaggcaaaagctctagctttggcctggaggcagcagggagctcctgcagttctaaactggggtgggtagaactcttgtccccaggtatgtccatggctagtctccccagggcctggatggtgggggcaaacccctctttggctccttcctgcatagccacccttagaattgcctctgcttctcaggtctttgagactggtacagactcatccaaaaagccatcttcttctccttgagcttcatgcccactcttgtggtaaaatccagctgcaggtacttttcatccttgttgtagcgtggccagcagggcagattcccatcattggggtttcctgtgcgggcaaagttggcccagtatttcatcatctggaggctaagtgccttctccttacccatggaaaggcctgggggcagaatgggatgtgggatttcggacagagcaggggacactgacctcccaccctactcctgctgcttctgctgcttccggagcagaagactttcatttgggagagcataacagattaggaactggtgagctccctgtggccagccaatggaggggtgggtcgaattccaccacactgcactagggtcagcgaactcaagngcgcg

SEQ ID NO: 64005 - DNA, 1061 bp, Homo sapiens
ttttttttttttgctgttcacccaatgatcttttattatcaggtatcctggctggcccaggacccagagacagacaagctggggccaagcagggcggagcatctgagacccattttacaggtaagaaagacaaggagcagaggcctgcatgaaactgcagtaagcagcaggcgccagggggcccaaccccactggaatcgcctgccctgccctgagcctggcccacagtggctgccacatttcagacagggcagtgagtgatgggatgtgccctttgccccctctggtagggcgtggggctgggggaaggagcaggacagtaacatccgtgctgctggctgggacccagaagtggctgggacatgggggctgctttcttctgtgtagaggcctccctacaaggctcccccctcccccgaccctttacctagggcctgccagaaaacacttctcattgtgaaggggacagaactaatgggggacagtggaggacatggatctacccccattcctgagtcacacgactcacccagagtcacggcccagactgggcctggggtcatggcgccaggttgcccctctggcctgtccacagctctcggagctcgacatgacaacccaggtcccgcagggcggccttggccacgtcctcacagtcacggtgggcagatcgggcctgcatgatgagtgcctcagcccccaggtccaggatgggcttcgagaaggcctggccgtgggccaccaggtttcggatcagcatgcaagcctgtttctgtaggagagagcagctgtgagctgccagatggggctttgaggtggggtccactctgacctcagggtcttcatcataacaagatggaggtgatcataaccacagctgacatccagcagctgcctatactgtatcaagctagacccatctctctactttaccctcttggcagccccacaaggcatggctaactcccaggcaaggaaacaggctcagggaagctccaagatctatcctatggctttggaactctcagcctcagagttggtgagcctgaggtcccacgaaa

SEQ ID NO: 64006 - DNA, 698 bp, Homo sapiens
ttacttcgcttttttgtgcacttctatgacatggaaattattgaagaagaagctttcttggcttggaaagaagatataacccaagagtttccgggaaaaggcaaggctttgttccaggtaagtcttttgttaaaaatttggtctgcttacttcagtttgcttggtattaacttcaagttaagagcctttttcaactgaaatacaggcaaggtagtcctagttagtagtttgtcttcacctgtacatttcattctgcactatttgaagctatgattaagtaaagctacacaatgaatcaattctagtggtgtataagatgttagaggtagctaacttttcaaggagtatagctacttatatacatgggagtgactgtacaagtttcgatttaagcttttttaaaaacatcagtaaagaggaaattgtagctgggcacgtggctcatgcctgtaatcctagcactttaagaggctgaggtgggaggatcacttgagctcaggagttcaagaccagcctgggcagcatagtgaaaccctgtctctaaaaaatacaaaaaattagccagacgtggtgacatgttctgtggtcctggtcccagctactcgggaggatgtcttgagcccaggaggcagaggttgcagtgagctgagatcacaccactgcactctagtctgggcaacagagtgagactgtgtctc

SEQ ID NO: 64007 - DNA, 1096 bp, Homo sapiens
tttcgtcccactccatctctcccggccagttggaagtactcctccaatgtccgagcacctcctcctgtggcctataatcctatccactcgccgtcttacccactggctgctctcaagtctcagccatcagctgcacagccctccaaaatgggcaagaaaaagggaaagaaacccctcaatgcattagatgtcatgaagcaccaaccgtatcagctcaatgcatccttgtttactttccaacctccagatgcaaaggatggcctcccccagaagtcatcagtcaaggtcaattcagccctggccatgaagcaagctcttcctccccggccagtgaatgctgcctcacctacgaatgtgcaggcttcgtcagtgtactcggtaccagcctatacctctcctccttccttctttgcagaggcctcctcaccagtcagtgcatccccagtgcctgtgggcattcccacctcgccaaagcaagaatcagcctcatcatcttattttgtggcaccaaggccaaagttctcagccaagaaaagtggtgtcacaattcaggtgtggaaaccatctgttgtggaagagtaatcttgtagctgaagctgagtgtccactttgcttgaaatgaattgtttgcagtgtttcttgagtccctgagaatgcctagcaaagtcctcaacttacttaatttcagatatgtcacctcctaatctgggtccaaggagtataatatttttaatgagtcaaaaatccaactcagattgacctaaaatatatttatcttctttgcacacttaaaaaatccaggagcaccccaaaatagacatgtaccgttatattaagtaagcaggagacttaggatttgtgctgtagccacaagaaagacagtgatcagtgatatcaaacatcaggaatcagcctttatgtaacataacagctgtccttctatggtgaaaggttcaaatgtagtgaaggtataacctatattgactgagatttcccttttaggtagtgccttatctctattactagtgttaaaggaataaggaatctatgaaggacagggagcagctctggtctgtcaatctcagccacctgtttg

SEQ ID NO: 64008 - DNA, 1490 bp, Homo sapiens
aactcctgcatcatggaaaatgggcaccagccgggggcagagaagaattcctctttcacgtggtctgtgccaagctctggctacggggcagtgacagcaagcaaacacagcaatagcccaccgctggtgacaccaccccagtcgcccgtgtccccgcagccgccagccataactcaggtccatcggcagggggagcgtcgcagggagctggtgaggtcgcagacgctgccccgcacctcggaggcgcaggcccggaaagcattgtttgagaagtgggagcaggaaacggcggccggcaaggggaaaggcgaggcccgggccaggctgaagcggtcgcagagcttcggcgtggccagcgccagcagcatcaagcagatcctgctcgagtggtgccgcagcaagacgctgggctaccagcacgtggacctgcagaacttctcctccagctggagcgacggcatggccttctgcgccctggtacactccttcttccccgatgcctttgactacaactccctgagccccacgcagaggcagaagaacttcgagctggctttcaccatggccgagaatctggccaactgtgagcgcctcatcgaagtggaggacatgatggtgatgggccgcaagccggaccccatgtgtgtcttcacctacgtccagtcgctgtacaaccacctgcgtcgcttcgagtaaagcccctgagcctggattgccaaagagcagccccaggaagaggccgggggtccgcttgcgattccccagccaggatgcccccaggagccttgccgtttggtgtgagcgcgctgtttgttctgtggcatgtgacggcactccccttcgagcccagctgtgttactgattaaaagtactgctgagctgtggtccgacagcactgatcccagccaagggcttggaggaaaaggaaaaattatgagagagagagagcccttggtgctaagtaatgatcttcctaaagaaatgcttgtgtttatagcttccagaatgctaatctacaattttccctctggtgaattcgatacatcggctttacagggttacagtgattaccaagtgtttttttttatcaaaatacccagagttttttacttcctcacgcgattgtaggttcctctcctccctccctctgggccactgccaggaaacagagagaccgcttaatcagcagcttgacaaagaagacctcaagtcttgggaagaaacagtttaatcactcccaagtcctgggcaacagatgaccttcaagtcacctccgctctccggggagatgggaaggctctcctctcggtcccaaagtcctcctgttcttcccaggaggccccacaagtgtttggctaagcacaggctctcgggaatttaacacttttggggaaggaataggccctttgtgctgaaaaaaagtttttattcacatcttttttaggggatttgctgcagatatttataaaaagtaactccctctgtaccac

SEQ ID NO: 64009 - DNA, 2011 bp, Homo sapiens
actgctggcgttcggtagggcctggactggaacacctggggtcccatccagaactctgcgcgccttgcctacggcttctccagctgggacatcgcgctgctcgtgctgtgggggcccatcggcttcctgccctgcttcgcgttcatgtggctcctggacaagagaggtctccggataactgtgctcctgacatccttccttatggttttgggaactggtctaagatgcatacctatatcagacttaatccttaaaagaagattaattcatggaggacagatgttaaatggattggcaggtccaactgtaatgaatgcagcaccatttctctctacgacgtggttttctgcagatgaaagggccacagccacagctattgcatcaatgctcagttatcttgggggagcatgtgcatttttagttggaccacttgttgttccagctcccaatgggacatcacctcttcttgctgcagagagcagcagggcgcatattaaagatcgcatagaggctgtgttatatgcagaatttggagttgtctgcttaatattttctgcaacactagcttatttcccaccccgacctcctcttcctcccagtgttgctgcagctagccagcggctgagttatcggagaagcgtttgtagattattaagcaattttcgatttttgatgattgctttagcatatgccataccacttggtgtatttgctggctggtctggagttctggacttaattttaacaccagcgcatgtcagccaagtagatgctggctggattggattttggtccatagttggaggctgtgttgttggaatagctatggcaaggtttgcagattttatcaggggtatgctgaaactaattcttctcctcctgttttcgggagctacactgtcatccacgtggttcaccctgacctgtttgaacagcatcacacacctacctttaaccacagtgacattgtatgcctcctgtattctcctgggagtgttcttgaatagcagcgtgcctatattttttgagctttttgtggaaactgtctacccagttccagaaggaattacttgtggagttgtcacttttttaagtaatatgtttatgggagtacttttattttttctcacattttatcatacagagttgtcttggttcaactggtgccttcccgggtcgtgtttgctcagtctcctcctcattctgtgcttcagggaatcctatgacagactctatcttgatgtggttgtctccgtttaatagcacagacttgaaggagtttaaaaggaggctggaaatcaatactgcacactgcacatttgctcagaattgcacatctaacaggaaaagagggagaagaaagaaacttcattcagaggttttgttaggttacagattatcacattaatttaattactactaggtaataataatgggagacttgagtgataataggggattttaaaactctacagatggcatacctgtgcctgcttctggggttggaagtgtgacttcttacacataaagcactacctaagtaattctctctctgttttgtgccagtgctaaactactgattacttgtaattatgaaaagaaataaagggtgtctatcatatgaagataacgccttccctaagtcacatatcagaataggaagatatgccactaacttctaaagaagttcaaaccctgtatccaattttaatgataaaatagccaagaggtatatcgatgatggaaattagccacatgtacactacattttttctaataaagccatttcttatatgactccttattttaatcaggtcagaagcccttggccatctttactatggtgatcaggtgctttccagtgacttctgagcataggcactgtgtctccatctcaacttatccttgtttctgtgaaatacaatttcatctactaggcccttaaataattatgtgagggtgtctaaatgtttaatatgattacattacatattgtatgaaaaaatgtcac

SEQ ID NO: 64010 - DNA, 816 bp, Homo sapiens
ttttttttttttgaagactaagggtaagcttttatagttgattaagtcacacagtgcaaagaaagggccattgacccttttggtaaagggagggctggaagccacacagattaagttcaatggatagtccgtatatacatgtgatgaggaacacccaaactaaatttgtgcttcttaggttggtcattctgaatcccgatgcacttctgaagcatcagctcggcaaattgggcaagtacgatttgccttaagccatttgtcaacacacttggcatggaactcgtggttacagggtaagactctaagtagctgccttgactcaaaatcacacatgcatactacacacaaagtctgttctgactggtggttgttaggattgaaccgataagaaggaagttgttcaatatctgctttagtcagtccacgaggctttgcctctcccagtcgctctgccaggtttaacagggcctcgtaattttctacttctccatcttctacatctaattcaaagctgaaagttgggcccactgcaggtggcactggaagcattgataacacatatggcagtaagctgggatgataagggggaggtggtattggctgctgggatcggtatctactacgtcctgtaagcctccgaggcataaatggaggataaggtactccaaaggacacctcctgatgcaaaggatcatgtgttaagaactgcaagggagctgatggaggtaatgttggggggtgggctgatggagggtaagtaaaacctcctactggaagatgttctcctaagagttccacttcattttcctcgtgccg

SEQ ID NO: 64011 - DNA, 4454 bp, Homo sapiens
agatggctgccgacagtgagcccgaatccgaggtatttgagatcacggacttcaccactgcctcggaatgggaaaggtttatttccaaagttgaagaagtcttgaatgactggaaactgattggaaactctttgggaaagccactcgaaaagggtatatttacttctggcacatgggaagagaaatcagatgaaatttcctttgctgacttcaagttctcagtcactcatcattatcttgtacaagagtccactgataaagaaggaaaggatgagttattagaggatgttgttccacaatctatgcaagatttgctgggtatgaataatgactttcctccaagagcacattgcctggtaagatggtatgggctacgtgagttcgtggtgattgcccctgctgcacacagtgacgctgttctcagcgaatctaagtgcaaccttcttctgagttctgtttctattgccttgggaaacactggctgtcaggtgccactctttgtgcaaattcaccacaaatggcgaagaatgtatgtaggagaatgtcaaggtcctggtgtacgaactgatttcgaaatggttcatcttagaaaagtgccaaatcagtacactcacttatcaggtctgctggatatcttcaaatcaaagattggatgtcctttaactccattgcctccagttagtattgctattcgatttacctatgtacttcaagattggcagcagtatttttggcctcagcaacctccagacatagatgcccttgtaggaggagaagttggaggcttggagtttggcaagttaccatttggtgcctgcgaagatcctattagtgaactccatttagctactacatggcctcatctgaccgaagggatcattgtggataatgatgtttattctgatttggatcctattcaagctccacattggtctgttagagttcgaaaagctgagaatcctcagtgtttgctaggtgattttgtcactgaattttttaaaatttgccgtcgaaaggagtcaactgatgagattcttggacgatctgcatttgaggaagaaggcaaagaaactgctgatataactcatgctttgtcaaaattgacagagccggcatcagttccaattcataaattatcagtttcaaatatggtacacactgcaaagaagaaaatccgaaaacacagaggtgtagaggagtcaccgctaaataatgatgttcttaatactattctcctgttcttattccctgatgctgtttctgagaaaccattagatggaactacttcaacagataataataatcctccatcagagagtgaagactataatctctacaatcagttcaagtctgcaccatctgacagtttaacatacaaactggctttgtgtctctgtatgatcaatttttaccatggagggttgaaaggagtggcacacctctggcaggaatttgttcttgaaatgcgtttccgaggggaaaacaactttctgattccaggattagcaagtggacccccagatctgaggtgttgtttactgcatcagaaactacagatgttaaattgttgtattgaaagaaagaaggcacgtgatgaggggaaaaagacaagtgcttcagatgtcactaatatatatccaggggatgctggaaaagcaggagaccagttggtgccagataatctaaaagaaacagataaggaaaagggagaggtaggaaaatcttgggattcctggagtgacagcgaagaagaattttttgaatgcctaagtgatactgaagaacttaaaggaaatggacaagagagtggcaagaaaggaggacctaaggagatggcaaatttaaggccggaaggacggctctatcagcatgggaaacttacactgctgcataatggagaacctctctacattccagtaacccaggaaccagcacctatgacagaagatctgctagaagagcagtctgaagttttagctaaattaggtacatcggcagagggggctcaccttcgagcacgcatgcagagtgcctgtctgctctcagatatggagtcttttaaggcagctaatccaggttgctccctggaagattttgtgaggtggtattcaccccgggattatattgaagaggaggtgattgatgaaaagggcaatgtggtgctgaaaggagaactgagtgcccggatgaagattccaagcaatatgtgggtagaagcctgggaaacagctaagccaattcctgctagaaggcaaaggagactcttcgatgatacacgggaagcagaaaaggtgctgcactatctggcaatccagaaacctgcagaccttgctcggcacctgttaccttgtgtgattcatgcagctgtactcaaggtaaaggaagaagaaagtctcgaaaacatttcttcagttaagaagatcataaagcagataatatcccattccagtaaagttttgcacttccccaatccagaagacaagaaattggaagaaatcattcaccagattactaatgtggaagctctcattgccagagctcggtcactaaaagccaagtttggaactgagaaatgtgaacaggaggaggaaaaggaagatcttgaaaggtttgtgagttgcctgctggagcagcctgaagtgttagtcaccggtgcaggaagaggacatgctggcaggatcattcacaagctgtttgtgaatgcccagagggctgcagctatgactccaccagaggaggaattgaagagaatgggctccccagaggaaagaaggcagaactccgtgtcagacttcccaccccctgctggccgggaattcattttgcgcaccactgtgccgcgccctgctccctactccaaagctctgcctcagcggatgtacagtgttctcaccaaagaggactttagacttgcaggtgccttttcatcagatacttccttcttctgattcttctagcattactcgttggtggcttcagagacagtgctgcctcctcctgagggagggaaggtaccagggagaacctgggaggtcctggagagggccctgtccagttgggtgatcaggaatcaaaccagcatcggaaagacttcccagcaccaagcttgagctgtgtcgtttcgtggagggggcagcgaggatgggcttgagctgttgagagatttctgccctagagatggcctttgtatatgggggggtggtggggggacacaaacacatcagacactccgtcctcacactggcaggacggtgttcatcgcattctcttctgtgaccagcctctaggctagcggctgcattcgtggtctgtgcaaacacttcgtggttctatatatcagcagcaagtgtgcaaaataaaggacctgttaactcagatttctggatattttggtggtagcttctagtcccagaatctgtgtttttaaaatactacatgacattctgtctattcaatcacctggtggtcatctttcttgtactaattaactgttgatgagcattttggatattctaggagaaagcctataatttcacatagtttctctttttcatgtaactgtaacctaaatgtattacttctgataaaactatatatcaaatgtcactgcaaattagttttatatctgtcatgtgagatttgtcttacttatttttcttttggttgccatggaagttatggccctgaaaatcgtctccctccccttctcttgctgtacagcatgcgttctctttttgtggttgctggctgggtactgtatttaatgaagtagagaatagcacttgcaaaaatacagtcttggtacctagagactgtcatgcagatagtataatttggtatatgtgctaatgcattgagtagaggattattttaacacactattttgcttttgtattttagttaaaataatcgatggggatgtgtagcccccccgtgtgaggatgacatcaccacatttctagtttcatggagctcaagatgtcttgtgtctgtgtggctagatggcctctgcttggtaatcttatttttaggcctaaaattcccacttaaatccaaagtaaaaatggttatactgaagcataaaccttgcctgtgtaattttaaaaaattaatagagctgtgcaaaccctgttatttttgtaaaaaaaaaaaaaatacatatctatatataatatgtgtgtgtgtgtgacatatgcacacgtctctgtgtatgtgaagtaggggaggccctgggggatgacctcccagcctttatgaatcttttctctatgctgctggacttcattcttactggtcacgcgatgcaggcggcctgaggccagtgctgtaccaagtagaagacggttcctaaggacagagtttgtctgttttctaacaaagaaaaattctacaaaggagtggttaaagttacaaaggcattgtgaatctaataaaaggaaaggtgtcgcttaaaa

SEQ ID NO: 64012 - DNA, 3775 bp, Homo sapiens
gctaagaggagtccctgtgtgggcagctggagccttcagattctcttcaggggaagagtccacatcccacctcatcatgtcccgaagaagccagcgcctcacgcgctactcccagggtgacgatgacggcagcagcagcagcggagggagctcggtggctgggagtcagagcaccctgtttaaagacagtcctctcaggaccttgaagaggaaatccagcaacatgaagcgcctgtccccagcgccacagctgggcccgtcctctgatgcacacacctcctactacagtgagtcgctggtccacgagtcctggttcccacccaggagctccctggaggaactgcatggtgacgccaactggggtgaggacctgcgggtgcggaggaggagaggcacgggtggctcagagagcagcagggccagcgggcttgtggggcgcaaggccaccgaggacttcctgggctcttcctcgggctactcctctgaggacgactacgtgggctactcggatgtggaccagcagagttccagctcgcggctccgaagcgccgtctcacgggcgggctccttactctggatggtggccacttcgccaggccggctcttcagacttctctactggtgggctggcaccacctggtaccgcctgaccacagctgcctccctccttgacgtcttcgttttaaccaggcgcttctcgtccctgaagacgttcctctggttcctgctgccgctgctcttgctgacgtgcctgacgtatggtgcttggtatttctacccctatgggctgcagacattccaccctgctttggtttcctggtgggcagcgaaggacagcaggagggcggatgagggctgggaagccagagactcatcgccacatttccaggctgagcagcgtgttatgtcccgggtacactctctggagcggcgtctggaagctcttgctgctgaattttcctccaactggcagaaggaggccatgcggctggaacgtctggagctgcggcaaggggctcctggccagggaggtggtggtggcctgagccacgaggacaccctggcgctgctggaggggctagtgagccgccgtgaagctgccctgaaggaggatttccgcagggaaactgctgctcgcatccaggaagaactgtctgccctgagagcagagcatcagcaagactcagaagacctcttcaagaagatcgtccgggcctcccaggagtccgaggctcgcatccagcagctgaagtcagagtggcaaagcatgacccaggagtccttccaggagagctctgtgaaggagctgaggcggctggaggaccagctggccggcctgcagcaggagctggcggctctggcactgaagcagagctcggtggcggaagaagtgggcctgctgccccagcagatccaggccgtgcgggacgacgtggaatctcagttcccggcctggatcagtcagttccttgcccgaggtggagggggccgcgtggggctccttcagagagaggagatgcaagctcagctgcgagagctggagagcaagatcctcacccatgtggcagagatgcagggcaagtcggccagggaagccgcggcctccctgagcctgacgctgcagaaagaaggtgtgattggagtgacagaggagcaggtgcaccacatcgtgaagcaggccctgcagcgctacagtgaggaccgcatcgggctggcagactacgccctggagtcaggaggggccagcgtcatcagcacccgatgttctgagacctacgagaccaagacggccctcctcagcctcttcggcatccccctgtggtaccactcccagtcaccccgagtcatcctccagccagatgtgcacccaggcaactgctgggccttccaggggccacaaggcttcgccgtggtccgcctctctgcccgcatccgccccacagccgttaccttagagcatgtgcccaaggccttgtcacccaacagcactatctccagtgcccccaaggacttcgccatctttgggtttgacgaagacctgcagcaggaggggacactccttggcaagttcacttacgatcaggacggcgagcctattcagacgtttcactttcaggcccctacgatggccacgtaccaggtggtggagctgcggatcctgactaactggggccaccccgagtacacctgcatctaccgcttcagagtgcatggggagcccgcccactagccctgcttactggtgcctgctgccagccatctgggagtgggtgaacagcaccccgccgcttcccccacacgcttgctcggcgctctgacttctaggagcacaagagaggagcctgtggccccatgcagatgaaaaggacgggcagggtctcctgagcagcaggtggctcgaggcggttagcaggctccagcagctcccttcttccttccctctgtgcccgtggcgtctgcttcccatcctgggagtgtgtatatatgtagcatatcatgggggactgggaagttgggagaggtaggacctgactggtcttggctggggtcaggggctggtgcctgggagctgatgaagcaggtgccagggctgtgggaggggcaagctacggcctgggctaggtgagctgcctctgcccctgggcaaggaagcgaggccctctgggaggagggtgcttagctccagagcaggatgggacttccccaggcaggaagcacttgatggagagctgcccagctctcctacaaggttagtgccctccacctagggaagcatgaaccacagggtccctgagggccttcgacaaaagtgtgtatttgtcccggggagggtagcagtgggccatggggcttcttgtgccctaaaggggactggctgctgtgatcttctaaggggcccagggccaaccctgtaggcttcccctctgctggggacggtagttgcttttctctctcctgatgctaggttggggcccaccctgctccctgttcctgctagggcctgccagtgcccctgagcttgctttccacattctcccagggtatggagacctagacctgtctttggggccattagcatctggggttatagcaagaagagtggggagcatggaactcctgggctcttgtggggacgttcagggtatcggggtgcgaggtctgtctgcaccggcccccacatctaaccaggccctgatgtaggggtcgtccgctcaggctgcccccttgggctcttgcagctcttgttcaggtagtcgcccttctggtttgttctctgtggggcagttggtgggggctgggggaagaggctggcagaagttaccctggatagggaagggggaggaggggacttttagagccagcaggccccactgtattatgtatatatttttcaaggtctgtttttctaactgaaaagctaagggcttgattcctagccccgttctgtggggcactgggtgatactcagtttcttgttcctggccgtggagaggggcctggggcactggttccggctgtgtctggtggtctggctgcggggaaggggcaagaaggcgggcaggccttcactgcagcactgagcctcaaatccgctctggagcatgaggctggatgcagtggtggtgaggccgccccgctccatcccgaggcagccagggtttgttttgcgctctcctgtcacaaatgctgcactattggttcttaagttttttatctccagatcctaatttatgcctatgcaaaaaataaatgacgcccaagagcaaaaaaaaaa

SEQ ID NO: 64013 - DNA, 622 bp, Homo sapiens
gaattcccgggtcgacgatttcgtatcgggctcgatggaggaagacgtggacacgagccctggcggcgattactacacttcgcccagctcgcccacgagtagcagccgcaactggacggaggacatggaaggaggcatctcgtccccggtgaagaagacagagatggacaagtcaccattcaacagcccgtccccccaggactctccccgcctctccagcttcacccagcaccaccggcccgtcatcgccgtgcacagcgggatcgcccggagcccacacccgtcctccgctctgcatttccctacgacgtccatcctaccccagacggcctccacctacttcccccacacggccatccgctacccacctcatctcaacccccaggacccgctcaaagatcttgtctcgctggcctgcgacccagccagccagcaacctggaccgtcctggtatctgggatagcaaaggtcttcttccctcgccccttctccatcgtcccaggaatcccagggggcagcacagccggcccccggcccacgttttcggtggaaaattagagtgaacaagaacacccctgccgactcccagcccggccaaaaagacaaaacacatagatgaaat

SEQ ID NO: 64014 - DNA, 1134 bp, Homo sapiens
cgttgctgtcggcggggtcaggtcccgtcaagcagcctggctcatggctgtgtgcggcctggggagccgtcttggcctggggagccgtcttggcctgcgcgggtgcttcggcgccgccaggctcctgtatccccgtttccagagccgcggccctcagggcgtggaagacggggacaggccacagccttcctcgaagacacccaggatccccaagatttacaccaaaacgggagacaaagggttttctagtaccttcacaggagaaaggagacccaaagatgaccaagtgtttgaagccgtgggaactacagatgaattaagttcagctattgggtttgctctggaattagtcacagaaaagggccatacatttgccgaagagcttcagaaaatccagtgcacattgcaggacgtcggctcggccctggcgacaccatgctcctcggcccgggaggctcacttaaagtataccacgttcaaggcggggcccatcctggagctggagcagtggatcgacaagtacaccagccagctcccaccactcacggccttcatcctgccttcgggaggcaagatcagctcggcgctgcatttctgccgggccgtgtgccgccgggccgagagacgtgtggtgcctcttgtccagatgggagagaccgatgcgaacgtggccaagttcttaaacagactcagtgactatctcttcacgctagccagatatgcagccatgaaggaggggaatcaagagaaaatatacaagaaaaatgacccatcggccgagtctgagggactctgaaatcacagaaagtgggagcttggaggatccctccatggcgatggccgtggagagaggagcttgcccttctggggtcctggttcctgaagagctcacccagagaggctcaaagcagccttttgtcccagctcagctttgatctacacctcttgccaccttcctcaagggactgtgaccctttggggattctgcccctgaccctgcttccccaagctctcctgggtcttggagggatgtgggaatgaattggcattgcaggaaagacaggtaaagtgattgctgcaatgagaaggagctgtgcggaaaaggaataaaagttggaaaggctaaaaaaaaaa

SEQ ID NO: 64015 - DNA, 966 bp, Homo sapiens
cgacccacgcgtccgcggacgcgtgggcggacgcgtgggcagagctggaaaagttggagttgtttttggtatacttggagagctggctttctaaagtgctgctttgaggactgttgtgtaaagcacttgattcgtcttccctttgctggagttatgggcctgggcttttacactggggttctgaagtaacaaacaaagtcagtccagaaatagttgctcagcaatctcattgttacagtgtcgcaaaatgagctcatattagctttattttctgctaccaatagagtgttcctaagtatttaaagtgtgtgactcctttcttatagagccagcaagctgtattggaatcacttttccagtgttgtaaatgttatttttgtgggtcagtcagtatactcgtgaatgacagaaaaacagatcccaacaatgcaaagtattatatgtgtaaaaaagaacagaaaaaagaagctgccttgttagtaacgggctctatggtttttctcatcaagaggtcatgacgccagtcagatcacactagccttgggcacagctgcctcctaccccagggcctgccaggctctcggggccatgctgtccaaaggagccctgaaccctgctgacatcaccgtcctgttcaagatgttcacaagcatggaccctcctccggttgaacttgtaagttgcttctcaagaatccccaatgtcagctggtaaggtgactttggaaagtctgtgcttgtctgattgtctgaaggctgtgaatgcaaatccatcattgtcctggtccttcctcagtcacactctctgcctggagcctgttgggcccctgctgtgtagggataccctgaggggaggtgggtgagcagtgccctcacgcctgccatcccgaactgggcatatgcttctcctcagatccgcgttccagccttcctggacctgttcatgcagtcactctttaaaccaggg

SEQ ID NO: 64016 - DNA, 1138 bp, Homo sapiens
cggacgcgtgggtcgacccacgcgtccggccgctctcgatcttagaactaggaactggaacagcagtaatatttatctctttaacctctctgtctctgacttagcttttctgtgcaccctccccatgctgataaggagttatgccaatggaaactggatatatggagacgtgctctgcataagcaaccgatatgtgcttcatgccaacctctataccagcattctctttctcacttttatcagcatagatcgatacttgataattaagtatcctttccgagaacaccttctgcaaaagaaagagtttgctattttaatctccttggccatttgggttttagtaaccttagagttactacccatacttccccttataaatcctgttataactgacaatggcaccacctgtaatgattttgcaagttctggagaccccaactacaacctcatttacagcatgtgtctaacactgttggggttccttattcctctttttgtgatgtgtttcttttattacaagattgctctcttcctaaagcagaggaataggcaggttgctactgctctgccccttgaaaagcctctcaacttggtcatcatggcagtggtaatcttctctgtgctttttacaccctatcacgtcatgcggaatgtgaggatcgcttcacgcctggggagttggaagcagtatcagtgcactcaggtcgtcatcaactccttttacattgtgacacggcctttggcctttctgaacagtgtcatcaaccctgtcttctattttcttttgggagatcacttcagggacatgctgatgaatcaactgagacacaacttcaaatcccttacatcctttagcagatgggctcatgaactcctactttcattcagagaaaagtgaggggcttgtgaaacagattgttctacagatgaatctgtaagccagttacagtttgctttaactcatagacatcaatcagagagtgtcacagatttaaccttgatctaaagacaagttgtacccagagtatgtgaaaagaatgggatgacaagaatgtaactgggtttttttcttcctctaaaaaattgaaaggaggtggaactgcccttattgtttgggcatgtaaactcccaaaatact

SEQ ID NO: 64017 - DNA, 1460 bp, Homo sapiens
ttttttttttttctctcataaagtagttttatttagatttcaaacaaaccaaagcagggaaaagagtcggccacggtgaatccgtccactctgtgctggacgtggctccaggacctggagctgacaggcaggaccgggcccctcggaccgctacacctgggcctcccaggctggtagtgtcaggaaacggccccccgcccacgttcccagcagcgcccccgtggctcctccggggtgcggccagtccggaagctgggggaccccggtagaagtcgggctcagctcccctcccgaggggacaggtgggccggccgctcccaccctgggcccgtccaccgagccccgaagtgaacgtgagttgggcgggtggggggcaagccccttctttcttcttgaaagcaacgttgaaaacccagaacagacatggggaaggagaaaaagccaaaacgaaacaaccagaggagacggggaccagcacaaaacctccgtgaggtagtctgtcgtctaaggagccacgggtccggccctagtgaggtaaactcggcaagtttattctggtggtgtcaggactcctccgtgccagagtcatcctcatcgtccccgaagcagctgtcggcctcctcctccacctcgccgtcctcgtagtagtcgtcgtagaagaggtctgagccctcgtcgggcgccggcgccttggtcttcacgcagtactcggccagcgtggtgggcaccttcacgccgtcacgctccgcgtccaccttggtccccaggacctgcttccggatgatgtctgtgtactcccgatccttccccttgctctctttccacttcctgtacatcacggaggcgtccacgtttgcgggcgagaaggtgttgggctcgttcaggagggagatcacactcaggagaatggtcctgacgttctgcgtggggttccacctctctgagggcagctccccgctctgggggtcgtccaccggcgggtggaggatggagatacacacgtcccccgtctcgtagatgttagggtgccacatcttggtcaggaaccgaaaggctggtggagagtatgggtagtcgatggggaacttgaggcgcgccttgaagtagccgccctcgtagtaggtgttggggggcccgaagatggccacctcccagttgtatagatcgccctcgtccaccagtgtcacgcggaatccctcgaccggctcttcctgcagccccttgagctccagcagcagcgccttctgcgagctgggcactagcggccgagccatggcggcggcggaggggcccggggtcggagcagcgcggggccgcgcgaccaccgcgagttcgcgagacgggccgggccgcgcaccgtccgggggggagccaccggggccgccgcctgcctcctcctctgcgccgccgccgccgcccggggaccccgagcgctccagcagctctggcgccgccgcaat

SEQ ID NO: 64018 - DNA, 578 bp, Homo sapiens
ccgggcgcctgctggccgtgggcaccgacctgtacgggcagcgcagcagcgccccggagcaggagctgctggtgcaggacgccacgccggtgagcaactccctgcttccggagaaggccttcagcgacatcccctcgccctacctgcgcgggaccatcaagatgatgcaggcggtgcgccaggccttccaggaccaggacgaccggcgcacgtgggatgggcggcccctcaccatggccgccaccttcgacgactgcctgtatgccttgtgcgtggtggacaccatcaagaggtccagccagacgggcgagtggcagaacattgccatcatgaccgaggagccggagctgagccccgcctacctgatcagcgaggccatgcgccgcagcaggatgtccctctactgttagcacagattgagaacctcggggacttgagccttctgcaggggatgtccacagagagggaagggccgaggggagagggtgaccatggggaatgtggggatcacggaggtggaggggcagtgtgaataaatggcatctaggaaggtaaactccaatcccggtgaccgaccc

SEQ ID NO: 64019 - DNA, 1200 bp, Homo sapiens
ctggtgcctgtggtggtcattgacagctactattatgggaagttggtgattgcaccactcaacattgttttgtataatatctttactcctcatggacctgatctttatggtacagaaccctggtatttctatttaattaatggatttctgaatttcaatgtagcctttgctttggctctcctagtcctaccactgacttctcttatggaatacctgctgcagagatttcatgttcagaatttaggccacccgtattggcttaccttggctccaatgtatatttggtttataattttcttcatccagcctcacaaagaggagagatttcttttccctgtgtatccacttatatgtctctgtggcgctgtggctctctctgcacttcagcacagttttctgtacttccagaaatgttaccactttgtgtttcaacgatatcgcctggagcactatactgtgacatcgaattggctggcattaggaactgtcttcctgtttgggctcttgtcattttctcgctctgtggcactgttcagaggatatcacgggccccttgatttgtatccagaattttaccgaattgctacagacccaaccatccacactgtcccagaaggcagacctgtgaatgtctgtgtgggaaaagagtggtatcgatttcccagcagcttccttcttcctgacaattggcagcttcagttcattccatcagagttcagaggtcagttaccaaaaccttttgcagaaggacctctggccacccggattgttcctactgacatgaatgaccagaatctagaagagccatccagatatattgatatcagtaaatgccattatttagtggatttggacaccatgagagaaacaccccgggagccaaaatattcatccaataaagaagaatggatcagcttggcctatagaccattccttgatgcttctagatcttcaaagctgctgcgggcattctatgtccccttcctgtcagatcagtatacagtgtacgtaaactacaccatcctcaaaccccggaaagcaaagcaaatcaggaagaaaagtggaggttagcaacacacctgtggccccaaaggacaaccatcttgttaactattgattccagtgacctgactccctgcaagtcatcgcctgtaacatttgtaataaaggtcttctgacatgaatactggaaaaaaaaaa

SEQ ID NO: 64020 - DNA, 1715 bp, Homo sapiens
tattggtgcgggggctttgtatgattatgggcgttgattagtagtagttactggttgaacattgtttgttggtgtatatattgtaattgagattgctcgggggaataggttatgtgattaggagtagggttaggatgagtgggaagaagaaagagaggaagtaaagtttaattatgcctttttgggttgaggtgatgatggaggtggagatttggtactgcctggcatggtggaaagatccaaaggggctattctgaacatttcatctggcagtggcatgctccctgtcccactcttgaccatctattctgcaaccaagacttttgtagatttcttctctcagtgcctccatgaggagtataggagcaagggcgtctttgtgcagagtgtcctgccatacttcgtagctacaaaactggctaaaatccggaagccaactttggataagccctctccggagacgtttgtgaagtctgcaattaaaacagtcggcctgcaatcccgaaccaatggatacctgatccatgctcttatgggcttgataatctcaaacctgccttcttggatttatttgaaaatagtcatgaatatgaacaagtctacacgggctcactatctgaagaaaaccaagaagaactaagcattgataactgcattgtaacttggccagatgctccagcatatgcacgttcactgcaaagcaccctactggttttgaaaatctgaccttgtcatttcaatagttattaacatgactaaatattatcttaattaagaggaaaatagaagttgcttttaggggtttctgacatatattctggatactatccgaggtaattttgaagtttaatataaatgctcatatcaaatgaatatagaactaatattgtcgggaacacctaatagaaaggaatactattatagcaaatcacagaatgatagactcaagcataaaacttggcagttttatctgcttcaaaatgccattgatcattattcctgtattttctctgaaactgattataaaaaccaatgtccagctactcttttgtttttgacacttgaagaaatggagatcgatttgatttgtttataagcagacacactgcaatttacaaagatctctttacggttttataaaattatcttccagtttgtacatttatatggaattgttctttatcaagggtagctaatgacatgaaaataattgtgaaatatggaattatttctgacacatgaagcccactaaactatgctttcttataatgcatatttcttctcagtttaaatgtatgtaaatatcgaagctatatggtatgatttataaagataaatgggccaaagtgtacattgagactggcagccatctatggtaccactgaaaccctgacccagaaaagtggcttgcttggacacccagctgcctttgtttctgcattaaaccaatattgatcacacatatgacacaggctagtcctataaaagtaatgacttcatagaaatggcattataatttttaagttgatactctacaggtagctattgatataattagttttaataaaacatgctgcaaccatggtatacaacaaaaatacatttctttggtgattgaaattaaggccgtatttacaaatggaccttaaatattaaagactgaccttttatcctgcttcataaccttgtatggagaactcaccaagaaaagaatt

SEQ ID NO: 64021 - DNA, 2272 bp, Homo sapiens
ttttttttttttaggggtctggctttctctttagttctcatcacactagggctctcagtcacagagaaggcacttaaatgggaaggccacctgatgcaggccaaccatattcaccccccgcccacccgctctgggggaggggagcacaacgacatcaccacttgacatcccccttggcactggtatgtgggtccccttaaccgttagaccctggggagagcccaaggccttgacctccggaatcgccatgttaggaggaggggcttcagaaacagttggaaggcaggatatcctgggagctgcccccagccagcaggggatcaggcagggggctgtaggagatgggttggcacaggggaaggggacagcttggtcgggcttcctggagatccccaaaccccacagaaggtcccacctcctacagatcccccaaaggcaccggtgaaggatgggcaaggaggcactgatgagctggcgtagagaccccccacacacacttagctggtgggcctagcatatgctgggcacagaaggtgctcaagaaatgtttttttgaatgaatgaacggagcaaaggggtgtgagggacagaggacagggcctgggccccttggcccagcttgttccattcagaaaatagcagtttaaaaaatgtaaaaatcctttccctccctccccccaacttctgggcccaggaaaggggcaagggaggggtgtctctaccctgacccttccctctctccttcccctaaaaatctatatacacatgtacatatttatatggcaccacaaggggggtcctgcctatgcccccacgctcagagctgggggagccaagccccggggctggttaaggcagaagtctgaggtcattgcttggatgatgcagggagcagccctcagctgtcggccctggagaagctgcactgtggggcctgaaggacagaatcctgctgccttccccagtggtaacagacctcccctccctccaaggcagaggcaaaggttggtaggggccctctcagtcccaagggaggaggtggggcagggggaggggctggttctcccctcccagcctagagctgtgcccctgggaaagctgggcggggaagagggggctctatgcaaggcacttgatgtccaccgttcccagactgggggtccaaggcaggaaccctgcccccaggaagcagaaccggaaggggccaaggggcccaatttggcagcagagaaacatggcagcatggacagagacagaaaaagggagcagcaggcagggccccccaggtcccctgagaataggggaggaggtttgaaggcactgacacggggcctggagctcacggtcctcagtgcagcctgctgcccctacaccgcctggtggggctggtgggggagacgcccgcttccccatggcactgagtgtggcggcggcccatgggttttcctaacaaaggcctgggcagtcttcctgggaggaggtgtgggtatcattggtcaggggcaggtcctggccccatcaccctcactagctccctggccgtggctgcctgagcactgagtacacgtcgtccacacggctgagttgctcgaagaaggggaggaggtcgtggagctctgtgtcactcatgttgtcaaaccacgaggccaccggtacagcattgtctggatggaagacataggaggcaggtgaattgtccaggatgagcacccgccgcaggtctcgacccaaccggctcaggtccttcacgtagttcccccggtggaagacgcaggactctcgaaacagccgggcccggaaggccccccatttgtccagcaggtcagctactgggtctgcgtacttggcgaggctagcagtgaacagcacacattcaaagagctcgcccattcgctgcaggaactcatccacgtgaggacgcttcaacacgtagacctggtggaccaccccatcaatctccacagggatgatgaagtccgcgttgttcactggcttgaaggagctgtgcaccagggtctcgtccaggtcgatgaccacgcagatcttgtctgagtcctgggccttggcctcagggagcaggtattggactggggtctgcttagggatggcgccattctcctccacaagcaggggcgccccgctgtgagcaggcagggcctccccatcatcccggcagacacagcagaagagtgagtggaggatgccccggcttcggggcttctgggaagctgctgacttctggtcacctttgccccgcagcgggccccgagcc

SEQ ID NO: 64022 - DNA, 2174 bp, Homo sapiens
tttttttaaaataaatcagtgtgtttttttattttgagccaatgttttacataagaccaacaaactaagtgtgggcaaactgttcaatcacttttgagaaattacatggttcctatttaggtttgaaaaagtagtttgttgccataacatcagaccttaaggtgttttaaagtgtatcctaagggtactgacagaagaaaaatacagtgttatggaagtatacacaactcatgaccacacagtatagatccattcatggtgaataatgttcatctgttctccaaaggtagtgaaaaatattaagtcatcaaataaatgctcagaattaccaaggaacagttaaaaaggaccaggatccaaacaggttatttatatatttatctataaacaagtgacaacactaaaaaacacattgaaaaccagtgttttaaactctgaatgtgggatttaaaaatattccattaacttgagattgcaataatttttttaaaccaaatagcatttgactggcaagtctcatataatttacagctgtaatattcctaaaaggaatatctacatactatagcctatcaaatataatctgcattttgcaaatcaatacaaaaatctatccatcatttatacattttatatttatatactttttaaaaattagattttattgctaggtgaatttggaattcaaattaaatttggaaacttaataatgctcttctcataaccttctccccattctttttttaatttttaaacactggaagcaaatgattatcaaaatgagactgcaacttaaggcattttaaaagaaaaaataattaggtgccatatagcattttatttcaaaagtatattttgtcccacttttctcactagcaagagtaaaacacaaaccttttttcataaatatgactacagtaatcataacacaaaaaagggttgataggcattgcttagatatttaaaacaagggtaatactttcccactcacctaaaagaaaaaacctttttgattaccagtttataaacatcggatttgctatgttaaaaagtccagcagaattttaattcagcaacactggagaatgaatatatatatacaggcatacatgtgtatgtatatattcattttatatatagtcaatgtatttattaggcattcccccacaaaagtaatttatatttaattgccatttttaataaacacttatgttcacagatcatccatctgtcttatatgaagttaggcaatatcaaatgtcctgttatggtctccgtcttcttcggaatcatcctctgaagtttcgagatcttccatatgtgcctgaagagttcttgcaaggttaataaatcggacacgtgtgcttggttcatttgtatttcccatcatatcagaaaagctttgttcgcacaagtgcaataacaccactaggtagagaccagagctgataaactcatactcagcttgttcatttgcatgagctctatgtagttcatgaatatcaaaatcctccaggttaagctccaacttctctttacatagttcacaggtggttacagcttctaatgaagaaccagagttaattttggcctgtaaccactttttcatacagtcttggtggacatactgcaaacttcctgtgcacttgcatggctctatcagcaaattagatgatgatgcagctgccatttgacaaattctacataagtcaccttcttcttcttctgagtcctctaaaaggaggctctcttttattttctgcaatctttctggatctcttgaaggcgcacttttagttttatcacttttaccatcagctgaattccaacctgaaggaataatatctactgtgatcatgacattgtcggtcaaattactcccaagtgctggggggactgcaaaccggaataaggaaccaggaagaatccctgatattcctgtatttcttccaccttgagccgaatctgatgtagagccacctgttgtggcactgcttgatgctgcagatgcttgtggtctgttggcagcagctccaagaggatcattctgtgcttcaaggtgaaccacttcatttgattctcttctaaaaatatgagatctagatgatgtatcagaggtaggtatccttgaagattcatctcttccctctcgcctccttctagagaacaaaggt

SEQ ID NO: 64023 - DNA, 2312 bp, Homo sapiens
cctcctgcagttgctcccactgtctcccaaatctggcgaacttttaggcaatggtaatggcaagtagccatggaattaattctgtgtggtaagaggcacacagacagatgatgagcagctcttctccttaaagaagtctgtgtctaattcctacgcgtggccgttgtcagagtatagctctttcccgttacctttactagccagaaacagcttgcttgctttctgaagaaagagaaatgacgcaccacagggtacatcagatgaatcagaaattacattgtttggacttcaaaacagtgtttactgactctgggcttaaacttctagtccactcctagaacagaaaccctcaaagttcaagagtgtttttttttgtacaattgtttatacaaattcaacaaaggtaaaatcgcatcagggaaggtctaggaaacaccaccttacaacaatggcacttataaatgcagaactttacaactaggaaatagccatgttacaaacctaaatgagaactcaactcacacttcagaggagagaagcaaaagcaaaagaaaggctatgtgggagcatttattctacgtcttgactcactgtataaattagatctatgtaagtacaagagctcatgctggagcagaacctcctgagtgcaaaggctgaagtcgaaattttaaaatttgagaaaagtgaattctctacagaggaaacttggcagagtatcttactttgactataatttacatttatccacaacatgctcatgtaactcttgaggtacaaagcagactctcaacttccagttaaacatgcttttaagtggaaggtcttagcctactttgttagatctgggcacatttgtagatgggttgtgtcgatgaagtacacgttaaattctctcctaccttaaggaaatcaggaaaattggcaatctcaaaacaataaaaacactggtatgcattcaaaccttgcataaataacttttaaacaatttgtacaaaaatagttctgcataatgtaagatgtaacaaaaccaaccaaacaaaaaaaagtgtcaagacggcagcagatgtggtgtgtggtccactttatgtcaacacccaaaacctcggtgttgcaaggaatgaagtgtccaaaacaccactaccactaacagaaactcctaagctcatgcttcagtatgagaatttctccgaagtccaccctcctctccgacaggaatgtcttcttgtaaaggccgccttagaaatggtccagaaagcagtgcagttacgattcagaaagaccaaaggaaagtgtcggctcactcatcccccaaacgggtggttgaacagcttctcccttggaaagacttgcaaaatggaattgcgttgtggtctgttgtcccacgttccaaatggaaaataaaagccctcatttttgtaaagtctctcccctcccagagcccgccccgtatttacatacttatccttggactaactcagtttttgcaggagtttttcttctacttgcccaaactggacactcacagacatctcggctatgaactgctcacagccttccttggtgacttgcttgcagtacctcaggtcaatatgacagatgtttccacagcgtttgaagaaggacaggcactgatcagtgaccttattgcagtcagacaggttgatctcggttaaggagtctcgggtggtggtgccaacagcagtgagcaggttgatagactggtcggtgacgtggttacagtaactgaggtggagcttggagagcaggggcatgtggcggatgatgagccgcagggaggcatctgtgatgtccaggcctgccaggcgcagctccacgatgttccggagcttgctccgattgtccatctgacctggcctgttgtctgtgggcggggacaggagatcccgcatctgggcatcctttagtccctccacccactggacatccagggtccggagcagcggacaactggagctgcaaagggccgagaccgcgatccatgagcagcctgacagcaccaagtcccggagcccaggcagccggttgatgagccagctcagctgcttcttggagatattggtccagctgaggtcgagggagacgggctgtcgccggatgatgccactcagcatcaggggtgtgatagacttgcagtggttcaggtcaatgcgggtccacaaccgcttatcgcagcaccagcggttccaggtcctgcagacccgcatgcacacacacaggtcttggtggctgaggtagctgaagacggccatccacacctccctgtgcatgacgtgggctgccccatcgtc

SEQ ID NO: 64024 - DNA, 1266 bp, Homo sapiens
  misc_feature (1)...(1266): n = a,t,c or g
ttttttttttttgcttcaaaatatttaatacgtgttagacacgtagaagttacatttttatacaaaaatcaatacaacgaaggagaaaatactgtacaaaaaccttatcagctcccccaacctttatacaacaaagactggagtcaccatatctacaaaaccataaggtctttccacttcgggcttctgtctgtaaactctcattaaacactttttaaaagcactgtgtagtacttctgacctagagcttttaaaaatatatcttttctctataaactccattatttccaagcttgaactcttctgtgaagttcgtcaagctttttctcccctgcggggaagcaaaggaccgttaatacgcccctttcctagagtaatcacaggatataaacgtttcttcattgggagagaaaggtggggagggacagaaggaatccaagtctgtgctcttggctaaatccctctcgtcttaggaaatcctgtgcggaaacgccactcctggccctgaagcgggtctagctttccggtgaggggtaggtgtaaagtccctccctccccggagaacgaatggggaactccccggcccaaaccttttagccgcttccttctccacgcagccggcagaggaaagtccctgtctgcccccaatctcttaaaccctggggaaggagtggtgcattccagaagagcaaaatagtcttaatgccacaagacaaacttacatacacagacatacacaaacacaaaagttaacgatcgtcctcttccaatgagcctcaagctcccaggtctccagataagccagatgcgcccgggggcagtttgcgatgcccagaggcaaccagtctgcccaacgcgctcagcgcccgcggtctctgggcgtcctcgcagccgggaagggcctggccctcacttcggggacgcccgctgctccacctcctccccgcaggggggccaagggctcagaaggccacgatggctgtgctccaggggttcatgtctctcagcaccggcttatcgcagcagatctgcccgggctcggcggcttccggaccgctctcctctccctcctcttcctctctgccgcccccggggcttttccgtaggagtcccgagaaactggaaccgaagatgctgatgaggttagccacgttcccggtctccatctcctccgcgtcctctccctcctcttcctctctnccnccgnacgcgtgtgtcgncagntancaagnnncatcgaatgccccatgcnnnaaaaccccgtct

SEQ ID NO: 64025 - DNA, 1954 bp, Homo sapiens
gccatgaagccggtggaaacccacagttttcagatgctcttcacgatcctgtccactggctccgcactgaaagcgcagagctacgaggatgcctacaggtgcatcaagagcagcatcctcctgggctccatctcaggaggcaccgacatcatctcctgcttcatgggccacaatttttctcttcctgtgtataaaggggagattcaggcccggaacctgggcatggccgtggaagcgtggaacgaggaaggaaaggcggtctggggagagagcggcgagctggtgtgtactaagccgatcccttgccagcccacacacttctggaacgatgagaacggcaacaagtacaggaaggcgtatttctccaaattcccaggtatctgggctcatggcgactactgcagaatcaaccccaagaccgggggcatcgtcatgcttggccggagtgacggcaccctcaaccccaacggggtgcggttcggcagctcggaaatctataacattgtggaatccttcgaggaggtggaggacagcctgtgtgtcccccagtataacaagtacagggaggagagggtgatcctcttcctgaagatggcctccgggcacgccttccagcctgacttggttaagaggatccgtgacgccatccgcatgggcttgtctgcgcgacacgtgcccagcctcatcctggaaaccaagggcatcccgtatacgctcaacggcaagaaagtggaagttgccgtcaaacagatcatcgctggaaaagccgtggagcaaggaggtgctttctcgaaccccgagaccctggatctgtaccgggacatccctgagctgcagggcttctgagtcagactggctggcgtgtcactcagccgcacccgtgtgcactgtaacttttgtgtgctcaagaaattatacagaaacctacagctgttgtaaaaggatgctcgcaccaagtgttctgtaggcttggggagggatcgtttctctgttttgttaaatctggtgggtacctggatcttccacacgagtgggattctggccttcagagaccaggagggagtgtctgggccgcaggtgtggcactgtggtgagagtgtgtgtctttgcacacacagtgcagcgggaacggtggggctggctggtgctgaagacagacacactcctgagccaaggtcttgtcttcaacctccccgtcccgttgtcccattttgctctgtgaaggtgcaaatccctttcttcccttcccatctcaggctctcctgttttccctcagggtccagtatgcctttgagctttagctgttagaaaggaacccccgtgacttgacacagctttcacagctggctgctaggaccggcgggctgggtgttcacgtgtgtctgtgtcatggatgcaatgcaggccctggaggactgtgcgtcacccgtcaaccagagcgtgcctccgggccagcttccctccaaggaatgagtggatttcatacaggatctctttattgcacagactgaatggctttacatgtttctaatgtgaattaggcatgtgaagcagtgggtgtccacccgtgtccctcatgggtgagccctccagctgtgagcccaggcagtgtggtcaccgagtgaggaccctcctcaccaggaaccgcatccctgtgctgcctccacctgagagttgctagggggttcttgtcgagatcatgtcatcagcacccctaagtcaagtcacgggtttccatagccaggcagttggtatgtacaattcagttcagcgtatgaacttgtatctctaatctgatgtccatttttatattttttgaaactgagcacaatgaaatcctttcttgaatcattttccttttggattataaaaatatgggggaaagtgctatgatgaattttatgcaataaatgtatacatgtgtgcacatgcacccatgctgtgaaaaaaaaaa

SEQ ID NO: 64026 - DNA, 966 bp, Homo sapiens
gggcgttcccgactccggcaagagggtggcgcctggactctcgccctcagagggaggcccgtcccacggtctgtggctacggatcccaggaccctcttcgcgggcgattcgcgtagcctcaggtaactgcatcctgcccagcatgacggccccctgcccgccgccaccttcagacccccagtttgtcctccgaggcacccagtcaccggtgcatgcgctgcacttctgcgaaggagcccaggctcaggggcgcccgctcctcttctcagggtctcagagtggcctggtacacatctggagcctgcagacgcggagagcggttaccaccctggatggccacggcggccagtgtgtgacctggctgcagacgctgccccaggggcgccagctcctcagtcagggccgggacctgaagctgtgcctgtgggacctcgcggagggcaggagcgctgtcgtggactccgtgtgcttggagagtgtgggcttctgccggagcagcatcctggccgggggccagccacgctggacgcttgccgtgccagggaggggcagcgacgaggttcagattctggagatgccctccaagacgtcagtgtgcgccctgaagccgaaggcagatgccaagctgggcatgcccatgtgcctgcggctgtggcaggccgactgcagctcccgcccactccttctggccggctatgaggatggatcggtggtcctgtgggacgtctctgagcagaaggtgtgcagccgcatcgcctgccatgaggagcccgtcatggaccttgactttgactcccagaaggccaggggcatctcaagctccgcggggaaggcgctggctgtctggagcctggacgggcagcaggccctgcaggtgcgtgggactcatgaactcaccaatcccgggatcgccgaggtcacgatccggccagatcgcaagatcctggccaccgcagcttgggacca

SEQ ID NO: 64027 - DNA, 1095 bp, Homo sapiens
gcttcgttgactatggcccctgggtgtgcaccaaggccttctgccttgacccagccatggcctgacattgcgtgtcttggggccaccagcaaggctcagtgagagtgtgagcccaagggcgtgcttcccactcaggcaggccagcccctcctgccccactgcccaccccttcccccatgtgctccggctcaactcaagtgaccccaccacaggccctgtcccatgcacaaatatgccacagacaggcaaggacacactaattttattttgaaatagggactgcaagggcaggctcgtattgagaaggatggccccctgggtgtgatgagcttggggcctcatctgctcaccgtgcacgccctggagtcctggctacccagcatgtccaaactaagggcaccccccttgggaaagggattgcagagacggggagcttctctgtatccccttacaggcaggacagggggctggggtgcagaagcacttctgggggagacctgccctaagctttccaagctgggaggaaggggacgatctggggtccagcaggctcctggggcttggggtccacttcccgtttcttcccttgggaattggaagaaccgaaccaaaagcctcttctgttggggcaaggactgagggggtgggcctgtatctccagatgttgaagccagggccctgggccccaaccctgagggggccaacctagagggaggtggtgggctcctggtgactggtattaatatgtagggggagacctgaggttgcagtcccatcctggtgtccaggtgccatctgggctagggaggcatctcctcaacaggaatcctgagcagggtttagagcacagtgggcaggagggggagggtctggacttcagcagggcctcgtgctagatgatgccatattgggccagctcgtgcagctccaggtggttgaaggcctcccaagggcagatgactgtgatgtctgttcccaggccttccattccagggatgtcgtccccaaaccgtgggccgtgtcgggggcggctcccccaggtcgcctttcccatcccgggagctcacctcctgcagccgtttcaccagcagcgtc

SEQ ID NO: 64028 - DNA, 1323 bp, Homo sapiens
ttttttttttttcccatagttgcttttatttttccctaaaaaaaagagtccattttcttatacagacattcatttatgtaagacccacatcaggctttttctaaagtgccaaaacccgtgcaatccccataacttcaggtgagaattataatgggcagaagaatgtatcaactaaaatactcaaggccatctcaaatcctgaagagtccctggtttctgtgacaagggggaattttgctagcaaataagtaaaatccaggtaaatatgctctaaatcttcatcttcaggttcttaattctttaacatattgtatcagattttgtattcaaatctaattatattttgtaaaaaatgttttaaaaattcctagataaatttcattcattaattttctattttattctctatacccttctttgttttgtctgtcttcttttctttccacaaattcccaaggacaatccctaaaaaaactattagtcccagtgttcggttggagataaatttattccaacaatcctcaggtctgtggatgtctagagtgtaaatctggtgagtcagatgggctcctacagcacccagggcagcgtagtagggagcagtctgtccactgttcacacccactaggctcagtgcccccagcattgcaacactgaagccactgagccacggcttggtattttctccgaaccgcagagccgttgacttaagaccaatcaaaacatcatctcttttgtcctgatgggcataaatagtgtcatatattagtgtccacataactccagaaaaataaagaggcaggcaaacagatggatcacaggaacccttgatagcagaccatccaagtaacgctccccaattaaatgtcaagcccaaggctagttgaggccagtatgaaattcttttcattagtgggtaggtgatgacaagaagtaaggatcctgctcccagagctatactgtagtaatttagacacagaagaacacccagtgccagggttagctgtcccccaagaaaaacaaaggactgaaaagttgaaatgtctccagcggctattggacgattggctgttcttgtaacctttttatcatagtcctggtcccacatgtcattaatagtacagcctgctccacgcatcagaatagctccagtgccaaagagggagagcatgtaccaatctggaaaacaacctggttcagctgccaaaccaatgctccaggtacatggtaaatacagaagccaggttccaatgggcttgtccaaccgcatgaggcgcaagtacggctgcagggggcggggcgcagagtccacctcgtgccgaa

SEQ ID NO: 64029 - DNA, 2414 bp, Homo sapiens
ttttttttttttacagataaacattttaattgtttaaatatattactttcatgatctttttgaaatcgcacttgtactgtactaatcaacagccaaagcatataagaaagtttaaaaccaaaaatattctgacatgaacacatgacaggaaccgctgctatgtaaagtaacatacactgctccccaagaacaatgatatttttaggagataattcatcttaaccatgtgccaggacaaaatttgtaatcaaaggctggaagaaatatatattagtgcctgctttttaaaagtttattttacattttaaaaacagtatttttctcataaaaaaaaaaatccaggaagggcctaactccatggtttttataccatatgtacatgaaagctgacagagagcctgacaaatgttttggatgtaacagtatgaacacctatgagctgggactacttttgaatcaaaattaaaaaacccaaattaagcactgcttaagaaaaaaaaaatccagtttctgaacaaccaaaagagaacagagttagatatgtacaaaaccaggtattaaaaaacagaaagaaatacagcacacaaaaaactcaaacaacccatatgtagtgaactgtatatactgcagttaatgaaaaccctcctacaagaagtgatttaggatttgaaattttaaaaatctaagtacttcagtaacaacatacaataacaacattaagtgtatattgccatctttgtcattttctatctataccactctcccttctgaaaacaagaatcactagccaatcacttatacaaatttgaggcaattaatccatatttgttttcagtaaggaaaaaaagatgtacctcttcccgtcaataaagaaataacacaaattaaagctataaaatttaagcatgggcatatgtatttccaattctccttaataagtaattccaaactggaataatgtggggtttgtgactaagtagtaacaaattaaaagaaaatagactgtctctggcagtgatttccatactagtgcaatgttacttcccatatgctgaattatatttaaatgattttatgtattttaattcagtaggtgccaatttgagtttataaaatccttaattttattctttgtgcagaaaagtttcaatttgagatactctatgaagccaaaacaaaacaaaacaaaacaaaaaacctgtattttgctactagtagtatgaataccaaataaagatacaaggattcaaagtttgtggaagttcctgaagaaaaatctctgaggtgttctacgtatcttgatacttcaattatcaattagttttgaacattctagtttaagattatctcagaaaataattctctgtaatataactctgaactaaacagctgcacccaaagcagaaacaatctgggtcattctgaacgagatcaaactgaggccatttctttttctattataatctgtgaggtgttgagtttttaagttttaaaaatggcctttaatcaaagccagctgcacctgatatagacttgttaacttatggatttcaaattagaggaccctgtaactacgggctctcataagacacatggagcaggcagcaaggggctaaccatcagccgggtaaggtcaacgttggggtgttttattttggagactttaaatatttaacatgtagctcatgtaacttcagcatccactagtgactctgctggtcagcacccaagggctggatgagtctgaggaatctcctttaaccccaaagtatgaatgctaaagagtctcaaggaaattttgattcccagcaagagttcacaaaccatcagaccaatatcaataaggtaaactgtgactctaatgctccacaaaagtaaaaagaaatttccaaattaaatgtcatcttctgcccaaccctagactccagactttgtaacaacatttttatctagtataatagactctgtagtagactgattttgaccgccacaaagagtaggagttgtcaaacttgaggagatagactcctctccctggatattgatggctgccagcatacacctcctcatgacagtcccgtcggtacacaggcacaatctcatccagcaaaggcttgttggcattctttttggctttctcttcacaaccgatgttttcttcttcctcctcgtcgtcatcgctggactcactgacatgcacgctgacagcagtgtttggagagtctgtccattcaaaatacaccccaaacccaatgtcataattgtctgtggcaaattcccaaaaaaaatatgatccttcttcatgggtgggtactcgaacagtgaccacttctcctcggcccactgtaatcacggaatctgcatcctgctgaatcctctctttgaagtctttgatctgaggtcgtgtacaccta

SEQ ID NO: 64030 - DNA, 3180 bp, Homo sapiens
tgaaatcgaattgccgtgctcagaggatttgaatttggaaactttgtcccaagcacatgtctacataattgcaggagcctgcttgtctctgggttttcgatttgctggctcagaaaacttatcagcatttaactgtttgcataaatttgccaaagattttatgacttatttgtctgcacctaatgcttctgttacaggtcctcataacctagaaacttgtctgagcgtggtgctgctgtctctcgccatggtcatggctggctcaggaaacctaaaggttttgcagctttgtcgcttcttacacatgaaaacgggtggtgaaatgaactatggttttcacttagcccaccacatggcccttggacttctatttttgggaggaggaaggtactctttgagcacatcaaattcttccattgccgctcttctctgtgccctttatccgcacttcccagctcacagcactgacaaccggtatcatctccaggctctccggcacctctatgtgctggccgcggagcccaggcttctagtgcctgtggatgtggacacaaacacgccctgctatgccctcttagaagttacctacaagggcactcagtggtatgaacaaaccaaagaagaattgatggctcctacccttcttccagaactccatcttttaaagcagattaaagtaaaaggcccaagatactgggaactgctcatagatttaagcaaaggaacacaacacttgaagtccatcctttccaaggatggggttttatatgttaaactccgggcgggtcagctctcctacaaagaagatccaatgggatggcaaagtttgttggctcagactgttgctaacaggaactctgaagcccgggctttcaagccagaaacaatctcagcattcacttctgatccagcacttctgtcatttgctgaatatttctgcaagccaactgtgaacatgggtcagaaacaggaaattctggatctcttttcttcagtactctatgaatgtgttacccaggagaccccagagatgttgcctgcatacatagcaatggatcaggctataagaagacttgggagaagagaaatgtctgagacttctgaactttggcagataaagttggtgttagagtttttcagctcccgaagccatcaggagcggctgcagaaccaccctaagcgggggctctttatgaactcggaattcctccctgttgtgaagtgcaccattgataataccctggaccagtggctacaagtcgggggtgatatgtgtgtgcacgcctacctcagcgggcagcccttggaggaatcacagctgagcatgctggcctgcttcctcgtctaccactctgtgccagctccacagcacctgccacctataggactagaagggagcacaagctttgctgaactgctcttcaaatttaagcagctaaaaatgccagtgcgagctttgctgagattggctcctttgcttcttggaaatccacagccaatggtgatgtgaccgtgtctggcggtgaacctaccctgaaacgtgacttctgcacaacaaacgtgaccaaacatcaaagctaaagcaatgtttataaagttttatggtataactagggggaaatgagctgcacaaacctcaatgtattttaaatctgttgctgtcatcattaacggtatatgacatataaaagcaagttaaaatttacttttgtaaataaagtttttggtttgtttccaaaactcttgatgattgctttagttttggacttatagaatagagcaggggttgctggagtgaatattgatttttaaagtctttgaactgtggtggtataggtgaagtgactatgcccaaaaatgccaagttttaaaagaagctatgtcataaagttttactttctgtgggcaaaagagcgctttagccatttcctcagatgtcacagttgtcctgtctaaaataagtttgtacttctggtgacaatgccagacactcttatgatgtgatcaccttaaacaggagaaggagatttttgccctcagttgctcaacatgaagtactgtggactgaattgtgtcctcccagaattatatattgaggccctaatccctgtgtgactgtattaggcaatagggcatataggagattactaaggttaagtgaggtcatcataagggtggggccttaattcagtagaattggtggcctcctaagcagaggaagagagatttttctttctctctctgccatgtgaagacagtgaggagtcggccgtctgcaagccaagaagagcccttatcaggaacagacttggctagcaccttcatcgtggacctccagcctccagaattgcaagaaaatacatttccgtcgttgaaaccacccagtctgtggtattttgttatggcagcccaggcagactaatacgtgaagcctgctctaaatagataaaataagaaattactacagagggctctttagaaattgtatttaaaaacaagacaatccatatttacctaagatttacagaatgtatgtctataaaaggagggatttctggactagatgatgatgaaaaatgttcatataaaggcacctccagcttcgagttgccaacacaggaggaagaatgctccctgctgttcagatgctgatatgtgtcctgtgcttcctggaatggccagtgggatcataagctggtagaagcaagaccttcatccactgacttcatatttcttccacatcctgaactgtggtgtttgactttaaaaataaattaaagcaaatagaaatgtttcccattgagattttggcaaaaacccacatgacatttgcgtctgccagagtagacttggaaggcatgcaccctggaggccaagtggtattctctggactctctgtccttgcatttgcgtggctgccccgaggactcgcttcttcctggatgtgaagcagaggcacgatggggctgactgagaggctgaaatgtgcttctcttcacagttacatagttttcttctaattaaaaataaattttaagtggtagattatgaaaattccatttgaatcaagattttaaaaattcaatatcaaaccagttgttactgtcttcactctccgttgtttacgattgtgtgcttttccctgaataaagaatgactggagagacattaaaaaaaaaa

SEQ ID NO: 64031 - DNA, 1633 bp, Homo sapiens
cgccgtcccctacacggatgaggcccggcggtcgcgcctcaaccggctgtacggaatccaaggcatccccacgctcatcatgctggacccgcagggcgaggtgatcacgcggcaggggcgggtggaggtgctgaacgacgaggactgccgggagttcccctggcaccccaagcccgtgctggagctctccgactccaacgccgcgcagcttaacgagggcccctgcctcgtcctttttgtagattctgaggatgacggagagtccgaggcggccaagcagctgattcagccgatagctgagaaaatcattgccaagtacaaagccaaagaggaggaggcaccccttctgttcttcgtagccggggaggatgacatgactgactccctgcgagattacaccaacctgcctgaggctgcccctttgctcaccatcctggacatgtcagcccgggccaagtacgtgatggacgtggaggagatcacccccgccatcgtggaggcctttgtgaatgacttcctagcagagaagctcaaaccggagcccatctagcgtggctccggcctcctgagacgttatttaaaactcagccttctcctcctccccctccttccttccgcccttggacttacccagcgtgccccgaatcccaccacccaagtgtccagcctctctgtggtgccttgtttctgcagtaaactcctcagccagcaccctggggtgcggaatcagcagcggcagagtccaccgtgtttggagactctgtttgggagcacgggatggccgggggcccggccagagcggggctgcatggctttcgcaaagtcactagcttttggtgaaggatctgccagggtgtcctgggcagagtgagcgtggagggccggtgggtcccgctcgggctctgactctgacgtcggcacacacggccccggacggccagaggggaaccgccgggtgacacctgcgtggaggctgagctgagaaagggcctccgcttagagctgcgggtgaggacgtccttttctaagcgacacagtcttcctcggtctgagagaaaagcagcccactcttgtgttctcaggcaggggatctccaaatgcaaaaggaagcttgtagaggttttttgggtgagaagaaaaatgtagctaaggtaatggttcatatcatacaaacagctcccacgatcctgaaattctgttaacgaatccttctctttggacatcttcccaagaaacttagccctgagtcctaggaggagcacctctgcaccagcacggacctctcgctccacccagctctgtgcccaaggcccctgatctctgctgaggtgcccacacccacgttcgatcacccctgccattcccttttattttcttttttttgagatggagtcttgctctgtcgcccaggctggagtgcagtggcaccatcttggctcacttcaacctccgcccccaaggttcaagtgattctcctgcctcagcctcccgagtagctgggattacaggcacccgccaccgtacctggctaatttttgtatttttagtagagatggggtttcaccatgttggccaggctggtctcgaactcctgacctcagtgatcacccgcttcggctccaaaggctgggat

SEQ ID NO: 64032 - DNA, 2214 bp, Homo sapiens
  misc_feature (1)...(2214): n = a,t,c or g
atcaaaataggcaaaggctgttgggaagggcaaattttttaacgccctgttttggctttgcctccgacaataaaagataaccccatcctacgaatatcaagaccaacttccatttccgcaataaaatcaccaaactccgttgccccggtaaacaacagcccagttcccattgcaaagtctgaagcccaacatggtgatgattctgctgcttgataaattttcaggtattcgtcagccgtaagtcttgatctccttacctctgattttgctgcgcgagtggcagcgacatggtttgttgttatatggccttcagctattgcctctcggaatgcatcgctcagtgttgatctgattaacttggctgacgccgccttgccctcgtctatgtatccattgagcattgccgcaatttcttttgtggtgatgtcttcaagtggagcatcaggcagacccctccttattgctttaattttgctcatgtaatttatgagtgtcttctgcttgattcctctgctggccaggattttttcgtagcgatcaagccatgaatgtaaccgtaacggaattatcactgttggattctcgctgtcagaggcttgtgtttgtgtcctgaaaataactcaatgttggcctgtatagcttctagtgattgcgattcgcctgtctcttgcctaatccaaactctttaacccgtcccttggggtcccctggtaagcaagtaaatatcccattgtttccttaataataaaaggttaagggggtaaaatcccggcgctcatgacttcggccttccttccccatttctggatcctcttcaaaaaggccacctgttactgggtcgatttaagtcaacctttaccgctggattcgtgggaacaggatactctcttccatccttaaccggaggtgggaatatcctgcattcccgaacccatcgacgaactgtttcaaggcttcttggacgtcgctggcgtgcgttccactcctgaagtgtncaantacatcgcaaagtctccgnaattacacgcagaaaaaaaccgccaatcaggcggcttggtgntccttcaggtcntcaattcgaatattggttacgtctgcatgtgctatctgcgcccatatcatccagtggncgtagnagncgttgatgttctccgcttcgataactctgttgaatggctctccattccattctcctgtgactcggaagtgcatttatcatctccataaaacaaaacccgccgtagcgagttcagataaaataaatccccgcgagtgcgaggattgttatgtaatattgggtttaatcatctatatgttttgtacagagagggcaagtatcgtttccaccgtactcgtgataataattttgcacggtatcagtcatttctcgcacattgcagaatggggatttgtcttcattagacttataaaccttcatggaatatttgtatgccgactctatatctataccttcatctacataaacaccttcgtgatgtctgcatgggagacaagacaccggatctgcacaacattgataacgcccaatctttttgctcagactcttaactcattggatacttcatttattaaactccttggcaatgtatgtcgtttcagctaaacggtatcagcaatgtttatgtaaagaaacagtaaggataatacttcaacccgatgtttgagtacggtcatcatctgacactacagactctggcatcgctgtgaagacgacgcgaaattcagcattttcacaagcgttatcttttacaaaaccgatctcactctcctttgatgcgaatgccagcgtcagacatcatatgcagatactcacctgcatcctgaacccattgacctccaaccccgtaatagcgatgcgtaatgatgtcgatagttactaacgggtcttgttcgattaactgccgcagaaactcttccaggtcaccagtgcagtgcttgataacaggagtcttcccaggatggcgaacaacaagaaactggtttccgtcttcacggacttcgttgctttccagtttagcaatacgcttactcccatccgagataacaccttcgtaatactcacgctgctcgttgagttttgattttgctgtttcaagctcaacacgcagtttccctactgttagcgcaatatcctcgttctcctggtcgcggctcgtgccgaattcctgcagcgcggcgcaaaagcggtcgaag

SEQ ID NO: 64033 - DNA, 435 bp, Homo sapiens
ggaattcgtcaagatctggacacccacagctaaagctgccactgatcttactgggttaaagaaggtgattaagaagaacaagtgggaacgagatgaagacagcttgcaccatggcagcctgtttgaccagtacatgctttggttcctcctgcgtcacgtgacgcagagaggtcgtcaccaggactggagaagtggtgaagctgaatttccagatgaagaatcggatgagtcttccagcacttcagagacatctgaggaggaggtccaagaccgagtgcagtgcatgccatcctgaaggcctcatatccagtccagctacatgccacctaagtacactggactttaaaattcagtttgactaatttagaattgtcaatagattaatagatttgctttttgtcttctattttccataatatatgctgaaaaccgtct

SEQ ID NO: 64034 - DNA, 473 bp, Homo sapiens
gcggtggaattccttcagcatcaaatcctctcccctgccatacctctcccaaaaaggagaccagtaaagtgaagttttaagccagaggcagccagacaagctcccaaggaattagaatagcttccaggcaccaagatgtcactactcaaagatgacccgatacagcagggataggcgagacacattaacttcagaggatgtggcaggagtgaagaccacctgcccagtcacctgccacacgcaacagcccaggccccggcagggtgaccctctgcagagctgccccaccaagacccctggatactcctccacgctcctaagtcacttacctcaccaaagtgcttctcgatgatgttcaaagccgactggccaatttgacggttctcatgcagctgtaaagcctcaattctatcgatcccaccaagttcttctatcagaagacacaggttttccttctcagaccagttctctgc

SEQ ID NO: 64035 - DNA, 3730 bp, Homo sapiens
  misc_feature (1)...(3730): n = a,t,c or g
gtgctgggattcaaggtgtgagccactgttgcgcggaccacatctgtacttttaagggtacagctttacagtacataggaatttgagaaccacttcacaggaagagggaaacagcccaatatttatttatgtatacacataatcccaagtgtgtgctggggccaccaggcccttcctgggggaacaaggactgtcgtgcatgtgagtgacgacattaatagcatttacatactgtacagatgcaacctttgatgatacatatatttgataaaaatgagaaaacagatttgttgtagagtacctgtccacttttatagcatgagaacagtacaatcaactatttattttgcagttactcatttcagtgattgagaatttctgtgctgtgcagagagacggcctgtaattggtctcatcatccacttgattctaacatgatctctgcccaaagttccatttcttgggctttgatatttataatggcgcctgctcttcatcttgtcttacgctttccgagcaagttcaaaccagaaagaaaaggtgaggctagaagcccaaagtgagtgagtgtgaggaccacaaggaagcccaccactccacagtagatgatcaaaaccacatcctcacgtgggaggtagcacttggagagggtgtagtctgtgggcgtgatgctaccctggaaaggagaagggaaagttatgctgagagcaccaggcacaggttgaacaccgcagtcttagaaacagcagagggaagactgccttctcaggtccccctcaggtgaggcagggaacgggccctcctcacctgagaccaagggggcccagccttctccctgcacagctcacccccgaccagcccaggctccagcaggagagacaactaaggcccaagtgtgcctgagtggaaaatgtctgggacactgacctgtcaaaactggcccctggctcactgggttcccatcaaatatagtgggggatccataacagagattcagagaggcaccgtggagttccagggtcatcggtcagcgaggaacaaggagggaaaggtgtcttcctgccccttgatgctcaactaacatctgttcctagaaatacatgtgtccaggtcgtctccatgggcttttctttgcagatacttttatgtggaacaacagtggcaaatgttttcatttactttactttgaatttgaaaatgttagggattactccacctttttatgaagtaaaagaacctgtcgtaccagcatcatgagctggatgcaggagcccatggctgaaaggagttaaaacgcccagtggtcattaagtgaaacatcttttatcaacctgcaaaagctgcagcgttctctgccaggtcaaatgggcatgtttagaaaataagagaagatggctgagtatagctaatgaataaatggttgtttctttagaaaaattaacacacacagagtgtaagaggagaggatacggcccctccttgaaggataaagtccacctggagctgccctgcccttcgcttctcacatttaactgcccaggaatgtcatgctgattggttccccggaaagggtgtttggcaaggggcagtgtatggagctacgtgtagaaggagagaaatttgtgtgtggcttttgtaaaattttgacccgattgcagcaattaaaatagttgattactgtgttgatttaaatacttatgaaagctttcagacaaaaataaactttcacgtacatgatgaaactggggttgtttctnttcctccaactgaaagatgggacgctgagctcggggactcggccccgtggtgcacctcgctaggcgctgtgnntggccacttgagaaccaggcgcggctggagccaccacagcagctgacagtggccgagaagacagcaaagctaggctgttagctgcatcctcaaccaggctctcaccgctcagcagacggccgctgnatcgcttctttccttaaattacatactaaatccttattttgaaggactggtttatttttttccttaaaaatcctttggtttatttacactaaatcaaaggtaaggtcagccctttgttctcatcccagattttatatactttttacggtattttatctttataaatattttatacatttatcttataaatatttcttatatttatatattatgtataatgtaatatgtattatataaatctatataagaaaatgcattttaattttaattaagtccctaaaaaattgacttttcagttccattcacatttctaaatacatttaagttcggtgaaaaactctgaatacaaagaatagctgagactattactgacttgagggtaggaaacagaagtaggtttactggaaaaaaaaaaagcgattaaatgaaaatctgagatactgtgaaagccaggcctccacccctgtccccccaggtgataactaagtcatgaacgtttcagcaaacacctgctctagcctgggcactctgcttgttgacatgcaaggtgatgagagtcacactgtgacatgaattagcatcacgacaccctggcaaaccttttgtgatgcctcccgtgaaagcacgtcatagttctccttaaatgggatgtccctttcctctgcaggagcagcgtcttccccagaacagttagcatcacttctccgatacagaggataatgctgcaggaggacaggggcagacgtgggcagcagaggcccaggtccacaccggctggagccacgtgcctctcgggagcagttcagtctgtgagaaacttcaatgagctctgcttctgtttcagagcagatgccacagccatccccgttcagcgccacgctgttgaccatcacaaagttaatgcctttccaagaaaacagtctttcagagctgaacactttctcaaagcgttctactttgtatgtgttcatctcataatggaagccaatgtcatggtttccagcaactaccttcagctgtacatgacttgggtgtctgaacattttctgaaaccgctccacatcatccgcccaggcctcaggggtgctccacttcccttcatcaaagatatcccccaggatgaagacgacttccggctgcagcaaccacagagctgtctggaacgctctctccatctgccattcccttcgtaatttgtccagccagtggcctaggaattccccaagcaaatgggtgtcagccaaaaacatggctttgagcacaggctcacgtgtggtctgttcaccatcagaggctgtggttttcacttcaggccaattacactgaaagatcgctaagtaatagattaaaaattcacaaaatagaagcacagcaaagacaacagctatgagtttcaacagcaatgaactcttcctctttaatggatgaaaattctgtcttccaaaccccaattcgatcatcgccatttctcaagcaacaacaaatccatcaagggttcaccacgagaaaactgcagagccctggggagggtgatggcattcaggtcttagctgggcacctataattttccaggaaaatcaccaagtcacctcatcttttaaagacagagagattggtacgaggctctaagttggcatctgctccccaaaatcagaattcatttataacagccatgctttccagctctgcgcacaacgccaggcagatggggagcaccgggcggtgcgggagccctttcaccagggcagggtggcttcggtggccgagggacccg

SEQ ID NO: 64036 - DNA, 1722 bp, Homo sapiens
  misc_feature (1)...(1722): n = a,t,c or g
cctcctctaagtcttgagcccgcagttcctgagagaagaaccctgaggaacagacgttccctcgcggccctggcacctctaaccccagacatgctgctgctgctgctgcccctgctctgggggagggagagggcggaaggacagacaagtaaactgctgacgatgcagagttccgtgacggtgcaggaaggcctgtgtgtccatgtgccctgctccttctcctacccctcgcatggctggatttaccctggcccagtagttcatggctactggttccgggaaggggccaatacagaccaggatgctccagtggccacaaacaacccagctcgggcagtgtgggaggagactcgggaccgattccacctccttggggacccacataccaagaattgcaccctgagcatcagagatgccagaagaagtgatgcggggagatacttctttcgtatggagaaaggaagtataaaatggaattataaacatcaccggctctctgtgaatgtgacagccttgacccacaggcccaacatcctcatcccaggcaccctggagtccggctgcccccagaatctgacctgctctgtgccctgggcctgtgagcaggggacaccccctatgatctcctggatagggacctccgtgtcccccctggacccctccaccacccgctcctcggtgctcaccctcatcccacagccccaggaccatggcaccagcctcacctgtcaggtgaccttccctggggccagcgtgaccacgaacaagaccgtccatctcaacgtgtcctacccgcctcagaacttgaccatgactgtcttccaaggagacggcacagtatccacagtcttgggaaatggctcatctctgtcactcccagagggccagtctctgcgcctggtctgtgcagttgatgcagttgacagcaatccccctgccaggctgagcctgagctggagaggcctgaccctgtgcccctcacagccctcaaacccgggggtgctggagctgccttgggtgcacctgagggatgaagatgaattcacctgcagagctcagaaccctctcggctctcagcaggtctacctgaacgtctccctgcagagcaaagccacatcaggagtgactcanggggcggtcgggggagctggagccacagccctggtcttcctgtccttctgcgtcatcttcgttgtagtgaggtcctgcaggaagaaatcggcaaggccagcagcgggcgtgggagatacgggcatagaggatgcaaacgctgtcaggggttcagcctctcaggggcccctgactgaaccttgggcagaagacagtcccccagaccagcctcccccagcttctgcccgctcctcagtgggggaaggagagctccagtatgcatccctcagcttccagatggtgaagccttgggactcgcggggacaggaggccactgacaccgagtactcggagatcaagatccacagatgagaaactgcagagactcaccctgattgagggatcacagcccctccaggcaagggagaagtcagaggctgattcttgtagaattaacagccctcaacgtgatgagctatgataacactatgaattatgtgcagagtgaaaagcacacaggctttagagtcaaagtatctcaaacctgaatccacactgtgccctcccttttatttttttaactaaaagacagacaaattcctaaaaaaaaaa

SEQ ID NO: 64037 - DNA, 1812 bp, Homo sapiens
ccagcgaggggtaatgatgaggggggcaatccaggggtcactaaaaccttgggcagcacttgctgggtctgctggttaccgccattcttcgctaacttacttccaggtcaaagggctgggaagaagggagggagctagacagctggaaccagccagggaacgcggcagcttgcaccccaggcactgaagtgcagcgaggacaggcgccatcacccactggcagcctggccctcccgctctcaggcctcttcacaatggggtgcatatggtaagttggtgggtctgaaccaacccagaactgaggggtgaggtggagtttcagttccaaaaccactgtgggtgtgacagcatgaagccctcgctgtgaagaggagccctcccatttctcaatggtgtgtcagggaactgacacccacttctagctccctgcccccatcagggccgaggtagtcggggctggccctgtccccccatgcccgccccatggtgagtctgcacccttcctgtgacagatcccccagcaggccacacaatagagaatctggatctattgaaacatgtttaaaacggggttggtcacaacaggatgggcacaaatgggagcgggggaggggagtggggccgcaccagcccctgccagtgcctgaggctgcagcctggcgagtgcttttgcttctgcttctccacgctggtggttcgagatggtcccaagccccactggggcaggccctgccttgccctgcagaggcagggtggctccacttccccatctcctcccccatgggctgcaggggcatttatgatgcccaacaggtggcactgtcgcgctccttcctccctgtctccgtggctcagaaacaggttaagggtagaggtagatggggagacgtgggggccacacagtctccggtggcagtgagggagcttgggaccctgaggggggcatgctgactccttgctggagaaaaggcacctagataggggagctgggcttgggggcctcccagggggtcctggggtgaggtggggagggaggctgaacgaagcaggaagcagggtggtgggcagaccccaatcctggtttccaaaccctcaccggctgcgggagaaggaagaaggaaggagtcctggagcagagccctgccctggtcccctacgcctgagcaagcctcatccccttcccacctggcccccacgcaagcccagctcgacctccttcccaccttccccctgccggctccaggccttccgcagagggggtggaaggttacagaggcctcaggccgtcttggtgccggggtccacctccttgtgggcccagagctccttgtgctgcttgcggccaaacccctcgtcgtagttgcctttgctcttaaacagctgctggaagtggggtttgcagtagaactccccgtgcagcgcggcgtagctgcccaggctgagcttggtgtgacagtgcttgcagcagaagcaagagttgtggaaaatgagcttgtcggccaccagccgctccatggggtacacggtcttctggcaggcggcgcaggtctccttcacctgggcccgcaggctgaaggacttggagcgctgcaccgtgctgctgccgccgcctttggcgtcatgagagggggtggcctgggcggctcctgcagcctggaacatggctcgttggaggtggaagcctcgggtggagaagcggcacccgctgggttcaggcccggcctgggccgcggggcgggatcggtctccgggggcgcacgggtacgaggagggcgcgggcgcgagctgccggacgcgtgggtcgacccgagg

SEQ ID NO: 64038 - DNA, 4602 bp, Homo sapiens
gcatctggaaatcttgacaaaaatgccagattttctgccatctacaggcaagacagcaataagctatccaatgatgacatgctcaagttacttgcagactttcggaaacctgagaagatggctaagctcccagtgattttaggcaatctagacattacaattgataatgtttcctcagacttccctaattatgttaattcatcatacattcccacaaaacaatttgaaacctgcagtaaaactcccatcacgtttgaagtggaggaatttgtgccctgcataccaaaacacactcagccttacaccatctacaccaatcacctttacgtttatcctaagtacttgaaatacgacagtcagaagtcttttgccaaggctagaaatattgcgatttgcattgaattcaaagattcagatgaggaagactctcagccccttaagtgcatttatggcagacctggtgggccagttttcacaagaagcgcctttgctgcagttttacaccatcaccaaaacccagaattttatgatgagattaaaatagagttgcccactcagctgcatgaaaagcaccacctgttgctcacattcttccatgtcagctgtgacaactcaagtaaaggaagcacgaagaagagggatgtcgttgaaacccaagttggctactcctggcttcccctcctgaaagacggaagggtggtgacaagcgagcagcacatcccggtctcggcgaaccttccttcgggctatcttggctaccaggagcttgggatgggcaggcattatggtccggaaattaaatgggtagatggaggcaagccactgctgaaaatttccactcatctggtttctacagtgtatactcaggatcagcatttacataattttttccagtactgtcagaaaaccgaatctggagcccaagccttaggaaacgaacttgtaaagtaccttaagagtctgcatgcgatggaaggccacgtgatgatcgccttcttgcccactatcctaaaccagctgttccgagtcctcaccagagccacacaggaagaagtcgcggttaacgtgactcgggtcattattcatgtggttgcccagtgccatgaggaaggattggagagccacttgaggtcatatgttaagtacgcgtataaggctgagccatatgttgcctctgaatacaagacagtgcatgaagaactgaccaaatccatgaccacgattctcaagccttctgccgatttcctcaccagcaacaaactactgaagtactcatggtttttctttgatgtactgatcaaatctatggctcagcatttgatagagaactccaaagttaagttgctgcgaaaccagagatttcctgcatcctatcatcatgcagtggaaaccgttgtaaatatgctgatgccacacatcactcagaagtttcgagataatccagaggcatctaagaacgcgaatcatagccttgctgtcttcatcaagagatgtttcaccttcatggacaggggctttgtcttcaagcagatcaacaactacattagctgttttgctcctggagacccaaagaccctctttgaatacaagtttgaatttctccgtgtagtgtgcaaccatgaacattatattccgttgaacttaccaatgccatttggaaaaggcaggattcaaagataccaagacctccagcttgactactcattaacagatgagttctgcagaaaccacttcttggtgggactgttactgagggaggtggggacagccctccaggagttccgggaggtccgtctgatcgccatcagtgtgctcaagaacctgctgataaagcattcttttgatgacagatatgcttcaaggagccatcaggcaaggatagccaccctctacctgcctctgtttggtctgctgattgaaaacgtccagcggatcaatgtgagggatgtgtcacccttccctgtgaacgcgggcatgactgtgaaggatgaatccctggctctaccagctgtgaatccgctggtgacgccgcagaagggaagcaccctggacaacagcctgcacaaggacctgctgggcgccatctccggcattgcttctccatatacaacctcaactccaaacatcaacagtgtgagaaatgctgattcgagaggatctctcataagcacagattcgggtaacagccttccagaaaggaatagtgagaagagcaattccctggataagcaccaacaaagtagcacattgggaaattccgtggttcgctgtgataaacttgaccagtctgagattaagagcctactgatgtgtttcctctacatcttaaagagcatgtctgatgatgctttgtttacatattggaacaaggcttcaacatctgaacttatggatttttttacaatatctgaagtctgcctgcaccagttccagtacatggggaagcgatacatagccagaacaggaatgatgcatgccagattgcagcagctgggcagcctggataactctctcacttttaaccacagctatggccactcggacgcagatgttctgcaccagtcattacttgaagccaacattgctactgaggtttgcctgacagctctggacacgctttctctatttacattggcgtttaagaaccagctcctggccgaccatggacataatcctctcatgaaaaaagtttttgatgtctacctgtgttttcttcaaaaacatcagtctgaaacggctttaaaaaatgtcttcactgccttaaggtccttaatttataagtttccctcaacattctatgaagggagagcggacatgtgtgcggctctgtgttacgagattctcaagtgctgtaactccaagctgagctccatcaggacggaggcctcccagctgctctacttcctgatgaggaacaactttgattacactggaaagaagtcctttgtccggacacatttgcaagtcatcatatctgtcagccagctgatagcagacgttgttggcattgggggaaccagattccagcagtccctgtccatcatcaacaactgtgccaacagtgaccggcttattaagcacaccagcttctcctctgatgtgaaggacttaaccaaaaggatacgcacggtgctaatggccaccgcccagatgaaggagcatgagaacgacccagagatgctggtggacctccagtacagcctggccaaatcctatgccagcacgcccgagctcaggaagacgtggctcgacagcatggccaggatccatgtcaaaaatggcgatctctcagaggcagcaatgtgctatgtccacgtaacagccctagtggcagaatatctcacacggaaagaagcagtccagtgggagccgccccttctcccccacagccatagcgcctgcctgaggaggagccggggaggcgtgtttagacaaggatgcaccgccttcagggtcattaccccaaacatcgacgaggaggcctccatgatggaagacgtggggatgcaggatgtccatttcaacgaggatgtgctgatggagctccttgagcagtgcgcagatggactctggaaagccgagcgctacgagctcattgccgacatctacaaacttatcatccccatttatgagaagcggagggattttgagaggctggcccatctgtatgacacgctgcaccgggcctacagcaaagtgaccgaggtcatgcactcgggccgcaggcttctggggacctacttccgggtagccttcttcgggcaggcagcgcaataccagtttacagacagtgaaacagatgtggagggattctttgaagatgaagatggaaaggagtatatttacaaggaacccaaactcacaccgctgtcggaaatttctcagagactccttaaactgtactcggataaatttggttctgaaaatgtcaaaatgatacaggattctggcaaggtcaaccctaaggatctggattctaagtatgcctacatccaggtgactcacgtcatccccttctttgacgaaaaagagttgcaagaaaggaaaacagagtttgagagatcccacaacatccgccgcttcatgtttgagatgccatttacgcagaccgggaagaggcagggcggggtggaagagcagtgcaaacggcgcaccatcctgacagccatacactgcttcccttatgtgaagaagcgcatccctgtcatgtaccagcaccacactgacctgaaccccatcgaggtggccattgacgagatgagtaagaaggtggcggagctccggcagctgtgctcctcggccgaggtggacatgatcaaactgcagctcaaactccagggcagcgtgagtgttcaggtcaatgctggcccactagcatatgcgcgagctttcttagatgatacaaacacaaagcgatatcctgacaataaagtgaagctgcttaaggaagttttcaggcaatttgtggaagcttgcggtcaagccttagcggtaaacgaacgtctgattaaagaagaccagctcgagtatcaggaagaaatgaaagccaactacagggaaatggcgaaggagctttctgaaatcatgcatgagcagctggga

SEQ ID NO: 64039 - DNA, 1297 bp, Homo sapiens
  misc_feature (1)...(1297): n = a,t,c or g
ttttttttttttggggtcatatttttgttcactgaaaggaccaaccagtttcatcaaaacaaagctttagagaaagagaaactgagtaattcatcttgtcagttacagttcacatatatgcacacacatacaaactggctcagcatcagtgaaacataactattcaaatacaaaagtataaaaaacctctttaaaaaaccaatagcagccaaaacagaacatttgtaaacaaaaccacaactatcagccctgtgcttaaacacagaatctgcattcttttgaaacattaagtatatgcaataaagagaatatagaccatctttttccttaatatacaatacccaatatctaaaacaatgtcaccaataatagacacaaatcggtgttatcataaggcatgttgaacagtctttttcacagtactcaggggcatcatgttgctgcagaggccacactttccagaagttttctcctcgctgtgatcctcgcacaccgggggcactcggaggactggaagcactgtttgtgaaagcaagccctgcacgctgaacatcttctacatgttgctgtctgaaatgggaagatgacagtcgtattctggcaaaattcacaaataaagccctttccttgacacagctcacagccagccacatgtgcaagggaagctttcagaatgtccttgagtaagggtgccagcagccctttcttgatcctgaccaggtcctcaagggagaacaggtggagctcatcagtcaagtgtcccggcacctgctcgaactcctttaatgcactgttagcaaacctacaggtcttcaacagcttcttgatatggaagagctgctcctgaatttccttcactctgtccagctccttggctttcgcatacaggctttggccgatgctcagcaaattgaaaatgggctggtgccatatgctgtcgagcagctgtttggagaaattgctgacgtagtacttcttgaagtcccacatcatcaggattcgggcagggatgcacgactctgcatatgagtggcagcagtcacagaaatacttccctaggtattcgcagtaccggagccgcttcacaaacttaggctctactggagttccacagccggcacagaaaaaattctgggctgccaccacaaggtccctcttgagtggtggatgaatattaaatatgatttcaaatctaggaggagcccagtcttcagtccctctgatcctagacttaaatttaatttcctgtactacattcatactggattcaaagtcttttcggtnnnccccacactga

SEQ ID NO: 64040 - DNA, 2071 bp, Homo sapiens
taaattagaatatttgtattgttttttttaaagtttactgaaaacttttattgtaatcaaaaagtgacataacagggttgtaatgaattcagcaaatcattctgctgatattttagaacttatatcagcttttgccaggcaattaaaaaattcaaatgtgaaaatttcacattacagtaaactccaccccaactaattaatggtggttaaaaataataggccctagcaaaacctctcatgttacatggtcacaactcacaattctgtacaaaagttcgtgttataaagctctgatgtaaaaatcaaataatcaagcagcaatattttaagtgcagcacagggtcttccatgtcattatttacaaggcttgaatctctttacattataacaaaatttaatacagatgacttagtaattaagtcaatttaaaaaatctgtctttttacacagtgacagatttcactttttggtcatctttctccttctccttctctttatctttgttcttctttgacttctttttcttgtgtttgtgtttttggcttttttccaattccacttcagtgcctgcatgtttcttatgcttcttatgctttttatgtttcttgtgttttttcttttccttctttttcttcttcttcttgctgtcctgactttctgctgagctggcactgctactgtggcttcgggtctggcttccagaaggactgtggcttctgctggggctgacgctggggctgctgtggctctgattcctgcttatgcccacctggacaactgctgctgtgtccaggctctcttttgctttctccactattttatctttcaggtccttagaaatgtttcctgaagattcctcttcttttacagaaacattactttcactgtcactttcattatagtctggttcaaaagcagcttcatcagtttctctagttaagtcagaggaaagtctagaggaatgacttaactggggtttaggcttgacagtactcttgtcaatttgcccagtaatttgctctttttcaacctgtgtctctggtgggttaagtatataaagtagtttattgccacttgactctttattgttccttgcttctaatacatgcttctcacgatccttacaaggatttttatctacagattttgtctcttcatttggccgtttagtatcataagtggctttgtgatcatgaggttttctgtctcttgagggactagaattactttttttggaatctcctgttccttttttaggcaaatctctctcttcccttggtttatttttctgtccagatgcagaatctttattccgagaaggagagtcttttcgtcttgttaattcattcttttcatctctacgtttggaacttgaatactctctggtgtcatagtcagtttttttgtctctattgggagtgaagtctttatttgaggaagcacgagtggaatcatgtttatctgacgttctagcctctttggaagattgagacagacttttaaaatttccttgttcattcagacggtccaaattactctctttctctggctgagtgctgttcttcctcttttcagggttctccttttccaacactgaataatctcgatctttggttttccctttttcactagatgcagagttttttgaacttttaacctcatgttgtatgatttcatggctcacgtccttggtgaatttctgaattttctcggatggctcactttctttctcaggatacttgactatatttgatggctttgtactaacattttttataacactagcaggttttcctacacttgatataggctgtgtggatttaacatcttcttcttcagattcaaagtcatctttatcccatttggattgaggaacctgaatcataatgataacatcttcagctggcgcggtattgtcattattatattcttccatcgttttaatcacagttcgctttgtatctgttttttcttcagatttccgcacaggactgcctccagttgagctcgtactggtgtaatccaccagagttgagctggatccttcagttccagtcacttttcgtctgac

SEQ ID NO: 64041 - DNA, 6774 bp, Homo sapiens
ccggacagtgccgtggaattcgagggtttcagattattaacgttttagtgtagtcgatgtatttccatcacatgtatcgcggggacttggcagtttatcctttgctccccagctctccttacacagccaccctccgtctcccttacccacctaccactttcatgaagagaataaaaccagtaggaagctcaggtacatagtgtttcatcactgtctcccttactgcttttttaatgacaggctgtgctgtcataaatacacttgggtttgtttgaatcactagaaaagcccaatatgataaatgtaaacatgtgtggtttaagatttgcagtcctgcttgatttgcgtggcaagaagagttcccatgaaggaaagaccagttcttccctcatcagaaagttttactactcgccaggatctccaaggcaagatcacgtctctggataccagcaccatgagagcagccatgaaaccaggctgggaggacctggtaagaaggtgtattcagaagttccatgcgcagcatgaaggagaatctgtgtcctatgctaagaggcatcatcatgaagtactgagacaaggattggcattcagtcaaatctatcgtttttccttgtctgatggcactcttgttgctgcacaaacgaagagcaaactcatccgttctcagactactaatgaacctcaacttgtaatatctttacatatgcttcacagagagcagaatgtgtgtgtgatgaatccggatctgactggacaaacgatggggaagccactgaatccaattagctctaacagccctgcccatcaggccctgtgcagtgggaacccaggtcaggacatgaccctcagtagcaatataaattttcccataaatggcccaaaggaacaaatgggcatgcccatgggcaggtttggtggttctgggggaatgaaccatgtgtcaggcatgcaagcaaccactcctcagggtagtaactatgcactcaaaatgaacagcccctcacaaagcagccctggcatgaatccaggacagcccacctccatgctttcaccaaggcatcgcatgagccctggagtggctggcagccctcgaatcccacccagtcagttttcccctgcaggaagcttgcattcccctgtgggagtttgcagcagcacaggaaatagccatagttataccaacagctccctcaatgcacttcaggccctcagcgaggggcacggggtctcattagggtcatcgttggcttcaccagacctaaaaatgggcaatttgcaaaactccccagttaatatgaatcctcccccactcagcaagatgggaagcttggactcaaaagactgttttggactatatggggagccctctgaaggtacaactggacaagcagagagcagctgccatcctggagagcaaaaggaaacaaatgaccccaacctgcccccggccgtgagcagtgagagagctgacgggcagagcagactgcatgacagcaaagggcagaccaaactcctgcagctgctgaccaccaaatctgatcagatggagccctcgcccttagccagctctttgtcggatacaaacaaagactccacaggtagcttgcctggttctgggtctacacatggaacctcgctcaaggagaagcataaaattttgcacagactcttgcaggacagcagttcccctgtggacttggccaagttaacagcagaagccacaggcaaagacctgagccaggagtccagcagcacagctcctggatcagaagtgactattaaacaagagccggtgagccccaagaagaaagagaatgcactacttcgctatttgctagataaagatgatactaaagatattggtttaccagaaataacccccaaacttgagagactggacagtaagacagatcctgccagtaacacaaaattaatagcaatgaaaactgagaaggaggagatgagctttgagcctggtgaccagcctggcagtgagctggacaacttggaggagattttggatgatttgcagaatagtcaattaccacagcttttcccagacacgaggccaggcgcccctgctggatcagttgacaagcaagccatcatcaatgacctcatgcaactcacagctgaaaacagccctgtcacacctgttggagcccagaaaacagcactgcgaatttcacagagcacttttaataacccacgaccagggcaactgggcaggttattgccaaaccagaatttaccacttgacatcacattgcaaagcccaactggtgctggacctttcccaccaatcagaaacagtagtccctactcagtgatacctcagccaggaatgatgggtaatcaagggatgataggaaaccaaggaaatttagggaacagtagcacaggaatgattggtaacagtgcttctcggcctactatgccatctggagaatgggcaccgcagagttcggctgtgagagtcacctgtgctgctaccaccagtgccatgaaccggccagtccaaggaggtatgattcggaacccagcagccagcatccccatgaggcccagcagccagcctggccaaagacagacgcttcagtctcaggtcatgaatatagggccatctgaattagagatgaacatggggggacctcagtatagccaacaacaagctcctccaaatcagactgccccatggcctgaaagcatcctgcctatagaccaggcgtcttttgccagccaaaacaggcagccatttggcagttctccagatgacttgctatgtccacatcctgcagctgagtctccgagtgatgagggagctctcctggaccagctgtatctggccttgcggaattttgatggcctggaggagattgatagagccttaggaatacccgaactggtcagccagagccaagcagtagatccagaacagttctcaagtcaggattccaacatcatgctggagcagaaggcgcccgttttcccacagcagtatgcatctcaggcacaaatggcccagggtagctattctcccatgcaagatccaaactttcacaccatgggacagcggcctagttatgccacactccgtatgcagcccagaccgggcctcaggcccacgggcctagtgcagaaccagccaaatcaactaagacttcaacttcagcatcgcctccaagcacagcagaatcgccagccacttatgaatcaaatcagcaatgtttccaatgtgaacttgactctgaggcctggagtaccaacacaggcacctattaatgcacagatgctggcccagagacagagggaaatcctgaaccagcatcttcgacagagacaaatgcatcagcaacagcaagttcagcaacgaactttgatgatgagaggacaagggttgaatatgacaccaagcatggtggctcctagtggtatgccagcaactatgagcaaccctcggattccccaggcaaatgcacagcagtttccatttcctccaaactacggaataagtcagcaacctgatccaggctttactggggctacgactccccagagcccacttatgtcaccccgaatggcacatacacagagtcccatgatgcaacagtctcaggccaacccagcctatcaggccccctccgacataaatggatgggcgcaggggaacatgggcggaaacagcatgttttcccagcagtccccaccacactttgggcagcaagcaaacaccagcatgtacagtaacaacatgaacatcaatgtgtccatggcgaccaacacaggtggcatgagcagcatgaaccagatgacaggacagatcagcatgacctcagtgacctccgtgcctacgtcagggctgtcctccatgggtcccgagcaggttaatgatcctgctctgaggggaggcaacctgttcccaaaccagctgcctggaatggatatgattaagcaggagggagacacaacacggaaatattgctgacactgctgaagccagttgcttcttcagctgaccgggctcacttgctcaaaacacttccagtctggagagctgtgtctatttgtttcaacccaactgacctgccagccggttctgctagagcagacaggcctggccctgggttcccagggtggcgtccactcggctgtggcaggaggagctgcctcttctcttgacagtctgaagctcgcatccagacagtcgctcagtctgttcactgcattcaccttagtgcaacttagatctctcctgcaaaagtaaatgttgacaggcaaatttcatacccatgtcagattgaatgtatttaaatgtatgtatttaaggagaaccatgctcttgttctgttcctgttcggttccagacactggtttcttgctttgttttccctggctaacagtctagtgcaaaagattaagattttatctgggggaaagaaaagaattttttaaaaaattaaactaaagatgttttaagctaaagcctgaatttgggatggaagcaggacagacaccgtggacagcgctgtatttacagacacacccagtgcgtgaagaccaacaaagtcacggtcgtatctctagaaagctttaaagaccatgttggaaagagtctccagttactgaacagatgaaaagggagcctgtgagagggctgttaacattagcaaatattttttcccttgttttttcctttgttaaaaccaaactggttcaccctgaatcatgaattgagaaagaaataattttcatttctaaattaagtcccttttagtttgatcagacagcttgaatcagcatctcttcttccctgtcagcctgactcttcccttcccctctctcattccccatactccctattttcattccttttttaaaaaataatataagctacagaaaccaggtaagccctttatttccttaaatgttttgccagccacttaccaattgctaagtattgaatttcagaaaaaaaaaatgcatttactggcaaggagaagagcaaagttaaggcttgataccaatcgagctaaggatacctgctttggaagcatgtttattctgttccccagcaactctggcctccaaaatgggagaaaacgccagtgtgtttaaattgatagcagatatcacgacagatttaacctctgccatgtgttttatattttgttttttagcagtgctgactaagccgaagttttgtaaggtacataaaatcaaatttatatgtaaacaagcaataatttaagttgagaacttatgtgttttaattgtataatttttgtgaggtatacatattgtggaattgactaaaaaatgaggtaattcagtattaaattagatatcttcatagcaatgtctcctaaaggtgttttgtaaaggatatcaatgccttgattagacctattttgtatacttaagactttttattttctaaaccttgtgattctgcttataagtcatttatctaatctatatgatatgcagccgctgtaggaaccaattcttgatttttatatgtttatattctttcttaatgaaccttagaaagactacatgttactaagcaggccacttttatggttgtttttcttgcccactctggtaggggaaaaatcttttattaataggtgtcagtttcagacaactccaataccaagaaactgatgaccttttttgagctatttctccttaacccctaatacctttcttacctaaatttcagaatgatatctttttgatgtctaaaaagcaaagcattttataatatctcattagccaggctttttaggaacagagaagtttttccttgaaatttgattgtttgtttatttgtggcagggtgaaaaatgtacaaactacccctatttatacttatatctctctctatatgtacgcattatggaaatataggaagagatatagcccaaagatagatggtaagtagacagtctgaaaatgttgctccatactaaagaacctttctggaaatttgcatttcgctacttttttccacttgagaggggtctcaatacagggaggtggccaaggaacaacacttctcagtggccaccagttcatatatcccctcaaaaggctctacttttctccaccaaaccattgggttgcccaactgtgatggaaaaaacaagcagatgttggcccagaactccaggacctccccgtgggctgaggctcatgtggcatacaattcagtgtgaccagttttaatgttcagaaatatgtgaattagaatgacttttaacttcacacagcacaaaagagaaatggagtttaaactggatttgttttgttttgagtttcaagtcccttttcactacaacaccgtccaaaactatctacctatctcttcttttttatccatctgcccgctgtattttaatgtcaatcctaattcagacaaatccgcaacttcatgatactggtaatttataataattcgtgatcattgctgttttgaaggaaaagagatgataaattctcttacggtttcaatcaggtaatggattttgttttacatctagttaggagaagaaaagtaagtgaaggaatcctctgatcatattgatcactatagaagcaaaagccaaatcagttcccttcattatcagtatttctcatgctgtacacaataaatttgttagactgagtacttggtttttgtttaatagaacaaataatcagtgtttcacttatattactaaatgtgaaaaacataatgtgaaaagtatacatacattaacttgggtg

SEQ ID NO: 64042 - DNA, 2384 bp, Homo sapiens
  misc_feature (1)...(2384): n = a,t,c or g
ttttttttttttagttttttttaaatacatttattaaccaatgttaacacattaaatgaatctatatattgctagtcagagcagcttacaaaatgccagaatgcatcatagaactggacagccacaatgaataattacaatgtgcatagtggctaagctcaacacctcgatatagctttatgatttgcagaaaatttttaataatgattcctaaaacaatcaattgtaattttacctaaaacttttacaaaaccaggccacaatctctttttttaattttgtttttttttaaacacacagttttcacgctgtagtaacttggaaatgtgcaaccgtgtcaacagagacagaaaagccaaagtaacacgaatctcactttcatgcagctatcagttaaatattacatactctggaatgattttacaccaaaaatatttccacaattacttgctctcataggggtggatcgaagtcttaaaacttgaaaaacaatcaaagaaggttaagtgttctcggttctgacatctccatcagcgccacacactgtggcaacactgactaattacacagcaacaaggagggaacgatgatgccaagttactgcataatttaggtacattgtatgaaatggggctactgggtactttttacaaaatattgtgcaccatttggcagtagtttgtcaattaacttgtgtcaccaccatctgcaacagcatcaagattagatggatgatatttcacagaagacttagttacatttttatctttagagtgaccctgacaaacctggagaatactttttaaaaggcttttctcctgattctttcacttccattgtgagtaattgctttaataaatatcaaaggtctaaataaatatgtacaaattattctctaacctcaaaaaataactaaatgataaatgggaatttgacttggtctaagatcagtctttaaaaataccacataaattgtgagatattttaaaagaaaagtaatttaagttttcctggctgtattttatatatctatgtataaaaaatcattattcaactatcgatccattcctattggtaatgcttcttaatccagacattccgcaaaatacagactttttacaaatcacggcatctttaatacaagaaaattaacatgcattattcttcattctgtgtacagtgatggagttcattagtaggcaatgacccattactacaaacataacggcttctgtgaaacttaagtgctttctcttcttttagtattaacttacgatacatgaggtgacaccagataataggcagtgagatgatatgtgggaagggaagggaagcattaaacaaattcgtatgcctcatctataatttcacatatggataaaggtagtttttggctttgtttttgttgtttattttgttacaagcactcatgttaggacaaagatgaaatgtgcaaactttaaaatttaaatattcattttctctaagatccagctcagtaaaagattaccccagttccctgcaattttaaactacaagatcaaagctaataatttgttataaaagttatatattgaaaagaaataatgaaaaacacaattgggaaatatttaagaaaaaatatgcaggactagccctgctgtgtcaaccctgttccctaaattcaatcatatacccactggtgtgaccaacagataatgcctttgaacagtaaattaagctgaacaaaaccagctcaacaaggttaagaaaaaaatgtcacatcaaggtagtatgttttatttctgaaacagttctgtagttcttacattcagatctattctaaatgtttctttgttaaactcacttgtattcacctgttttttaaagatctgttgtttaaaggttaaaatctctgtaaaacctaaaaatgttttaaaatttgctgaaaatgcaacaaattctcaattaaaatttatttaaaataataccctccactgatgttacttttaccccctgaaaaacttcggaggagcattaacaaaagatttaaactactgtgcaaaatttcttcacgaaaagtgtttaaaggctggtgcaaaatgggaagcaaattctaaacaattttggcttcttggaaacaaaaaccgctgtgtctgaaaagagtaatcatcggggtgactccgggaagggccagcttcatcttttccggcggcaggtgcgcttgtgctccgcgtgccagtgctcctgctggcacttgatggagcagtaggatgtgttccagcagcagtggtacatggcctcctcctcacagttgtagcaccactgcttcttcttggtctgagaaatcagttgcgaattcctccgcttggactaatgtctacaagtctcgaanttttggcacc

SEQ ID NO: 64043 - DNA, 1531 bp, Homo sapiens
agccgtgcaggaacaatggcaagcctttagcccgatcgggagcggcaatgggcgcctcgctggatcaggagcacagcggacaccctgcttgatccagagggatggaagtcagtggcaggtctgcaacagcggcaaagaacaatggtggacaataagcaaaagctcagctcaatccgtaacaaacacggaccagaagagagtgcagttgcaagatttaatagagtggaaacagagctcccatacaaagggaggggacccaaagagggtagccgttgctggctggaatgcctgggtttatgtcctgatcattgtccctcccgctgtgctctcaggcaatagatgattggctatttctttacctcctgtttttgcctaattagcattttagtgagctctcttcactacctgattggtcgggtgtgagataagttgcaagccccatgtttaaaggtggatgtggttaccttcccagctaggcttagggattcttagtgggcctaggaaatccagctagtcctgtctcttagtagcccctctcaacaggaaaacccaagtgctcttgcggaggttggctgacaacagctctaactgcttcctgctgaattggggcatagtaagggtcgtgcagttgaaatttccttgggaggggtgccttcgatgtcatcaacttcggagcatgggctagcaggccggtccaggggtccatggtagatcttagtcatggactgcatctggggctccatttgaagaatgatttgtagttttacagctttgattctggaagagacaaacttaacaaggaggttaaagatacagggattgaaatgtatggcctgcagtgcaggggattattcctttggcacactttacaagctctgactatctgcttgacagttttgaaaaggcctggtccagtaaataataatttggccatctgatgggtgctatcaatggttaagtcgaaggtttggtgaagggttttaagtaatttctattggttagctgcaggcaaaagtatttttctttcttcggtggctagccatctggaggggaggaaagtatgtccttgtaaggttcctcattctatttctcctgctgagtactggggcttggtttcccagaggggattaccccatactagaggtccttctataagcatttctaatggagggtcctgccttgcggctcttttggcttcaatatccgcttggtggttcccttctatttctctttcctttcccttctgatgaccccagcagtgtaagactgccacctctttaggtttctgtacagccaataataatctcctaatggctttctgatgattgataggtgttccctcagaagttaggaatgcccttcttgagatggagtttcactcttgttgcccaggctggagtgcaatggcgccatctcggctcactgcagtctccaactcctgggcacaagtgatcccccagcctcagcctcccaagtagctgggattacaggcgcccgccaccatgcctggctaatttttgtattttttgta

SEQ ID NO: 64044 - DNA, 799 bp, Homo sapiens
taaaggtggtaaagcactggtctaaaacaatcttggtggaaatgaaatgtttttttctctgtcttctttcaggtctttgttgagtatgcaaatgctggtgattccaaagctgcgcagaaattactgactggaaggatgtttgatgggaagtttgttgtggctacattctacccgctgagtgcctacaagaggggatatctgtatcaaaccttgctttaatcagtaacctaaggactgtttcctttttctcctcttccatttcttgggttattccacatatgaatgcaggactacccccttaccattttaagaaggtactttatacatttatttaatcctactaatgtgcagccattgcccaagcagtgactgcgttgcatacatttggcactgagtaggacaagacctctcagctatacattgaggggttttagagcatccatgtgggcaacccttttttgtgcgggagagcaggtgttgctcttcagtatgtagcctaaaaaaatcttaattatttcatggatcatgaagcaaggatgaataatatcatgtcttggtaaatactaacaaatttgttaggtttggtgacatcatttacagattatttctttatgttgtccagtggttcttccttattgttgatatccataagctggcactggatgctctcagtaatgttaagtaattgtcaagcagcagttacctactgtgttcttaacactgagttgtgaattttttcttaaagcagtactgtagtactgaatattcctttaaaggaactgcagtgagcctatctaag

SEQ ID NO: 64045 - DNA, 1159 bp, Homo sapiens
  misc_feature (1)...(1159): n = a,t,c or g
ttttttttttttagtcaaccaagtaagtgattttattattatcaactataacattcaaatcagattacataaaaatggttctataaaattatattttaattacaatttcctattgaaggactacaccttcctgacctttccccacagtgattcggcacataaaacaggtgctgaactgtagcagttgttttactccatcctgtaggttagagaaactcatcagaagaaagtttcaatcacttcactgttattttctgcaattcttattctcttatagccgataatcttcaggtggagtccacaatcttgggaaggcgtctatttcttcttgtgtgtactcatctagacgtttaggtatttttcgtggttgaggaagctcctctactaaattcttaagaatatcttctggaatatactcatctggaaaaagatgcaacctttccatcattgttcttctgtgaaggttttttggcagcatgccataaatagctagttttacaattgccactggatccctcaggtgaagctgagcagctgttacttgtctaaatccacctgggtagccagtatgcgaagagtatactttttgttcccatttgtttccagaaaatgcaatgtgtcttgtgttcattataacaacatgatccccacagtcactcagtgcatggtacacaggtttatgtaatccctgaagtcttatagatgccatagcagcaagtttgccaggtggctgcattttcccatctaagagataccatattctagcaaaagtggcccattgctggggcgccctagagaaactcgacatattcctctactagcaggaccgtacgtccttctcctagtagccacgccgggtcactcagccttactggcccggcgggaaacgctaacacccaagcaggacagttcctagcccgtcgagcacttgtcggcttctccctcttcctcgagtttcctccagtcttctccacggcagcaatttcgtcatgaaaggagcatataatgcagttatttagggaataactcccaaaaatatctcgcttggtggaaaaactgcggaaaaccgacggaggacataatttccagccgacctaaacgaagggaagaattccnccgcnctggcgtaatggtctactattttctaannnaggccctc

SEQ ID NO: 64046 - DNA, 663 bp, Homo sapiens
gcggtggaattcacctaggaagcagtgccaaaatcaaatgcaatagttgccaaagctaccatgagtctactaaacagctcacaatgaaaaaattacccattgtggcttgttttcatctcaagcggtttgagcatgtaggcaaacagaggcgaaagattaatacctttatctcctttcccttggagctggacatgactccgtttttggcctctactaaagagagcagaatgaaagaaggccagccaccaacagattgtgtgcccaatgagaataagtattccttgtttgcagtgattaatcaccatggaactttggaaagtggccactataccagcttcatccggcaacaaaaggaccagtggttcagctgtgatgatgccatcatcaccaaggctaccattgaggacttactctacagtgaagggtatttactgttctatcacaaacagggtctagagaaagactagtcttaccagaccacttactgaaaaaaaagtaaatgattaggcaaggattttgaagtgacacacagacctacttggaatggacaatgacagtaacacctatgtgacagctagtatcttgatataaagaacctattttagcatggcccatgggtctgtcggaagaaaaaaatgaatactaaccagtgaccattcaacc

SEQ ID NO: 64047 - DNA, 1889 bp, Homo sapiens
gtagttctaacagggagacaccacgaaatcattctttgcctaagcgtaattcccatttggagataacaattccaaaggacttgaaactaaaagaagcagagaaaactgatgaaaaacagttgattatagttctgctcattaatcaccacgagtgtggatctgaagaagagtttattacctctctttttttgagtatgtttaacttcagatacacacaacgtagcttctccttccctattagattcttagaagggctggaagaaagaaagaattctggctgaataccctgatggcaggataataatggttcttcctgaagacccaaagtatgccctgaaaaaggttgacgagattagagagatggttgacaatgatttaggttttcaacaggctccactaatgtgctattccagaactaaaacacttctcttcatttccaatgacaaaaaagtagttggctgcctaattgcggaacatatccaatggggctacagagttatagaagagaaacttccagttatcaggtcagaagaagaaaaagtcagatttgaaaggcaaaaagcctggtgctgctcaacattaccagagcctgcaatctgcgggatcagtcgaatatgggtattcagcatgatgcgtcggaagaaaattgcttctcgcatgattgaatgcctaaggagtaactttatatatggctcatatttgagcaaagaagaaattgctttctcagatcccactcctgatggaaagctgtttgcaacacagtactgtggcactggtcaatttctggtatataattttattaatggacagaatagcacgtaaaacaaattcttgcctacaccactagaagacatctattgaagagaatggattggttgctgactttaaccaggaactagggccatttttattacaatgaactcaggactggcaacaaccatatggttgttccattttcataaaattggaaacaatgcagtaatagcttattgttttgttttttaaagaagatattttattatcttttacagaaatttatgattgatgtattttatctatagttatttagacatgtttacatgcagcagataattgttcatagtggactgaaaactaatgcaaggactatggtctcagtgataagtatattttgaagttcttaatatggaaatataccagtgtagcttggtactgtatttttttatattgatctgctgataccagtgataggcttaaagattgtattttcacagagtggaaaccaatttttttagttattgttcaaggagggtgcaatattaagtgttttggaatttgaagctaatttttaaaaggcctgaactatactttgaagaaacccctatagaaaaggaaagctccagctaaataggaagaattagaatattgagcttttttttcctgatttttctctttcctatctttgatggaaggaggaagtagaaagtggtaaagaattgaggctttccttcttggagagctgtaaatgacaagcattaggaaaggtaccctcctagattcattattctttcattctggtttcacttttaaaataaatggcaacttggcacacctaggctgttaacaaatctcaaagaggtttataaaaacgtatagaatacttggaagcaaagtatggatgactcggtatctgctttgttattcctcagaaatactgcactgagtatatgccctcattactggacttcattttgatacttgtctatccttcatagtgccctctacttttaaagggtttatatgttgaaaaactgctgtggccttttatgacctgtatataatgtagaataaaaataataaaatacttgatagctttttctaagtgaccaatgtactaactaaaaaaaaaa

SEQ ID NO: 64048 - DNA, 1531 bp, Homo sapiens
ctggagcggacccgccggacgctaccgcctttccagccggagccagcgcgagctcggcacgggggacacccggtccgaggccggcaagccggctggtgcccgagtcggccaagcatgggcaaccactcaggacggcccgaggatccggaaccaggtggaaaaggattattcatacctgaaggagatatgtgatcaccaagccgaacagctgagcagaaccagcctaaagctgcaagaaaaagcatcagagagtgatgcagagatcaaagacatgaaagaaaccatatttgaattggaagatcaggtggaacagcaccgggctgtcaagttacacaataatcaactcatcagtgagctagaaagtagtgtgatcaagctggaggaacagaagtcagacctggagaggcagctgaagactctgaccaagcagatgaaggaggagaccgaggaatggaggcggttccaggcggatctgcagaccgcagtggtggtggccaatgacatcaagtgtgaggcccagcaggagctgcgcaccgtgaagaggaaactgctggaggaggaggagaagaatgcccggttgcagaaggagctgggggatgtgcagggccacggcagggtggtcaccagcagagccgcccctccacctgtggatgaagagccagagtcctctgaggtcgatgctgctggtcggtggcctggtgtctgtgttagcagaacatctccaacacccccagagtcggcaaccaccgttaagtcacttatcaagtcatttgacttgggacgcccaggtggagctggacagaatatttctgtccataagacccccagaagtcccctaagtgggataccagtgaggactgctccagcagctgctgtctctccaatgcagaggcattcgacttacagcagtgtgcggccagccagcagaggggtgactcaacgcttggaccttcctgaccttcccctctcagatattctaaagggaaggactgagaccctgaagccagacccccacctccgcaagagtccctcactagagtcactgagcagacccccgtctctgggctttggggacacaagactgctgagtgcttccacccgggcatggaaaccacaaagcaaactcagtgtggaaagaaaagaccctctggcggccttggcccgggaatacggtggttccaagcgcaatgctctactgaaatggtgccagaagaagacacaaggttatgcgaacattgacatcaccaatttcagcagcagctggagcgatggcctggccttctgtgctctgctccacacctacctgcctgcccacatcccctaccaggagctgaatagtcaggagaaaaagaggaatctcttgttggcatttgaagcggctgaaagtgtaggcatcaaacccagcctggaactcagcgagatgctgtacacagaccggcccgactggcagagtgtgatgcagtacgtggcccaaatctacaagtactttgagacgtaaccctggagggcttggggcagccaccattgccct

SEQ ID NO: 64049 - DNA, 838 bp, Homo sapiens
  misc_feature (1)...(838): n = a,t,c or g
ctaatcaaagctctagtgtattattagcaaacacttaaaaaatatgtaaataccagtactgtggaaaataattagatgacacataaactggatttaaaatccatctcatctgcctagattttatgtaagtgatataatgaaggtgccttaaaatatttgatactttcaaatgtttctcatgttattttcttattttctaaaaaagatgtattcactaaattatatacactcatataataattaaatataaaatacattcttttattgtgtacctttctatctagaaggtagcacattattacagtgtttcctgctggtcaaagttgcctattagagaaatagaatggtaattttaatatattcacaaaataccttattgatatcatcaaaccaatttatacattgagtttgtaccaactagtggaattgtcttaggtctattaagttatggaatattatatccataattacagtctgagtcatagctgaaaaaatctgctttaaaattattctcactctttgaacatttcataatcttacatgttttcaagcaatttgccatactctactaacctttgtgcttcttttttcctttgccatgcttacagaaaattcaattctacagggagtggattatgactcacagtagcagtagtgatgatgatgatgatgatgatgatgatgatgagtcagatctaaaccattaaaattcatatgttctttattttacttggaatgtttcattaacatgttttgtatgacttataccataatgcccatatgtccatttataggggaggtaaaacacattttnctttaaaatgttttcctacacatt

SEQ ID NO: 64050 - DNA, 1570 bp, Homo sapiens
aatagagaaggtgccagaaagatccaaaacaagtggctgcggccgtcgcccaggagtcatcggacgccagaatctgtgtctccagaacgctatagctatggcacctccagctcttcaaagaggacagagggtagctgccgtcgccgtcggcagtcaagcagttctgcaaattctcagcagggtcagtgggagacaggctcccccccaaccaagcggcagcggcggagtcggggccggcccagtggtggtgccaaacggcggcggagaggggccccagccgcaccccagcagcagtcagagcccgccagaccttcctctgaaggcaaagtgacctgtgacatccggctccgggttcgagcagagtactgcgagcatgggccagccttggagcagggcgtggcatcccggcggccccaggcgctggcgcggcagctggacgtgtttgggcaggccaccgcagtgctgcgctcaagggacctgggctctgtggtttgtgacatcaagttctcagagctctcctatctggacgccttctggggcgactacctgagtggcgccctgctgcaggccctgcggggcgtgttcctgactgaggccctgcgagaggctgtgggccgggaggctgttcgcctgctggtcagtgtggatgaggctgactatgaggctggccggcgccgcctgttgctgatggaggaggaaggggggcggcgcccgacagaggcctcctgatccaggactggcaggattgatcccacctccaagtctccgggccaccttctcctgggaggacgaccatctctacccctagaggactgtcactctagcatctttgaggactgcgacaggaccgggacagcaggccccttgacagcccctcccacaggatgtgggctctgaggcctaaaccatttccagctgagtttccttcccagactcctcctacccccaggtgtgcccccttagcctccggaggcgggggctgggcctgtatctcagaagggaggggcacagctacacactcaccaaaggcccccctgcacattgtatctctgatcttgggctgtctgcactgtcacaggtgcacacactcgctcatgctcacactgcccctgctgagatcttccctgggcctctgccctggcctgcttcccagcacacacttctttggcctaagggcttctctctcaggacctctaatttgaccacaaccaacctgggcttcagccacatcagtgggcactggagctggggtgcacatggggcctgctcaccttgcccacacatctccagccagccagggccctgcccagcttcaatttacagacctgactctcctcaccttcccccctgctgtccagagctgaacatagacttgcacttggatgtcacctggagtgtcacatgggagtgttatggcagcatcataccaaggcctactgttgcacatggggccaaaaccagtaaacagccaccttcttggaaagggaatgcaaaggctttgggggtgatggaaaagacctttttacaaatgataccaattaaactgccctgggaaagggcattaggtggg

SEQ ID NO: 64051 - DNA, 1264 bp, Homo sapiens
ttttttttttttggttgcgatttttcttttttaatgatcaccatgaaatccactgggccaggccctggtgttctgctgccatagtcagagtcagagtggagggatgaccccaggaggggacaagaagccaagactgggctggggagccgagaaggagatagataagggggagagggtgcagtggggcaggcagaggaggaagtctggagccctggataacaacacagatataaggtgaaggcctccctctgccaccccagccctgagccacagacgttgaggtgcaagaagatggggattttggccacaactcctttcccatgtcaaagggaagacactgagagcagacaaaggccaagtgcccaggggcacaagaacaagttaacaagtaaaacaattagggacaccacctcctttccccagcccatttttcacatttacaactgaagcaatttgacaagatgatataaaaatctcaaacaaattttctagcccctggtcggggtgtggacaggaagtggtatcccgtgatccagaaatcaacacctaaaatccagaggcaggaggcaagccatgaagggtggggagggaaggaggagctcccacagtcactaggtcacctgctccgtgggcctcatctggatgtctccaatctggatgtgtgcgggggtgctgaggacgtagataacagcctcggccacatcctcgggtttgagacacttcatttgctcataggtggcagctgccttctcagggtccttgtcgtggagtttgaaggcgaattgtgtctccaccacacctggagagatgcacgtggctcggatgtgggtctgggcctcccgaagctcttgcctcagtccctctgtcagcgcagtgacggcatacttggtggcactatagaagtgggtcacagacaggggtaacactcggtggccagacatgctattgatgttaatgatgtgcccatcgtccacattccgctccttcatggactggtaggcttcccgtgtgcagatgctgagggccagcacgttcacattgaacatgtccttccaaccactggtgctgcctgagagcagggtgtcaggccgggccaagccagcattgttgatgcagatgtctacaccgctgtgctgagaacggatagctgagaacatggagaggatgtcctcttcatttgataggtcacatctgtaggggatcaaagtcccggggtagcctgcactcttacattcagcagccagctcctatgaaacccaacagc

SEQ ID NO: 64052 - DNA, 1774 bp, Homo sapiens
gctccaaatactgcagaattaaggatttgtcgtgtaaacaagaattgtggaagtgtcagaggaggagatgaaatatttctactttgtgacaaagttcagaaagatgacatagaagttcgttttgtgttgaacgattgggaagcaaaaggcatcttttcacaagctgatgtacaccgtcaagtagccattgttttcaaaactccaccatattgcaaagctatcacagaacccgtaacagtaaaaatgcagttgcggagaccttctgaccaggaagttagtgaatctatggattttagatatctgccagatgaaaaagatacttacggcaataaagcaaagaaacaaaagacaactctgcttttccagaaactgtgccaggatcacgtagaaacagggtttcgccatgttgaccaggatggtcttgaactcctgacatcaggtgatccacccaccttggcctcccaaagtgctgggattacagttaattttcctgagagaccaagacctggtctcctcggttcaattggagaaggaagatacttcaaaaaagaaccaaacttgttttctcatgatgcagttgtgagagaaatgcctacaggggtttcaagtcaagcagaatcctactatccctcacctgggcccatctcaagtggattgtcacatcatgcctcaatggcacctctgccttcttcaagctggtcatcagtggcccaccccaccccacgctcaggcaatacaaacccactgagtagtttttcaacaaggacacttccttctaattcgcaaggtatcccaccattcctgagaatacctgttgggaatgatttaaatgcttctaatgcttgcatttacaacaatgccgatgacatagtcggaatggaagcgtcatccatgccatcagcagatttatatggtatttctgatcccaacatgctgtctaattgttctgtgaatatgatgacaaccagcagtgacagcatgggagagactgataatccaagacttctgagcatgaatcttgaaaacccctcatgtaattcagtgttagacccaagagacttgagacagctccatcagatgtcctcttccagtatgtcagcaggcgccaattccaatactactgtttttgtttcacaatcagatgcatttgagggatctgacttcagttgtgcagataacagcatgataaatgagtcgggaccatcaaacagtactaatccaaacagtcatggttttgttcaagatagtcagtattcaggtattggcagtatgcaaaatgagcaattgagtgactcctttccatatgaattttttcaagtataacttgcaagatttaaatccttttaaatcttgataccacctatatagatgcagcattttgtatttgtctaactggggatataatactatatttatactgtatatataatactgactgagaatataatactgtatttgagaatataaaaaacttttttcagggaagaagcatacaactttggacatagcgaatacaaaattggaagctgtcataaaaagacaactcagaggccaggcgcaggggctcacacctgtaatcctagcactttgggaggccaaggcgggtggatcacttgagaccaggaattcgagaccagcctggccaacatggtgaaaccccgtctctactaaaaatacaaaaattagctgagcatggtggtacgtgcctgtactgtcagctacttgggaggctgaggcacaataattgtttgaacccaggaagcagaggttgcag

SEQ ID NO: 64053 - DNA, 767 bp, Homo sapiens
  misc_feature (1)...(767): n = a,t,c or g
ggcacgaggtctctgtccacttggatatacaggcttaaagtgtgaaacagacatcgatgagtgcagcccactgccttgcctcaacaatggagtttgtaaagacctagttggggaattcatttgtgagtgcccatcaggttacacaggtcagcggtgtgaagaaaatataaatgagtgtagctccagtccttgtttaaataaaggaatctgtgttgatggtgtggctggctatcgttgcacatgtgtgaaaggatttgtaggtaagatgtttccagtcttcctatgttgtcttaaaatcttgtaaaccaccacaaattagtacatttcttaacatatannnnnnnnnnnnnnnnnnnnnnnnnnnnnnnnnnnnnnnnnnnnnnnnnnnnnnnnnnnnnnnnnnnnnnnnnnnnnnnnnnnnnnnnnnnnnnnnnnnnnnnnnnnnnnnnnnnnnnnnnnnnnnnnnnnnnnnnnnnnnnnnnnnnnnnnnnnnnnnnnnnnnnnnnnnaaaggcaaactttcaagaaggaactggagacaaatcatgtaatatgatattgcaaacagatgtacaataatatggtttaaaagtgtatgcttaatttctaaagagtaaatccaagaaagtgtccagtgaaggaaaaaggcaagatcaaagaaacaggcaagttttgaatggaatttactagctttatttcttaacattatctcaattagatgtctattaccaaacttaatttcaacaaaaagtaagatttaaaaaagca

SEQ ID NO: 64054 - DNA, 769 bp, Homo sapiens
ggtttgagaccgtatccatggatggaattccatccgataatgggctggggtgagaaagccattgagatccgctctgtggagacgggccacctcgacggggtcttcatgcacaaacgagctcagaggctcaagttcctgtgtgagcggaatgacaaggtgttttttgcctcagtccgctctgggggcagcagccaagtttacttcatgactctgaaccgtaactgcatcatgaactggtgacggggccctgggctggggctgtcccacactggacccagctctccccctgcagccaggcttcccgggccgcccctctttcccctccctgggcttttgcttttactggtttgatttcactggagcctgctgggaacgtgacctctgacccctgatgctttcgtgatcacgtgaccatcctcttccccaacatgtcctcttcccaaaactgtgcctgtccccagcttctggggagggacacagcttccccttcccaggaattgagtgggcctagcccctccccccttttctccatttgagaggagagtgcttggggcttgaaccccttaccccactgctgctgactgggcagggccctggacccctttatttgcacgtcaggggagccggctccccccttgaatgtaccagaccctggggggggtcactgggccctagatttttggggggtcaccagccactccaggggcagggaccatttcttcattttctgaaagcactttaatgattccccttcccccaaactccaggg

SEQ ID NO: 64055 - DNA, 1625 bp, Homo sapiens
cctagtccgtgtggtggaattccatgcagaatatattggcagttctcttgagtcagctgatgaaaacccaagagccagcaggcagtctggaggaaaacaacagtgacaagaacagtgggccacaggggccccgaagaactcccacaatgccacaggaggaggcagcagagaaaaggccccctgagccccccggacctccaccgccgccacctccaccccctctggttgaaggcgatctttccagcgccccccaggagttgaacccagccgtgacagccgccttgctgcaacttttatcccagcctgaagcagagcctcctggccacctgccacatgagcaccaggccttgagaccaatggagtactccacccgaccccgtccaaacaggacttatggaaacactgatgggcctgaaacagggttcagtgccattgacactgatgaacgaaactctggtccagccttgacagaatccttggtccagaccctggtgaagaacaggaccttctcaggctctctgagccaccttggggagtccagcagttaccagggcacagggtcagtgcagtttccaggggaccaggacctccgttttgccagggtccccttagcgttacacccggtggtcgggcaaccattcctgaaggctgagggaagcagcaattctgtggtacatgcagagaccaaattgcaaaactatggggagctggggccaggaaccactggggccagcagctcaggagcaggccttcactgggggggcccaactcagtcttctgcttatggaaaactctatcgggggcctacaagagtcccaccaagagggggaagagggagaggagttccttactaacccagagacttcagtgtcctgaaagattcctttcctatccatccttccatccagttctctgaatctttaatgaaatcatttgccagagcgaggtaatcatctgcatttggctactgcaaagctgtccgttgtattccttgctcacttgctactagcaggcgacttacgaaataatgatgttggcaccagttccccctggatgggctatagccagaacatttacttcaactctaccttagtagatacaagtagagaatatggagaggatcattacattgaaaagtaaatgttttattagttcattgcctgcacttactgatcggaagagagaaagaacagtttcagtattgagatggctcaggagaggctctttgatttttaaagttttggggtggggggttgtgtgtggtttctttcttttgaattttaatttaggtgttttgggtttttttcctttaaagagaatagtgttcacaaaatttgagctgctctttggcttttgctataagggaaacagagtggcctggctgatttgaataaatgtttctttcctctccaccatctcacattttgcttttaagtgaacactttttccccattgagcatcttgaacatactttttttccaaataaattactcatccttaaagtttactccactttgacaaaagatacgcccttctccctgcacataaagcaggttgtagaacgtggcattcttgggcaagtaggtagactttacccagtctctttccttttttgctgatgtgtg

SEQ ID NO: 64056 - DNA, 740 bp, Homo sapiens
ggaattcccccctcaggtcccagccttctcccaagagatgggagtgcctttccattccggtaaagattccaggcttctcaggaacgggcacgcaaagaataagatgggttgatgggttgcaagcatcctggctcactctcaccctatgctaaactcaggcgaccgtgctgtgtgacatcatagtcctctactgcatgaagaaaagactctactatcgggagaagaaatataaatatgtggaagattacgagcaggtaggcccctcctggcccccagcaggcacaggcctctcatctcttgggtgtgggagccctgggcgtgggcctgtctggggaggcccttctgcagaggctggcaccagtgtggcgtggtgtccccgttaacccgggcagtcctgccactctcagcagctgctccatccctaggcccctgtactagattgactctttaaacccagcctcgtttcaatgagcgacatctcaggttggtgatgataatgcatgctctgagaatgcctgtgggcacacactacttcagtgcaccttgcggaacaggaagggttgggttccaggcctgggaccaacttgagaacccctggcggtgaagtcccaggagcgcacctccctcccgcctgccacaaggggtcccaggggcaccttgatctgcttgtgtccttctttgcagggtcttgctagtgagctggaccagtgaggcctaccccacacctgggctctccacag

SEQ ID NO: 64057 - DNA, 2815 bp, Homo sapiens
aagatggatcctcacgcggtggagatcagccgggagagccttctgctgcaggacagcgactgcaaggcgtctccggagggccgcgaggcccacaaacacggcctggccgccctcagaagcacgagccgcaacgaatacatccactcaggcctgtactcgtccttcaccattaattccctgcagaacccaccagacgccttcaaggccatcaagacggagaagctggaggagccgcccgaagacagcccccccgtggaagaagtcaggactgtgatcaggtttgtgaccaataaaaccgacaagcacgtcaccaggccggtggtgtccctgccttccacgtcagaggctgcggcggcgtccgccttcctggcctcgtccgtctcggccaagatctcctctttaatgttgccaaacgctgccagtatttcatccgcctcacccttctcatctcggaccccgtccctgtcccccaactcacccctcccttctgaacacagaagcctcttcctggaggccgcctgccatgactccgattccctggagcccttgaacctgtcatcgggctccaagaccaagtctccatctcttcccccaaaggccaaaaaacccaaaggcttggaaatctcagcgcccccgctggtgctctccggcaccgacatcggctccatcgccctcaacagcccagccctcccctcgggatccctcaccccagccttcttcaccgcacagacaccaaatggattgcttctgactccgagtccactgctctccagcatacatttctggagcagccttagtccagttgctccgctgagtcctgccaggctgcaagggccaagcacgctgttccagttccccacactgcttaatggccacatgccagtgccaatccccagtctggacagagctgcttctccagtactgctttcttcaaactctcagaaatcctgatgacgtctggccacaattaaggactcattaactgatgaaacaaatttgtccccacgggctagtttacctgtgtcgtgagaaggacattgtgaaactcttgttaatttggtttgcacttttcataacatggatagtctagatttatgttagcattttaaaaactgtttttgatatattcaagtatatatgaaaatctgtttggcattaagtgaattttaatgtttttgtttttatatccttttagctcttaagtgttgaacactgttgacagtgaagaacttttcttaatggttttcagtataactaataaggatgtgaagcttttttctctttagttctgagtatgctaaactgtgtgcttatatagactataaccagttgtgccttccttcgcatttaatgtaaatgaatgatttatatattttttagtattaagaggaaatgtttgaaagatgaaaattagtatcaaacagctctctagtagaatttcattatttttcaccagtgggcaatatgaaagcatatatcacgttttgttttactttcaattgtataagaattgccttagaacctcttttgaactgaaattcagtaaatgtccaagtaatgtttttataataaactaagccatatttagacaataaacattgataaaagaaaatgttctaaagtacattttcaaaagaatggaccttgaaaggctagcctccttagctgtttacagtatcttatcttttagatgcctcccagacaaaaatctgagatggaaaagctacatcaagtttatgctattccaggcccaagaatatctcctaggttagcatattcttatttcaaaaaattagccctggttttctcagttttccatagggaatcccgaccatctgatatatttactgtgtcagtataagtaagttggggttcccctggaactataattaacatttaaaaaatctaatgctttagaagaagctcacagagtggtgatgaacccaaacaacaaagaaaccatttttaacactaggtatcttcatcagtataggtaggtgttcacaatttttgatggatcaaaaacttgctgtaatacaaatagagagtggaggtactaaaggccttgcttgtggaaactgagagaggatacactgctttatgtattactaaagttaggggagaatgaaggaaatctgacagatgaaaaattctacaggaacctcatcatcgtggaactgaactgatgataacttggaacactccagtaaattctgttgtgtaatgtaatttggagcagtgataatacagacatattttctgttccatcagaaaatcagcaggcaccagtccaaaggtaccacacctgtacatgaagaaggaaagttctaatacaagaaaactgaaaagcaccaaagctttaaattcaagtattaattacaatccttaactataagtgatgataaaaactaacttggaaatgtggactaaataactgatcccaaactgggcattaagtggcaggattatgagaaaggataaaaaaagagatttgagaaaacacatttccttgaattttcagaaaaaaatctaggactattgctttgacacttaggaaattctgaggtttttccaattggggattgaggcatctctgtatgtggggatgtgggcccttatcaagggataaaaatccaacactctaacatgcctccttgactgtaaagtaatgacactggttccaaattcacaataatagacactactgtcccccacccccaccccataggctaagaataattctgtacagaataaaggagctggtccagggactgatattactgacatccaagttgtgctgaagggccttgagatg

SEQ ID NO: 64058 - DNA, 1069 bp, Homo sapiens
tcagcaggactggaggcggccactggaggaggatttcaggcggtctcccacggaggacttcaggcagctcccagaggaggacttcaggcaaccccctgaggaggacttaaggtggctcccagaggaagatttcaggcggccacctgaggaggactggagacggcccccagaggaggactttaggcggcctcttcagggagaatggaggcgaccacccgaggatgacttcaggcggcccccagaggaggatttcaggcattcccctgaggaggacttcaggcagtcaccccaggagcatttccggaggccacctcaggagcatttccgtcggccacccccagagcatttccggagaccacctccagagcattttaggcggcctcccccagagcacttccggcggccacccccagagcacttcaggcggccacccccagagcatttcaggcgcccgcccccggagcacttccggagaccgccccaggagcatttcaggcggccggctcaggagcatttcaggcgctcccgagaggaagatttcaggcacccaccagatgaagacttcaggggccctcctgatgaagactttaggcaccctcctgatgaggacttcaggagcccccaggaggaagattttagatgcccttctgatgaggacttcaggcagctcccagaggaagaccttagggaagctccggaggaggaccctagacttcctgacaattttagacctcctggtgaggattttaggagcccgcctgatgattttagaagtcaccgcccttttgtgaattttggtcgcccagaaggtggcaagtttgattttggaaagcataatatgggaagttttcctgaggggagatttatgcctgatccaaaaataaattgtggttcaggtaagaagtaaacttcctattaagataatgaatcttgccattttaaagctaatgtgaatgaaattttagacttttttccatggttacagaatcatacctgattcagtttcgatacagtataatgagcaaggcttacctacaggggaagccattgttgctatgataaactataa

SEQ ID NO: 64059 - DNA, 1170 bp, Homo sapiens
caggtcagacagaagacaacatgaacgtctaacctcatgcaccagcggacactgtgtggtacccaggcagcttatttaggattcggccgtcaggaaaaggctccctaaacgctggtagaccacgtggctggggtggcatggatggggcttatggacctgggtctttcagaagtgacccatagctcactcctggaaggcgtgagtcaagcaggtggttctgcgcactaacgacgctcttccactgtttccctagggaagatccttgtccttcaaaaccttcctcatctgggttttaataagtatttaccaaggcggcatcctcatgtatggggccctggtgctcttcgagtctgagttcgtccacgtggtggccatctccttcaccgcactgatcctgaccgagctgctgatggtggcgctgaccgtccgcacgtggcactggctgatggtggtggccgagttcctcagcttaggctgctacgtgtcctcactcgcttttctcaatgaatattttgatgttgcctttatcaccaccgtgaccttcctgtggaaagtgtcggcgatcaccgtggtcagctgcctcccgctgtatgtcctcaagtacctgaggcgcaagctctctcctcccagctactgcaagctggcctcctaaggggctgtgcacccccagcgggctggccccagcaccttctgcccttcccagcaccttgtgcccttgccagtgaacgcagggtttgccattgctaccaagcaagcaccacaagaaagggagggtacgccaggcgagcccagggcacagatgctgagacagcctctccttctcagtgcagggacgtcacccctgccaggcaagcccagggcacagatgccaggatggcttctccctctcagtgcgaggcttcacccctgccaggcaagcccagggcatagatgctgagacagcctctccctctcagtgcagggacgtcacccctgccaggcaagcccagggcacagaggccgggacggcctctccctctcagtgtgaggcttcacccatgctaggcaagcccagggcacagatgccgggatggcccctccctctcagtgcgggaacgtcaccccttgccaggcaagcccagggcacagatgctgcgatgggcctcttcctcttaagtgtggggcctcacc

SEQ ID NO: 64060 - DNA, 3093 bp, Homo sapiens
ttctatgacctcctgcgcatcacgttgggcagaaggggacagtacgttatgctctcggtgtgcctggagcgagccatgaaggttgcgtttggagaatttcacctttggtaccaggtggccctctccatggtggcttgtgggaagtcagcctacgctgtgtccctgctgcgggagtgtgtgaagttgcggccctcggaccccaccgtgcccctgatggccgcgaaggtctgcatcgggtcccttcgctggctagaggaagcagagcactttgccatgatggtgatcagcctcggagaggaagccggggagttcctccccaagggctacctggctctgggtctcacctatagcctgcaggccaccgacgccaccctgaagtccaagcaagatgaattgcaccggaaggcactgcagacgctggagagggctcagcagctggcgcccagtgacccccaggtcatcctctatgtctcgctgcagctggccctcgtccgacagatctccagtgccatggagcagctgcaggaggccctgaaggtacgcaaggatgatgcccacgccctccacctgctggcactgctcttctctgcccagaagcaccaccagcatgccctggatgttgtcaacatggccatcaccgagcaccctgagaacttcaacctgatgttcaccaaggtgaagctggagcaggtgctgaaaggcccagaggaagccctcgtgacctgcagacaagtgctgaggctgtggcagaccctgtacagcttctcccagctgggaggcctagaaaaggatggcagcttcggtgagggcctcaccatgaagaagcagagtggcatgcacctgactttgcctgatgcccatgatgcagactctggctcccggcgggcttcgtccatcgccgcctcccggctggaggaggccatgtcagagctgactatgccctcttcggtcctgaagcagggccccatgcagctgtggaccaagctggaacagatctggctgcaggctgctgagctgttcatggagcagcagcacctcaaggaagcaggtttctgcatccaggaggcggcgggcctcttccccacttctcactcagtactctatatgcggggccggctggctgaggtgaagggcaacctggaggaggccaagcagctgtacaaggaggcgctcacggtgaacccagatggcgtgcgcatcatgcatagcctgggtctgatgctgagtcggctgggccacaagagcttggcccagaaggtgcttcgtgatgccgtggagaggcagagtacgtgccacgaggcgtggcagggcctgggcgaggtgctgcaggcccagggccagaacgaggctgccgttgactgcttcctcaccgcccttgagctggaggccagcagccctgtactgcccttctccatcatccccagagagctctgacgacgctgcagccgcagggagggaggggctggccagagggagaggcagcagggaacgtgggtcagggtggggcaacagtggcatcaggtgcggggcctcagggaaatacatctttagtgaacgcctctgcagctgcagccctcgttctcttggctgggccaagagggccttcctggatttctttgttggtgccttgggaaacagtctgacttgaaccctaagtgcctttggagagttttgtggtgaccagacttgctccccaagagctgggcagcggggagcctcacagctgtccttcaccctcacccatgcctctggcttggggtctgggtggggggttctcactccccactctcagcacagtacagacttctggatctctctcaggtcttgcccagggcggtcacaatgtgaagaaactgcgggcaagtgggaagactatgagatttctgggttcccttctcagacttggagttagtagatgattcctgcattgcccctgcttgccctctgagaccagctgggccccaccttgctctttccccctgctaccaagtgcctttggggcctctggggtctgaccaggggtactgagcaccggccctaacacttccatctccacccaccccatctccctggcgatgtgctccagcccaagcagcctccgtaggctttagatcctgtggttgccagatccagtcctttctaataccctgagtcaacacattactcctgcaggtcttaggctacaatgcaggtcccttgagggccaccaacatggaggtaggcagtttctaggactgtccccagtacatctcaccacccacagccctttttttgccttgattcgagcctcaccctggccttttggcttcccctgcctgagagagacctgaggaggggacagagcccagcccctctcctgtggctgagcaggcctctgtgtccatgacacctgtcttccgggcctgggggctgtgggtgtatgtcctccctactggcttccccggcccctgctgcatgatgctcttggaactcttccccaaggagtcagtcccccaggcctatcaggggatccttttgtatctgcactttgggttttagtttcaaagctccatcaggtacagcttgcatttcaggatgtgtggaaagctcgggtgagggctgccctggttcatcatagctccaccttcctcggaaggagtgggctgttggagaccccccatccatggcacactagctcagcactgcatttcccgagatgattcccaagacagctggtgcctcctggctttcctgtgccaggccaaggggcaccacagaggaccctggatcctttgcctcttcttggttgaaggatctctatgtatgtgtgtatataaatatagttttttatctatatatataaaatagagatctattttttttctggaattctgttagaaaagtaaagaaaaagcaaatgctgttggtttatctcagggtgcccaaagtggttatagtcaatttttggtactaggaaaggcacccaatgcatttcctgacttttaagcatttccttgttggaagcagcagagggccaggccaagttgctgacagtgactttgcaggttgaataaagaaacccttggaggggaagcaggcttgtttgaaaaaaaa

SEQ ID NO: 64061 - DNA, 2092 bp, Homo sapiens
tctggctctgcccagaggctggcccatgcccctggtttccccttccctcctccctggatgggtatgcccctgcctccaccctttgccttccccccaatgcctgtgccccctgcgggcttagctgggctgaccccagaggagctacgagctctggagggccatgagcggcagcacctggaggcccggctgcagagcctgcgtaacatccacacactgctggacgccgccatgctgcagatcaaccagtacctcaccgtgctggcctccttggggcccccccggcctgccacttcagtcaactccactgaggagactgccactacagttgttgctgctgcctcctccaccagcatccctagctcagaggccacgaccccaaccccaggagcctccccaccagcccctgaaatggaaaggcctccagctcctgagtcagtgggcacagaggagatgcctgaggatggagagcccgatgcagcagagctccgccggcgccgcctgcagaagctggagtctcctgttgcccactgacactgccccagcccagccccagcctctgctcttttgagcagccctcgctggaacatgtcctgccaccaagtgccagctccctctctgtctgcaccagggagtagtacccccagctctgagaaagaggcggcatcccctaggccaagtggaaagaggctggggttcccatttgactccagtcccaggcagccatggggatctcgggtcagttccagccttcctctccaactcttcagccctgtgttctgctggggccatgaaggcagaaggtttagcctctgagaagccctcttcttcccccacccctttccaggagaaggggctgcccctccaagccctacttgtatgtgcggagtcacactgcagtgccgaacagtattagctcccgttcccaagtgtggactccagaggggctggaggcaagctatgaacttgctcgctggcccacccctaagactggtacccatttccttttcttaccctgatctccccagaagcctcttgtggtggtggctgtgccccctatgccctgtggcatttctgcgtcttactggcaaccacacaactcagggaaaggaatgcctgggagtgggggtgcaggcgggcagcactgagggaccctgccccgcccctccccccaggcccctttcccctgcagcttctcaagtgagactgacctgtctcacccagcagccactgcccagccgcactccaggcaagggccagtgcgcctgctcctgaccactgcaatcccagcgcccaaggaaggccacttctcaactggcagaacttctgaagtttagaattggaattacttccttactagtgtcttttggcttaaattttgtcttttgaagttgaatgcttaatcccgggaaagaggaacaggagtgccagactcctggtctttccagtttagaaaaggctctgtgccaaggagggaccacaggagctgggacctgcctgcccctgtcttttccccttggttttgtgttacaagagttgttggagacagtttcagatgattatttaatttgtaaatattgtacaaattttaatagcttaaattgtatatacagccaaataaaaacttgcattaacaattggtggggtttgtgtcacagaatcgatcaaatcagtgtcgggctccttgctgtggctgtacacttgaaaatggaatggaatctccaggagtgagggtttccatggaagccagcactatccttggggacaccactgaccattaacagattaggaagatgtgcccattttacacacagagaagcagcccagagttcagtgccctgcttcagggcagagaccaagttggggagtcaggaactgaaagctgtcttagccagtttgggggcagggtggggtctcaggcctttggcccctgtgactccaagtataaggcatatatgaaggctaatgaagctggggttgggatgggatggcagggtgaaaggtcagcatattcctgcctgcaaacccctccccagccttgattgcaggtcagaaggctgcagggggatgtccctatgctggctgtgagttccca

SEQ ID NO: 64062 - DNA, 1169 bp, Homo sapiens
tgcagccctatgtgcaggaaagccagaacaagttcttcaagctgcccgtgtccgtggtcaacaccacactgccgtgcgtggcctacgtgctgctgtcactcgtgtacttgcccggcgtgctggcggctgccctgcagctgcggcgcggcaccaagtaccagcgcttccccgactggctggaccactggctacagcaccgcaagcagatcgggctgctcagcttcttctgcgccgccctgcacgccctctacagcttctgcttgccgctgcgccgcgcccaccgctacgacctggtcaacctggcagtcaagcaggtcttggccaacaagagccacctctgggtggaggaggaggtctggcggatggagatctacctctccctgggagtgctggccctcggcacgttgtccctgctggccgtgacctcactgccgtccattgcaaactcgctcaactggagggagttcagcttcgttcagtcctcactgggctttgtggccctcgtgctgagcacactgcacacgctcacctacggctggacccgcgccttcgaggagagccgctacaagttctacctgcctcccaccttcacgctcacgctgctggtgccctgcgtcgtcatcctggccaaagccctgtttctcctgccctgcatcagccgcagactcgccaggatccggagaggctgggagagggagagcaccatcaagttcacgctgcccacagaccacgccctggccgagaagacgagccacgtatgaggtgcctgccctgggctctggaccccgggcacacgagggacggtgccctgagcccgttaggttttcttttcttggtggtgcaaagtggtataactgtgtgcaaataggaggtttgaggtccaaattcctgggactcaaatgtatgcagtactattcagaatgatatacacacatatgtgtatatgtatttacatatattccacatatataacaggatttgcaattatacatagctagctaaaaagttgggtctctgagatttcaacttgtagatttaaaaacaagtgccgtacgttaagagaagagcagatcatgctattgtgacatttgcagagatatacacacacttttttgtacagaagaggcttgtgctgtggtgggttcgatttatccctgcccaccccatcc

SEQ ID NO: 64063 - DNA, 548 bp, Homo sapiens
ccaggcgcagcgcgacagccaggtagaaacctggattgccagcctgaacccgctcacccaggcacttaccatggtgctggatttaattcgccagtcggcccccttccgtaaacaaaccagcctgaatggtttttatcaggataacggtggcgatgccgacttgctgcgcctgaatctgtcgctcgattcacagctttatccgcaaatttccggacataagagccgttttgccattcgttttatgccgctggacactgaaaacggacaggtaccggaacgtctggatttcgaactggcctgttgctaaggagtaaaaatgtcagaaactattacggtgaattgcccaacctgcgggaaaacggtggtgtggggtgaaatcagcccgtttcggccattttgctccaaacgttgtcagctgatcgacctcggagaatgggctgctgaagaaaaacgaatccccagcagtggcgatctttccgaaagcgatgactggagcgaagaaccaaagcagtgacatttgtctgatgccgcacgtatgccttgaaagg

SEQ ID NO: 64064 - DNA, 1167 bp, Homo sapiens
catcagagggagctgagggaggcctgacctgaggccggcacccggagctggcgggagccagacccagaggacctccgccgcttcttgctgtcagcagcctgccggagcttcccacagtggctgcctggaggtggtggcggccaagtctccagctgctcagatactgatgtcccctacctgctgttggccgtcaagtcagaaccagggcgctttgcagaacgacaggccgtgagagagacgtggggcagtccagctccagggatccggctgctcttcctgctagggtctccggtgggtgaggcggggcctgacctagactcactagtggcatgggagagccgtcgctacagtgacctgctgctctgggacttcctcgacgtcccattcaaccagacgctcaaagacctgctgctgctggcctggctgggccgccactgccccaccgtgagttttgtcttgcgagctcaggacgatgcctttgtacacacccctgccctgctggctcacctgcgggccctgccacctgcctcggcccgaagcctctacctgggtgaggtctttacccaggccatgcctctccggaagccaggaggacccttctatgtgcccgagtccttcttcgaaggtggctacccagcctatgcaagcgggggtggctacgtcattgccgggcgcctggcaccctggctgctgcgggcggcagcccgtgtggcacccttcccctttgaggacgtctacactggcctttgcatccgagccctgggcctggtgccccaggcccacccaggcttcctcacagcctggccagcagaccgcactgcggaccactgtgctttccgcaacctgctgctggtacggcccctgggcccccaggccagcattcggctctggaaacaactgcaagacccaaggctccagtgctgactctcattggggagggcggaggtgctgacctggccccggccctggcctgggcctctggggccggcccctggctcagcccctccttccaggtcttgatgggagggaggagggcccagaagctggacaacttaagccactccttggcctcccccagccaggggcctgggcaggaaagatggggtggtggactgtttttgcctactttttgtttttgaaaaacatgcactccccactctgaaacga

SEQ ID NO: 64065 - DNA, 3024 bp, Homo sapiens
cgacgcctgtccctcttagacttgcagctcggtcctcttggcagagaccccccgcaggagtgcagcaccttctccccaacagacagcggggaggagccggggcagctctcccctggcgtgcagttccagcggcggcagaaccagcgccgcttctccatggaggacgtcagcaagaggctctctctgcccatggatatccgcctgccccaggaattcctacagaagctacagatggagagcccagatctgcccaagccgctcagccgcatgtcccgccgggcctccctgtcagacattggctttgggaaactggaaacatacgtgaaactggacaaactgggagagggcacctatgccacagtcttcaaagggcgcagcaaactgacggagaaccttgtggccctgaaagagatccggctggagcacgaggagggagcgccctgcactgccatccgagaggtgtctctgctgaagaacctgaagcacgccaatattgtgaccctgcatgacctcatccacacagatcggtccctcaccctggtgtttgagtacctggacagtgacctgaagcagtatctggaccactgtgggaacctcatgagcatgcacaacgtcaagattttcatgttccagctgctccggggcctcgcctactgtcaccaccgcaagatcctgcaccgggacctgaagccccagaacctgctcatcaacgagaggggggagctgaagctggccgactttggactggccagggccaagtcagtgcccacaaagacttactccaatgaggtggtgaccctgtggtacaggccccccgatgtgctgctgggatccacagagtactccacccccattgatatgtggggcgtgggctgcatccactacgagatggccacagggaggcccctcttcccgggctccacagtcaaggaggagctgcacaaaatcaatcgcctcctcgggacccccacagaagagacgtggcccggcgtgaccgccttctctgagttccgcacctacagcttcccctgctacctcccgcagccgctcatcaaccacgcgcccaggttggatacggatggcatccacctcctgagcagcctgctcctgtatgaatccaagagtcgcatgtcagcagaggctgccctgagtcactcctacttccggtctctgggagagcgtgtgcaccagcttgaagacactgcctccatcttctccctgaaggagatccagctccagaaggacccaggctaccgaggcttggccttccagcagccaggacgagggaagaacaggcggcagagcatcttctgagccacgcccaccttgctgtggccaagggacaagagatcacatggagcacaaattcgggtaggatggagcctgtgtggccctcggaggactgaagaacgagggctgacagccagcctggaagaccgcttggcagcccttctggccacggctgtttcttctttgtgcttcccgtgtgcctccccagtagccctcacctgcataccaacccctcctttacccacgttggggctggcataagctgcttccctgagaggacatgaggggggggcggtcctcgtaccctctcccaccctggtgtttgggcacctgcgtgggatgcacacggatgacagaatcaaggcgccaggatgggcactctgccctggatacaggctctaccctcctcccccaggacctgcctagtgccagtttggtagtccccctttctggccccttggagcccacacacgtttcatctttttcccctctgagagcaagaagagacatggcatgttctctgggaccctggaatcctaggtacccacatgtgtgccaaagcctaccccacctggcaggtgtcccacagcaacagaaggaatagtagtccccactctttccatcagccctaccctaccctcattccccgacaccctctggcttgaaccatggctgagcagtgccggcatacgctttgccggcatgcttggatgcccagctgtgtccagaggtggcctgggaccgccagttgcacgcctgccacctcagccagcccccgcccagctcatcagtctgaatggagttgccttaaattggcaggtggtaccgtactcactgcccttggagctgtgaccggctcctgcctgtccaccccttcccgaggtggctcctgcttaccttatcatcccagggctctgattagccaggcctggtcagggtcctggggacggcacccagatatgcagagtcaccctgacactggtgccgggctgacctcagctcccgaaggctcgcacagcctccccatccttccttcccagcccttgtggctctgtccacctgatcccaataccagcttcccccagcccctgccaccccagagggcggccacgacagggagaggtgtagatgccaccatctgagggagaggaacgtggaacaggagcaggctctgatgctgagaggcttgcctccgggggctggaagcctgggtggccggggcccctgaagaaggctcccctctgtatcccccaggtctcctcaacactgggctgatcctgaatggcacaggccaaggggaggccagcctcgcctttctacccaggccccctgccctgcccacctcaggcccccaccctccactcctccccacggtactgtgaacgtcgtgtgactcagtgcagagacagataatatatttaattcatgtacaaaaaaaaaaaaaaggggggcccttttaaaagaacccttggggggcccaaatttaacccgggctggcaaggtaaaatttttttccttatggggggccgaataaaaaccaacttgggaattttgggaaagaaccttttttttgggggggggacaaattggcccaacctccctccaaaaattaaaggctttagggaaaaaaaaaatttttaaggggaaaagggggaaaaacaacctccatatcctggcggttgaaaagttttctttccggggtttattttaaaaaaattttttccccggggcctg

SEQ ID NO: 64066 - DNA, 935 bp, Homo sapiens
gcggtggaattccccggctcgagcggcccatgaatcgggtaaacctgggatatttgcaagacgagatgaacgaccaccagaacaccctctcctacgtcctcatcaaccctccgcccgacacgaggctggagcccagtgacattgtctatctcatccgctccgaccccctggctcacgtggccagcagctcccagagccggaagagcagctgcagccacaagctgtcgtcctgcaaccccgagactcgcgacgagacacagctctgagccagccctgcacggagctcaggccaccaagcccggggtcctcaggaaggacgtggaggagcgtgtgaggacacggtggcactagcgtgaccctggggatggcacactctactcaccatggctcctgggactccaccctggaaaggagcccctcatgcggggggagggccagctcacccctgggcacctgcaggctagtgaggagagttttttaacctatttttacacgtcgatgcagtccacttctctttacacagatgtaccgcaactcgtgaccagggctggctgggagggcaacgcacggactggacgccctactgggccgagcccaggctgtgctggagggtgttgctggtgtgcatggggaggggagctgaacccacatcccaggagccccgcgtgggccacacccaactcagagccggcctgagcgttcacggccaggcagcctcgcttccttgcagccaagggctgggggccagggctgctgttctgcactctggggtgggtgagggggaccctgggctgtttgctgtcccaagccccttctggaagttagaagcagcaaagggcccggggaagccgggcatgtgagaggggtgcgtccccaggtcccccagagggccctgtcgccgaggacctttctgaaggaagcagaagacgccattt

SEQ ID NO: 64067 - DNA, 6229 bp, Homo sapiens
gtgatggcatctcacactgcaaccgcacgtgcttggaggactgtggccatggtgtgtgcagtggccccccggactttacctgcgtgtgtgacctaggctggacatcagacctgccccctcccacacccgccccgggtccgccagccccccgctgctcccgggactgtggctgcagcttccacagccactgccgcaagcggggccctggcttctgcgacgagtgccaggactggacatggggggagcactgcgaacgatgccggcccggcagcttcggcaacgccacaggctctaggggctgccggccctgccagtgcaacgggcacggggacccacgccgtggccactgcgacaacctcagtgggctctgcttctgccaggaccacaccgagggtgcccactgccagctctgctccccaggctattatggggatccccgggccggtggttcctgctttcgggagtgtgggggtcgcgccctcctcaccaacgtgtcctcagtggcactgggctcacgccgggtcggggggctgctgcctccaggtggcggggctgcaagagccgggcctggcctgtcctactgtgtgtgggttgtctcggccactgaggagctacagccctgtgctcccgggaccctctgtcccccactcaccctcaccttctcccccgacagcagcaccccctgcacgctgagctacgtcctggcgtttgatggattcccacgcttcctggacactggtgttgtccagtcggaccgcagcctcatagctgccttctgcggccagcgacgggacaggcccctcactgttcaggccctgtctgggctgctcgtgctgcactgggaggccaatggctcctcatcctggggcttcaatgcttcggtgggctctgcccgctgtgggtcagggggccccgggagctgtcccgtcccccaggaatgcgtgccccaggacggtgctgcaggtgcggggctctgccgatgtcctcagggctgggctggcccacactgccgcatggctctgtgtcctgagaactgcaatgcccacactggggcaggaacttgtaaccagagcctgggtgtgtgcatctgtgccgagggcttcgggggccccgactgcgccaccaagctggatggcgggcagctggtctgggagaccctcatggacagccgcctctcagccgacactgccagccgcttcctgcaccgcctgggccacaccatggtggatggacccgatgccaccttgtggatgtttgggggcctgggcctgccccaggggctgctgggaaacctgtacaggtactcagtgagtgagcggcggtggacacagatgctggcgggagccgaggacgggggcccaggcccatcgccccgctccttccatgcagccgcatatgtgcccgctggccgtggtgccatgtatctgctggggggacttaccgctggaggcgtcacccgtgatttctgggtcctcaacctcaccaccctgcaatggcggcaggagaaggccccccagaccgtggagctgccagccgttgctggtcacacccttactgcccgccgaggcctgtctctgctcctggtgggcggttactccccggaaaatggcttcaaccagcagctgctggagtaccagctggcaaccggcacctgggtgtcaggagcccagagtgggacaccccccacaggtctctatggtcactctgctgtctaccacgaggccaccgactccctctacgtgtttggggggttccgattccatgtggagctggcggccccatcccccgagctctactccctgcactgtcctgaccgcacctggagtctgctggccccttctcagggggcaaagcgagatcgtatgaggaatgtgcgtggctcatctcggggtctgggccaagttcctggggagcagcctgggtcatgggggttccgggaagtcaggaagaagatggctctgtgggctgctcttgctggtacaggaggtttcctggaggaaatctcacctcacctgaaggagccccgcccccggcttttccacgcctcagccctgttaggggacaccatggtggttcttggggggcgctcggaccctgacgagttcagcagcgacgttctgctctaccaggtcaactgcaatgcctggcttctgcccgacctcacccgctcggcctctgtggggcccccaatggaggagtctgtggcccatgctgtggcagcagtcgggagccgcctgtatatctctgggggtttcgggggagtggccctgggccgcctgctggcactgaccctgccccctgacccctgccgcctgctgtcctcacctgaagcttgtaaccagtctggggcctgcacctggtgccatggggcctgcttgtccggggatcaggcccacaggctgggctgcgggggctccccctgctccccaatgcctcgctccccggaggaatgtcgacgtctccggacctgcagtgagtgcctggcccgccatcctcggaccctgcaacctggagatggagaggcgtccaccccccgctgtaagtggtgtaccaactgccccgaaggtgcttgcattggacgcaatgggtcctgcacctctgagaatgactgtcggatcaaccagcgagaggtcttctgggcagggaactgctccgaggctgcgtgcggggctgctgactgcgagcagtgcacgcgggagggcaagtgcatgtggacgcggcagttcaagaggacaggggagacccgccgcatcctctccgtgcagcccacctatgactggacgtgcttcagccactctctgctgaatgtgtcccccatgccggtggaatcatcacccccactgccctgccccaccccttgtcacctcctacccaactgtacctcctgcctggactctaagggagcagatgggggctggcagcactgtgtttggagcagcagcctgcagcagtgtctgagcccttcctacctgcccctgcgatgtatggccggaggctgtgggcggctgctccggggacctgagagctgctccctgggctgtgctcaggcaactcagtgcgccttgtgcctgcggcgcccccattgcggctggtgtgcctgggggggccaggatgggggtggccgctgcatggagggtggactcagcggcccccgtgatgggctgacatgtgggcgtccgggggcctcctgggccttcctgtcctgcccccctgaggacgagtgtgcaaacgggcaccacgactgcaacgagacgcagaattgccacgaccagccccacggctatgagtgcagctgcaagaccggctataccatggacaacatgacagggctgtgccgccctgtgtgcgcccagggctgcgtgaacggctcatgtgtggagcccgaccactgccgctgccactttggctttgtgggccgcaactgctccacggaatgccgctgcaaccgccacagtgaatgcgctggtgttggggcgcgtgaccactgcttgctctgccgcaaccacaccaagggcagccactgtgagcagtgcctcccgctgtttgtgggttcagctgtcggaggcgggacctgccggccctgccacgccttttgtcgtggaaatagccacatctgcatctccaggaaggagttacaaatgtccaagggagagccaaagaagtactcactggacccagaggagattgaaaactgggtgacagagggtcctagtgaagacgaggccgtgtgcgtgaactgccagaataacagctatggggagaaatgcgagagctgcctgcagggctacttcctcctggacgggaagtgcaccaaatgccagtgtaatggccacgcggacacatgtaacgagcaggatgggacgggctgtccatgtcagaataacacagagacgggcacatgccagggcagctcccccagtgaccgtcgagactgctacaagtaccagtgcgccaagtgccgggaatcatttcacgggagtccgctgggcggccagcagtgctaccgcctcatctcggtggagcaggagtgctgcctggaccccacgtcccagaccaactgcttccatgagcccaaacgccgggcgctaggccccggccgcactgtcctctttggcgtgcagcccaaattcaccaacgtggacatccgcctgacgctggacgtgaccttcggggccgtggacctctatgtctccacctcctatgacaccttcgtggtccgtgtggcccctgacactggcgtccatactgtacacatccagccacccccagccccaccacctccaccaccccctgcagatggtgggccccggggggctggggatccaggaggagcaggggccagcagtgggccgggcgccccagcagagccacgggtacgggaggtatggccgcggggcctgattacctacgtgacggtgacggagccgtcggcagtgctggtggtccgcggcgtgcgggaccggctggtcatcacctacccacacgagcaccatgccctcaagtcgagccgcttctacctgctgctgctgggcgtgggagacccaagtgggcccggcgccaacggctcagccgactcgcagggcctgctcttcttccggcaggaccaggcccacattgacctgtttgtcttcttctccgtcttcttctcctgcttcttcctcttcctctcactctgtgtgctcctctggaaggccaagcaggctctggaccagcggcaggagcagcgccggcacttgcaggagatgaccaagatggccagccgccccttcgccaaggtcaccgtctgcttcccacctgaccctactgccccggcctccgcctggaagccggctgggctcccacctcccgccttccgccgctctgagcccttcctggcacccctgctgctgacaggggccggtgggccctggggacccatgggagggggctgctgcccaccaaccatccccgccaccactgctgggctgcgagctgggcccatcactctcgagcccacagaagatggcatggctggcgtggccacactgctgctccagctgcctggcgggccccatgcacccaacggcgcctgcctggggtcagccctcgtcacactgcggcacaggctgcacgagtactgtgggggtggtgggggtgctgggggcagtgggcatgggactggtgcgggccggaagggactgttgagccaggacaacctcaccagcatgtccctctgacatgcccagggttctcatccacagcagctgggtcacctgatagggccgccctggacttggggtccctccacctgggggcccctggacactgtctacttggagaccactggcccccttcccccagggttgcccagatggggcctcctttgttctgcattcagcagctatttatcgagtacctactctgtcaggcactgtcataggcgtggggcaaagcaggaaccaagagacgaggttccctgatctcatgggacttaggttctggtgaagggagacaatcagtgcacatgcacacaccccacacgcatacacacatgaacacatgcacatgtgcacacacaagtaagatggcttcagagagggagaagcactgtgaggcctccagaggatgtggcagtgagggacgatggggtgaagtcagctgggcattcaaagaagctagactgagaacgcctgagaagaaccagctacgggaagagctttgggaagcaaaggcagaggccctggggtgggagcaggcttgttttattggaaggaccagaaaactggtaagtgtgacccagatcaagtgtgaggagatgaggctggggatagtcaggggctggatcacccagggccttgtgggccccacatagggttttgggttttattctcagggcaatgggaagctgttggatggtttgatgaaggggagtgacaggatccgatgtacctatttaagaatttaagagggtcgggtgcgggggctcatgcctataatcctagcactttgagaggccaaggtgggctgatcacaaggtcaagagttcgtgaccagcctggccaatatggtgaaaccccatgtctactaaaaatacaaaaattggctgggcatggtggcacacacttgtggtccgagctactcgggaggctgaggcagaagaatcgcttgaacccaggaggcggaggttgcagtgagctcagattgcgtcactgcactccaacctgggtgacagagcgagactccacctcaa

SEQ ID NO: 64068 - DNA, 1707 bp, Homo sapiens
  misc_feature (1)...(1707): n = a,t,c or g
aattgggcccaggagtgaaggccaagaagcccatccagactaagttccgaatgccactcttgaactgggtggcactgaaacccagccagatcaccggcactgtcttcacagagctcaatgatgagaaggtgctgcaggagctagacatgagtgattttgaggaacagttcaagaccaagtcccaaggccccagcctggacctcagcgctctcaagagtaaggcagcccagaaggcccccagcaaggcgacactcattgaggccaaccgggccaagaacttggccatcaccctgcggaagggcaacctgggggccgagcgcatctgccaagccattgaggcgtacgacctgcaggctctgggcctggacttcctggagctgctgatgcgcttcctgcccacagagtatgagcgcagcctcatcacccgctttgagcgggagcagcggccaatggaggagctgtcagaggaggaccgcttcatgctatgcttcagccgcatcccgcgcctgccggagcgcatgaccacactcaccttcctgggcaacttcccggacacagcccagctgctcatgccgcaactgaatgccatcattgcagcctcaatgtccatcaagtcctctgacaaactccgccagatcctggagattgtcctggcctttggcaactacatgaacagtagcaagcgtggggcagcctatggcttccggctccagagcctggatgcgctgttggagatgaagtcgactgatcgcaagcagacgctgctgcactacctggtgaaggtcattgctgagaagtacccgcaactcacaggcttccacagcgacctgcacttcctggacaaggcgggctcagtgtccctggacagtgtcctggcggacgtgcgctccctgcagcgaggcctagagttgacacagagagagtttgtgcggcaggatgactgcatggtgctcaaggagttcctgagggccaactcgcccaccatggacaagctgctggcagacagcaagacggctcaggaggcctttgagtctgtggtggagtacttcggagagaaccccaagaccacatccccaggcctgttcttctccctctttagccgcttcattaaggcctacaagaaagctgagcaggaggtggaacagtggaaaaaagaagccgctgcccaggaggcaggcgctgataccccgggcaaaggggagcccccagcacccaagtcaccgccaaaggcccggcggccacagatggacctcatctctgagctgaaacggaggcagcagaaggagccactcatttatgagagcgaccgtgatggggccattgaagacatcatcacaggtaagggcttggccaggccttggtcttatcctcagtctgtccttctatgctttcttctgacccaatgcgctatcctctgggggactggctgccacactgcttcttgctaccttttctgtttttctttcctttttcctttctctactccccttcacctgccccacccccactcagtgatcaagacggtgcccttcacggcccgcaccggcaagcggacatcccggctcctctgtgaggccagcctgggagaagagatgcccctctagcccctcaggtacccagatgacctggcctctgataccacgctgcccacagcccctgggacccttgggagaactgaggcatgctgccttcntctgggccagtggc

SEQ ID NO: 64069 - DNA, 1144 bp, Homo sapiens
cgcacaggaagatgtcattctgttccagtgttctgatcaatagttttgctgaccagaggggtcattatcccaccaagtgtgtggtggagaagatctgggtcttaggcttcaggaaggagccatcttctgtgactacccactcatctgatggtaaagatcagcctgtggcttttacgtattgtgccaaaacatccatcctgagcctggagaagctctcactcaacattgccactgactgggaggtccgcatcatatgacaaagaactgcccctggtgatgtgagcagggacctgcctgcccctttcaacctttcccctcaccttttttgagatttttgctgcaatctgtttgccttccctgaatcaaaataatctttcattcgtcaccattatactaatgaacaatagatttcatgtttcaaaatttcagattttacatgttaagatgtactaacaatattccttgtatcaaacatctccttttctccctgatacatagccctgagacatttatagcgttcaggagtcttctattgcttccattccttcagcagggctgcgtgggtctgttttaacgtgggccaagcctacctgggcagcccatttgcccagggtttgcctcagggccatgcagcattggcgctctggctgcagcagctgagttgctcaaggccagtgtccaagtggacagcagcctctggtactccccccagttatcttccacccacatggactgggcagagcagccctcttctgtgtgcacctgcatacgctgcagccgtgggagttattctcccctagagatcgacttggcccccatgaaggattcttttctctttcatgcttctcaggctcaatagtttctaattaatcttaaaatccatgtcttttacattgttttttttaattaagtgctgtttactaaccaaataatatttataacatgagtaagctataattaataacaatgaaataaatacccatgtacccaccactggacttcagaagtagaactcatgactgggactaggatgaggcaagggagaccctggccttgggcacaaaatgtaagggatgccaaaaaaatacagtaatcaaagtaagtaatatttcaatccaatatttttaaaaatcagaattaatgc

SEQ ID NO: 64070 - DNA, 2045 bp, Homo sapiens
cccgggcagaattattcctcaacagcctgtcccagccattttctctggaggagcaggagcaaattctctcgtgcctcagcatcgacagcctctccctgtcggatgacagtgagaagaacccatcaaaggcctctcaaagctcgcgggacaccctgagctcaggcgtacactcctggagcagccaggccgaggctcgaagctccagctggaacatggtgctggcccgggggcggcccaccgacaccccaagctatttcaatggtgtgaaagtccaaatacagtctcttaatggtgaacacctgcacatccgggagttccaccgggtcaaagtgggagacatcgccactggcatcagcagccagatcccagctgcagccttcagcttggtcaccaaagacgggcagcctgttcgctacgacatggaggtgccagactcgggcatcgacctgcagtgcacactggcccctgatggcagcttcgcctggagctggagggtcaagcatggccagctggagaacaggccctaaccctgccctccaccgccggctccacactgccggaagcagccttcctgctcggtgcacgatgctgccctgaaacacaggctcagccgttcccagggatctgccagcccccggctcagcagtgggaccagggcctcgcagcagcaaggtgggggcaagcagaatgcctcccaggatttcacacctgagccctgccccaccctgctgagaaaacactccgccacgtgaagagacagaggaggatggcaggagttacctcgggaaacaaacaggatcttctctgccctgctccagtcgagttggcctgacccgcttggatcagtgaccatttgctggcagacaggggagagcagcttccagcctgggtcagaaggggtgggcgagcccctcggcccctcaccctccaggctgctgtgagagtgtcaagtgtgtaagggcccaaactcaggttcagtgcagaaccaggtcagcaggtatgcccgcccgtacgttaagggggccctctaaaccccttgcctggcctcacctggccagctcaccccttttgggtgtaggggaaaagaatgcctgaccctgggaaggctccctggtagaatacaccacacttttcaggttgttgcaacacaggtcctgagttgacctctggttcagccaaggaccaaagaaggtgtgtaagtgaagtggttctcagtccccagacatgtgcccctttgctgctggctaccactcttccccagagcagcaggccccgagccccttcaggcccagcactgccccagactcgctggcactcagttccctcatctgtaaaggtgaagggtgatgcaggatatgcctgacaggaacagtctgtggatggacatgatcagtgctaaggaaagcagcagagagagacgctccggcgccccagccccactatcagtgtccagcgtgctggttccccagagcacagctcagcatcacactgacactcaccctgccctgcccctggccagagggtactgccgacggcactttgcactctgatgacctcaaagcactttcatggctgccctctggcagggcagggcagggcagtgacactgtaggagcatagcaagccaggagatggggtgaagggacacagtcttgagctgtccacatgcatgtgactcctcaaacctcttccagatttctctaagaatagcacccccttccccattgccccagcttagcctcttctcccaggggagctactcaggactcacgtagcattaaatcagctgtgaatcgtcagggggtgtctgctagcctcaacctcctggggcaggggacgccgagactccgtgggagaagctcattcccacatcttgccaagacagcctttgtccagctgtccacattgagtcagactgctcccggggagagagccccggcccccagcacataaagaactgcagccttggtactgcagagtctgggttgtagagaactctttgtaagcaataaagtttggggtgatgacaaatgttaaaaaaaaaa

SEQ ID NO: 64071 - DNA, 346 bp, Homo sapiens
cagtctgatggcgtggaatgttgaagagagagcacgattgtggctggaagcatggcgtttatcattgtcaggatggcacatttctgttcttgctgatcccattgaatcgccgcgcccggaactgttcccgacgcaaacattgattgtctggacaggcatggcaccaacgagaaggcaaaacgaacttttacaacactggggtgagcaaggttataaagtcatctttcatgccccctaatttcacctttatcccgccccttagacagaatgttataatctgaacccacaacagcgtttgtaccggagctggtccgttgcaaaatgctcaccgggagaattcgatatc

SEQ ID NO: 64072 - DNA, 2428 bp, Homo sapiens
  misc_feature (1)...(2428): n = a,t,c or g
gtcagcacagttctagggcggggatatcatctgtggccatgccctgggcacccctgggtcactccggctcccaccagctctgtgtaactttctcctccctccactgtttgaccaggcgcaacatgcatcagatgacggacgggctggataagccaggtcagatccgctggccactggccatcacgctggccatcgcctggatccttgtgtatttctgtatctggaagggtgttggctggactggaaaggtggtctacttttcagccacatacccctacatcatgctgatcatcctgttcttccgtggagtgacactgcccggggccaaggagggcatcctcttctacatcacacccaacttccgcaagctgtctgactccgaggtgtggctggatgcggcaacccagatcttcttctcatacgggctgggcctggggtccctgatcgctctcgggagctacaactctttccacaacaatgtctacagggactccatcatcgtctgctgcatcaattcgtgcaccagcatgttcgcaggattcgtcatcttctccatcgtgggcttcatggcccatgtcaccaagaggtccattgctgatgtggcggcctcaggccccgggctggcgttcctggcatacccagaggcggtgacccagctgcctatctccccactctgggccatcctcttcttctccatgctgttgatgctgggcattgacagccagttctgcactgtggagggcttcatcacagccctggtggatgagtaccccaggctcctccgcaaccgcagagagctcttcattgctgctgtctgcatcatctcctacctgatcggtctctctaacatcactcaggggggtatttatgtcttcaaactctttgactactactctgccagtggcatgagcctgctgttcctcgtgttctttgaatgtgtctctatttcctggttttacggtgtcaaccgattctatgacaatatccaagagatggttggatccaggccctgcatctggtggaaactctgctggtctttcttcacaccaatcattgtggcgggcgtgttcattttcagtgctgtgcagatgacgccactcaccatgggaaactatgttttccccaagtggggccagggtgtgggctggctgatggctctgtcttccatggtcctcatccccgggtacatggcctacatgttcctcaccttaaagggctccctgaagcagcgcatccaagtcatggtccagcccagcgaagacatcgttcgcccagagaatggtcctgagcagccccaggcgggcagctccaccagcaaggaggcctacatctagggtgggggccactcaccgacccgacactctcaccccccgacctggctgagtgcgaccaccacttgatgtctgaggataccttccatctcaacctacctcgagtggcgagtccagacaccatcaccacgcaggacaggggaggtgggaggacagttagacccctgggtgggccctgccgtgggcaaggatacccggtggcttctggcacctggcgggctggtgacctttttaatccaggccccatcagcatcccacgatcggccttggtaaccgccgcggtagatcatttttatcccgccagggagtgtgatgcaggaagaccacatgcgctcctggcttttaaacctgttcctgactgttctcttactgccgaaacccttgactgttatctcggactttgcaggagttcctttccctccgaacgctgctccatgcacaggaaaagggcattttgttacaatgggggactttcccgggaacgcttgctcttaagtaccagaagccggcggagctctggctttcgtgattttggttttctccttcccaaggcagctggattgaaaaaacaaaacaaaacaaaaaaacccaggggcgtcagtcgatattctcagggccgcttctcctgcagtctgtggagcgtccttgtccccgccgccggaatgaatgagcattctgcagcccgatgtccctgtcccctcctcgccgggccattctgattggacctggcccagtgcaatctgtccagacaagccctgcttgctggaaaactgccacaagcacaattgatctctttttatcgccattccaggggcctcaggtcctactggggaaacttcctataccggagctccagtttctcttaagctgcccaatttcacagagtacaaaatagttgtaggggaaatcaaggtgaaggatctgtccgacagtcaagacggatccacaggaatctttcggtctccttaaactaccaccctcgctgccacccaccccaaggtgnttgccgcctcaccttccttgaaatttctcagcgggagtctcaacacaaccactaaaacccacccagaccgtgtattgcggccgctcgagaggat

SEQ ID NO: 64073 - DNA, 1389 bp, Homo sapiens
gcacccgtagccgtgacgatggtgacacacgccggtgtcccttcctggagatgaactcagtgacttcccacaagaagccactggctacggctctcatcgttcttgttctttggatgaagatgctgagtcactgtccatgtggctgtgattggtccccagaggctccccagccgcaggccagggaccagccatggtgcctctgctcgagagtaaagtgtacagtttttgcagccaccatagatgcagcgagatgcctcacgctgggtgggggtgggggccgcggctccatggcggttaccatttcatttgctgtgctttatctgctgtgccttgtttctccccggccctaggcggaaggtgctctaccagcgtgcacccaggaatatccaccgccatgtgatcctctctgagatcaaggaagccgtcgctgccctgcccccggtaagggagaaaggctgaaatgggagctctgtgtaagccggtcacatgcacgtcccttctgctccgggcggtccacatgcaggcgtgcgtggtgcgggctccctcagcagcccagccccgccacggcaggggcagggtctagtgcagagggctcctcctttcctggcagcccgggttcggatgcttgttgttttgagagagaaatcctttggggctcagagcacaagctgagtcgtcaccgtggtgagctgctccatccgtggtcttgtgagcgcgtggtgcggctgctgggggattctctgtagtcgtggggtgtagtcctgctctgacgcctcctgtgctggagggtgccgtttctgtctcaaaacctaaggagtttgtactgttgttaagggataagatagaacgagtgagaaaaccagcaagtcagagggtcgcaggaccgtggaccgtccactggggacagcttagtgcctcctggtttaacttcagctgctctgcgggcccttatgaccggcatggctggctttgtctggggctgtgagcttctgactctcctcagtagagtggcagcacgtggcactgtgcaacccgagggcagctcagggtccctgtagcctgcatttgctgaagtgggagcttctgacacgtggtgaagatgttggcaggcttgagcggcacgtgacccccttccttccccaccacacactctggtgtgcagggcagacgccgtgcaggttcatctcgactcccgtgagtgtcctggtggcagaaggactgtcccaccctcacccaaagctcgttggtacaaaaagcacagccgtttctgtcagactctgtggctatctctcagcagatgcatccagtccatgctggagtcgacagaaggactctgctgggagaggtagaggccccctggcagcatctgtagcatcttcgttttatgtg

SEQ ID NO: 64074 - DNA, 1203 bp, Homo sapiens
  misc_feature (1)...(1203): n = a,t,c or g
ttttttttttttggtttcttttcagtgttttatttttcaaaatatacaatttaagtttttatttcacaaccgtagttttgtatatttattccaaaatctttaaatagctccgcagcaaacagtacaaatcacaaggtccgtcaaactgcttctctttagcctttacacttggcgagttttttaagtttcaagtagtaatggtttgtgggtaagaaaggaaccaaaaacaggaggaaacaacattttttacataagctcaacatgtaggattagaaagggccgtctgaccagctccttggtctgggaccagactaagaacatgtatctggtttataaataagaccgtcctgggagcagtgagggttttggttacgaggaggaaggggcaggaacctcatctgcggaggctgggaggcagggggaggtgaggcactgagaggtggctccttctgggagcgcccgagtaggggcctgagcggggtggaggccaagaatggccagggacggggtggggctgccactggtggagaagcctcctcagcctcccttggggagaagggctgtgattctggaggcaggggagggacggcaagaaaagctgccaggtcctaaagcaagcagctgggactcctgccagccaccctgggcccaacgacgcaggcagctggcagggccagaggggctgccccagggtctggggtggactgtgggaggcatcacgctgtctcttcttgcgagagctctttgtccacctcagagccaccaaagcctccccagaagggacagcagggaggacagggaccacagatcccacagacccacttctgactgtgaaagcgagctgtgccgtgcaggcagctcctaggcagcccatgaggctaaggcacaagggtgacacaggtggccacgagggctcagttttcttcatttccccttgcggctgctacctgtggccacggcctgaagcagtcctgtgggctgagctctaggcagggacgctccaggaagaagtgggtcaccaagggccacctggccaccaagtggatgtgaccctcctaccaggggtcaggcgggcggtcctgcctcagggccccctcagcaaattccactagaatgcagggccggacacagcccatcctgcctggccnngccnnccttcttgngnnnttccncgccaagtggggtgtcttcaacggcactcct

SEQ ID NO: 64075 - DNA, 1903 bp, Homo sapiens
cgccacgcgctgtctgatgggccactcggagatcgttgtgcagggattgtccggcgaggacgtgctggcccggccgcagcgctttgctcagctagagctctcccgcgccggcttggagcaggagctggaggccggagtgggcgggcgcttccgctgcagctgctatggctcggcgcccatgcatggctttgccatctggttccaggtgaccttccctggaggggagtcggagaaacccctggtgctgtccacctcgccttttcacccggccactcactggaaacaggcgctcctctacctgaacgagccggtgcaagtggagcaagacacggacgtttcaggagagatcacgctgctgccctcccgggacaacccccgtcgcctgcgcgtgctgctgcgctacaaagtgggagaccaggaggagaagaccaaagactttgccatggaggactgagcgttgccttttctcccagctacctcccaaagcagcctgacctgcgtgggagaggcgtagcgaggtcggaggggaaagggagatcccacgtgcaagtagggggaatatctcccccttttccctcatagcctctagggagggagagtgacttcattctccatttgaagagattcttctggtgatgtttacttaaaaagtgatccccctcaacaacggatacagcgtgcttattattgggcatttagcctcaaaagcatgtagtaccaagcacttgtatttccgtatattttgtttcgcgggggagtgagggggaagaacacggatgaaaatgtcagtttttgaagggtccatgcacatccctgacacctcacaccttatctaagtctgaagctggggagaaaggagttcatttagacttcatacatttccagtacgactttagtatctctccagagccatattttctcagtccgaattaattccccctccctaggtgcctgtaggctatggtacttcttcctcattgttttctaggtaaacttcactactggtaattaaggggaaggatatgaggaagcagtttaaatagccctgttctcattactctgaccacatacatcatagggtgctaaagttgatgaacacattaatccgttaagtaaaatggactttgtaattgtacagcatacctaagaaactcagaaggtgcatttaagagagagacctgaaagaaatagtatggatttttaaaaattcttgtctctactattataaccaaaaaatatttcttgtatgtcccataaaaatatttgtgtaattcttatgaaacaggctggtagaggaggtttctgagcctagcccaagggcttattcatcaccatgggtaaattatttaaactcacttaattaaggaaaatattttcccagctagaaaagtatactcattctcatttaaactctctcatttggagggatcatgtgagttggcctacttacaagtagtgaaagttcccttttcagttttgttttgttttgttttgtttttctctttcactcagccaaatgtgaaagttgtgaatttaggaaaatcacttgtaatgaagtgtgaatcttgttatcaaatttatttctctgatgtttccttccttatccttgtagccaataaaacattgacattctcacgttttatagatgaggtaaaaagtcttgtgtgctgtgagttataatgcttttgcctttttaatattattagttcttaagtgttacagccccttcagaatataacttcaggacaattcaaactatgcttaatgtatgattttcgagcttctgtatgctaagaaaataggtgtgaaaaactggtgttctgaaatagcctaacatttattgtaattctgaattttctgcccttttattcattgcatattaaagtattagagtataaaaact

SEQ ID NO: 64076 - DNA, 792 bp, Homo sapiens
ttttttttttttgctctgagacattttatttaaactttttttttttaaaaaaagacagcaataattaatgccaagaacagaaaagaatgttgacgtgttgcccggcccgccaagcgggcccctgcccaggcccccaagctctgccaccactggggtgccgtcccctcccgcagcggggcacagtcagctttgaaggtgacagcgggccaaggccaggactctgggtggaggacttgtgtcggtgaagcaggtgctgcaggaagttggcgctcttgtagctggggtccccccagggcattgccgagcagatggggcacaccacgcggttggggtcgctgcggtggctttccacacagtgcttcaccagctcctgctggtccaggttgcgggcaccacagtacgggcaggcgaaggtggacctgttggggatgttgctggggataggctgtgatgtgggcaccacggggacgaacttggggcagttggccatctgctcctggaccttcaggcaggacgaaatgtgcactctcatctttgccagggtcacctttttgttgcagcctcgacagggcgctttgtaggatgagagctgcttctccacgtgggtggccttgtccaccttcttggggtcgaagggcaggcggcagagtgggcacagcggggatggcacctgcaggcagggctggagacactccccgcagaaccaggtgccccagcagatatttccagggtcatccctggcactgacccctggatttgagccgggggggccgcctacttcacccgttcacg

SEQ ID NO: 64077 - DNA, 1954 bp, Homo sapiens
  misc_feature (1)...(1954): n = a,t,c or g
ttttttttttttgaagtgttccaactttatttaaaaccagacagccctgctaccatgcccccgctcctcagcattgctctaggggaggagctggatgaactatggcccttctgccaagcccaggtgctaggggaggaaccccttgcttgagatgtacaggatggactcctcacttcttctgggcttgtgccctggcccgttgaatcttgtcagctgtggccccatctgtggctcccgtgcagtgggacaatacgaggctcagctcagcctcattccggtgttcgatggccacatctgcagcctgagccacatcgccaacaagaagcaaagccttgaccttctgctcgggacccacgcgggaagcatacttcttggcttcgtatttgttatgttgtttcatgcagatctccacaaaaggcaggtagccaatgggtgatttcttgctcttggaaaacttctctagctcttcccaatcttccaaatctgccagggcagtcagcttcagccaccagagcctcttgtcagggatgcggaagtcacgtgccagctgctctgcacgcttgttgtgaccgccaagaatgagggtggtaactgtgtcatgtagagacaggtctaggaactggccccccagctcgtcttctaggcgccgctgcagccgtaggagccgcatttgatcctctgtagccttggctgcaaactcattcttggccttgtagaaggcatcggcggctgtctgcagagctgctactcgcccctcaatacgctcttctgcagcatagctggctcggatgtggaagctgcccaattcctggtgattgtcatcctgattgtaaaggtccttcagcgtctctagctcctgatgcttacagaactgtcggtacaaactgagggccatgggctgattccgaagggtcatgaaaaaatctcctcggttcagctcgttcttcaggtgcagcaacaccgtgaacaccaggtcagtgtccccgctctcgatggccttgcttagtgccagtttgctcctcttcatctttaggagaaggggtacctgctcccctgagcgtggctcatactccagcagcttgatggccagctccgtgcggccacaaccataggctcgtgcagcaatgtcggagtaagagacaccaggcgtgtcccccagcttctggttaatggctcgagccacatcctcatctgagacatccttctgttgcaccttgtagcaggcccagtgggccaggatcctgctgacgccctgtacttcaggaaggcgcaagtactcgcatatctggatggccagggggtaaagtctccgcaacacgagcctgtccagcagcacctggatggtgagctgcttatattggctataggtgagcgggatcccgatgtgatagtcccgaacagcattgagcacacgcaggtcctgacacatgtgcacgaagctgtcgggtggaaatctgtccaggaaacactttccgaaggaggcggccctgagcagactcttctgcatgtctggctggtgctcatgtcctgcagcctcaatgcactgctgcacggcctgggtcagctggcccagctcctggatctcccgcaggtactcgtccgccttctggctctctttctcatactccttctgagcctccaggagcagcgccccgggggccattgaggcaattttgaagatttcctcgctggccgctggaacctcatgcaggaactcgtgggtgctgcgggagaagatgcggaccccatcgagctcaggcaccaggtaggagtcctcatccagcacaaactggatgctctcgggtgcatcgcccaccaccatcagccgcctttcccaggccaccaccacggccctctccttgctacgaggacgaaaacaccagaacatctgctttggaggtgcccggatgttgcagttgagctcncatagcttctaanatttccagaacactac

SEQ ID NO: 64078 - DNA, 2670 bp, Homo sapiens
  misc_feature (1)...(2670): n = a,t,c or g
cgttgctgtcgcttgcagaacaacagaattcagattgtggggttgacagaacttcagagtcttgcagttgggccccgagttttccagtacggagtcaaagttgtacttcaggctatgtacttgctgtggaagttgatgtggagggagccaggtgcctatatctttctccagaaccccccaggtctgcctagcattgctgtctgctggttcgtgggctgcctttgtggaagcaagctcgtcattgactggcacaactatggctactccatcatgggtctggtgcatggccccaaccatcccctcgttctgctggccaagtggtacgagaagttctttgggcgcctgtcccacctgaacctgtgtgttaccaatgctatgcgagaagacctggcggataactggcacatcagggctgtgaccgtctacgacaagcccgcatctttctttaaagagacacctctggacctgcagcaccggctcttcatgaagctgggcagcatgcactctccgttcagggcccgctcagaacctgaggacccagtcacggagcggtcggccttcacggagcgggatgctgggagcgggctggtgacgcgtctccgtgagcggccagccctgctggtcagcagcacgagctggacagaggacgaagacttctccatcctgctggcagctttagaaaagtttgaacaactgactcttgatggacacaaccttccttctctcgtctgtgtgataacaggcaaagggcctctgagggagtattatagccgcctcatccaccagaagcacttccagcacatccaggtctgcaccccctggctggaggccgaggactaccccctgcttctagggtcggcggacctgggtgtctgtctgcacacgtcctccagtggcctggacctgcccatgaaggtggtggacatgttcgggtgctgtttgcctgtgtgtgctgtgaacttcaagtgtttacatgagctggtgaaacatgaagaaaatggcctggtctttgaggactcagaggaactggcagctcagctgcagatgcttttctcaaactttcctgatcctgcgggcaagctaaaccagttccggaagaacctgcgggagtcgcagcagctccgatgggatgagagctgggtgcagactgtgctccctttggttatggacacataactcctgggccagaggctaaaaccccaggacccctgctgtccttcccgcagcttcttcttggagtctcagggcaaaccctttcgagcagcacctcccagtggccagaagctgaaatgacagcagtggtactgcctggtaaaagaattggttctgtgacccgggaagctttggttggccttgatttcttctctggaggcttggaaacgcttcctctcttcttctgttcttcacgccccatgcccctgctagcgtattactgttctgtgacttccctgtgacctctgcagaactcctcatcctgcgtttggtctccaggtgtcccctttctgccgtgttcctaacattttgattcctgtcttgaaaaaagcacctgctgcaccgtaagcccagggatgtggcagctgcagtgggcttggctttgtgaggaactgagtgtgtccacgttgggggaacatcatacttgatacacacgtttttatttgcacaaagaaaatgctgtttttggagccagaattttcatgtctgatttatggtgattttcttaagaaccagaactgctggcagaaagggggcacccacacgcttagatagccgatgtcttattagagggcagtttgtggttcctgatttggaaattaacattctccaaacattccagtccaatgaaagttttatccgctttcccatataaaaattcttcccatgagagtgacttgattctcacaatcccgttggagtcgtgtgtgagtcctacagtattaggttcagcattgccatctccaagtgctcttcgtagggaaacagtttctggtcatgacaagcttccacttcccatctgatcccggcccggccggcctctgcccgagttccctgcatggtgtgggagtgtggggcatgctagctttacgccggcgcccagttctttcacttccactggagtcctgcagggacagctcggggaccatgcaggcccgggtgggcgtggggactcaactagctcagtggtgaacagctggcacgtctgtgggttgtggacggtaaaggccacgtagacctcaggagcccgctggtgctcccggcaggcagccagcctccgcaggaccccgaccagcgacacgatggcttctgggcaatacagcacgtcagcaaatagctccggtggccctgggtggactccttggccatcagggtctccgccagcacctcgtacagctcatccaaaggctctgtgtggacagcctcgtgctttttgatgagttctgagagaaagcaccgggcatacttgactgacggcgggtgcttcacacacacaggatgcttcacagtctacttctgcaaaatatcccgcagcagctcagaatctgatgagtctcttaactttgcttctaagctctgccaggggaaggagcgcagggcgcgcgccgccaggaagcggcgcttgaaactctgcagcaagagttcgctccccgacgaaatcgtcggtnnnngaaaaag

SEQ ID NO: 64079 - DNA, 1237 bp, Homo sapiens
  misc_feature (1)...(1237): n = a,t,c or g
aagctgaaggtccttgcaagaccttatctctcctgtcctttatagcatcccgccatccagagcactgccaggaacctgcatggtgagcgaatgactcccagcagtgcgcaggtgattgggccttgggaccagagtgaggctgagataaaggggagcccagggccagacccctgtcacccacattcctgtccccttccctttccagccagcccagagaccacagcagcacaagaggtggccagcttaaaaaagtttaattgctgaaaacatccaaggcaggtgcgggccagtccctgcggggctcacaccccccttattggaccatcagctctgtgatgcccccttctcctggctacaaacctgggaagtagggcagctggtcccagggccctgagactggtgctgctctagaaggcctggtggggggccagcccccaaggcccttgaccagaactggaacagcaggcaagatggggcagcgtggggtgaccaaagatcctggatgaggccaatccaggctgggaccagcccaggtcagcagtgagaccaggggagacagggtgcccagggcctgcccagggacatgctgctgaccccccgccaccctgcacccctggccacatgctagcgggcagctgatgagcagcagctgaccccagagacagcagaggtgaaaacagtccctgggaactgccagaggcccagaggatgtggaagtgcccacgggaaggcaggagtgcaggggtgacatgtgccggggccagagaggtatcttccagcttgaggatgagccgtgaggtgtgcactaggaagtggcagcacaggtgaggtggaggtgacgggggcgcaggctagtcccactcgtcctcgtccacgccttcaaaggagtcctgggggagtgggtcctcccggttccccagttttgccaccatggcattcagcagctcctccttcttttgctggtcagacttttcttccaggtactgcgctgaggatggggcccgacgagcaggggcctctcggggggcttggctcactgggctcatgtcaggaggctgcaggctgagaagccagggctgcccattagcgccttgcagccaggcctcggcactgagcacaggctcccagatcacagccgtgtctgggaacacgtcatcaaggaagaaatctttccggactcggggcagctcgtgccgaattgggntcgatgggatactcnnngaagctcaataccgtc

SEQ ID NO: 64080 - DNA, 1872 bp, Homo sapiens
ggaattcctatcccaactggctcaagttccacattggtatcaaccggtacgagctgtactccagacacaacccggccatcgaggccctgctgcacgacctcagctcccagaggatcaccagcgtggccatgaagtcggggggcacgcagctgaagctcatcatgaccttccagaattacgggcaagcgctgttcaaacccatgaaacaaacgagggagcaggagacaccccctgactttttttatttctctgactacgagaggcacaatgcggagattgctgccttccacctggacaggatcctggacttccgccgggtccctcccgtggccggcaggatggtcaacatgaccaaggagatccgggacgtcacacgggacaagaagctctggaggaccttcttcatctctccagccaacaacatctgcttctacggcgagtgttcctactactgctccacggagcacgccctgtgcgggaagccagaccagatcgagggctcgctggcggccttcctgcccgacctgtccctggccaagaggaagacctggcggaacccttggcggcgttcctaccacaagcgcaagaaggccgagtgggaggtggaccctgactactgcgaggaggtgaagcagacaccgccctacgacagcagccaccgcatcctggacgtcatggacatgacgatcttcgacttcctcatgggaaacatggaccgtcaccactacgagacttttgagaagtttgggaatgaaacgttcatcatccacttagacaatggaagagggtttgggaagtattcgcacgacgagctctccatcctggtgccgctacagcagtgctgcaggatccggaagtccacctacctgcgtctgcagctcctggccaaggaggagtacaagctgagcctgctgatggccgagtctctgcggggggaccaggtggcacccgtgctgtaccagccgcacctggaggccctggaccggcggctccgcgtcgttctaaaggccgtccgggactgcgtggagagggacgggctccacagcgtggtggatgacgacctggacactgagcacagagccgcctcggcgaggtagtgtccgccggccgctgcgctgcccgggacggagacagaggcgccggacctcccagcaagcgcatgcgcccgtcgtgaattcagtgaattcagaggcaggacgggatcatccggagtcgggagctgctgccacaggaggcgaggctccccaggtctcataggacacattttgtcagtgtttgaccagaaaagcttgggaaggaagcgctgtctgtgctcacggacagaggcggccggcgccggaggcattccatcctttctgtagggaaaggagcctttatttactattttgtatttatatttgatgaataagtatataaacagagacgtgtacacagatgccaatcacctaccaaaccaaacacgaggaccgccctccctggttctgggggcccctcaaggccaagctcacccctcaagtgctctcacactcgggacctaattcaagtaaaaaccctttctccttcctggggcctcggctcctggagggctggagggtctcgtctgaggacgggaggaggctctcgctggacgtctggcctgtgcgctggtggacggatgcctacgtggttttggaggacccgatgaccaggcgtcctgcgagtccgcccgctggcctgcagcacccacctcggacttggctgtggacggttggtgcaagtgcatcctgcagggctggctgtgcgcagctgtgggctgacctttgcagagttttgtggaatagtttgcaatgtcataaaagtgcaataaaggtacagcagatgtgaaaaaaaaaa

SEQ ID NO: 64081 - DNA, 1182 bp, Homo sapiens
ggaattcggatagtttcacaagctctgatagagctgaatatggactccccagaagagctgcagtcctacatccagaagctcagtatagcagtggagcaggctaagcagaaaatcctccaagcggaagtcaacctcgaggtggatgtggtagacagcaagccagagacccctgacctggagcagctggagccgtctttggaagatgtggaaagcatgaatgattttgatcccttgttttcagaggaaacacctggagtggagaagccggtcaccactgttcagcatatcatcagctatttgttgggacagaaagaattcgagctccagagattattttccagccatctctcataggagaagaacaggctgggattgcagagactcttcagtacattctggacaggtacccaaaggacgttcaggaaatgctggttcagaacgttttcctcactggcggcaacacgatgtatcctggcatgaaagccagaatggagaaggaactgttggagatgagacccttccggtcttcttttcaggttcaacttgcctcgaaccctgtgctggatgcctggtacggtgctcgtgactgggccttgaaccacctagatgataatgaagtttggatcaccaggaaagagtatgaagaaaagggaggagagtacctcaaggagcactgtgcttccaacatctatgtccccatccgcctgccgaagcaggcctcccgctcctcagatgcccaggcatccagcaagggctccgctgctggtggaggtggtgctggtgagcaggcatagcagaggccctccagagagactgccctgcacgccatgccttgggccacgttggcagtgtgacaggactgtgattgtgctagatgtacctgcccaagtctgctggtcacatttggcagcaaaatggatttctcctggggagaacaaagttaagggacactgagacctgcccttcagaattcggttcacttgggggcttctgtggtagagactaactggccttctgatgtctttgttcaactgtggccagctgtggcatcagcttcctggagcagtaaatgaagacagagtggaggacacaaatgtacaaaatgcacaagactgatttcttaccacattttagtctttcttgttttaaaaaaaattctttaaaatttaaaaaaaaaaaaaa

SEQ ID NO: 64082 - DNA, 1369 bp, Homo sapiens
  misc_feature (1)...(1369): n = a,t,c or g
catctgtacaactctctccgtttctccgtctctctccctccctccctccctccacccccccaatctttttctccccatctctccatctctctcttatctcttcaggaagagcctaaaaggcggcaacaccaacacctcttgacatggaaatacactgatacaataggcaaaaggaaacactcagattgcatcttcccggttccaggtggccttatttgggagattctatactgaccttattcctgtgatggatgatactggcatccagccgaggcatctgggatggagatgccaaggctgtccaacaatgtctgacagatatttttaccagcgtttacaccacctgcgacatccctgagaatgctatatttggtccctgtgtcctgagccatacttccctatatgacagcatagctttcatagctctcaagtctactgacaagagaacagtaccgtatatctttcgggtagacacctcagcagcaaatggttcctcagaaggtctcatgtggctgcggttggtccaatcggccagagataaggaagagcagaaccttgaagcctacataaaaaacggacagctgttctaccgctctctccgcaggattgccaaagacgaggagttactagtttggtacgggaaagaactgactgagttactcttgctctgcccctctagatcccacaacaaaatgaatggtaggttggctcgcgaccggcgtgtgggcccttaactagcgggggagagacgcagggagcggcaggggctcacccggcgcgttggcgcgcctttcttcccttcgggtgtctcataggaagattctgagatatagtctggaatgaagttaaacagataggtgaggataaagcgaggaaacttgcttgtttgctgtattccctccaaatcaggagggaaagttagatcaggttggtcattcttttctcaggcactcaggccctgagaaatgaaggtggatttgtcaaggggatggtggcaaactggcttgggggcgatgctgagtaatcatgtggtgtgcgtgtgtgtgtgtgtgtgcgtgcgtgcgtgtgtgtggtgtttgctcactaagcagggtcgtccccttacacatgcctggaatgcagccaacgtttccagtttgagttcccctatgtggcgcatctgcgtttccgctgccccaagagacttcacagcgctgatataagtccccaagacgaacaaggcggcggcgtgggcaccaaggaccacgggggcggcggcggcggtggcaaaaaccagcagcagcagcaacaaggcaagcggccgacgaaatcgtcgacccgggngttccggnccaggggtctcaacgacgactttcaaaaggagcccacg

SEQ ID NO: 64083 - DNA, 756 bp, Homo sapiens
  misc_feature (1)...(756): n = a,t,c or g
ggaattctgtccttgagcccaaagtctcaggtgcttggagcgtggctagaaacagatcttttggatcccacctctttcaaaaacaaaaagtaccaactggtgaggcaggaagccaggtccaggctgggacaggctcctttcctagggcagtgcgctacaagagccgggggggtcagttctgctgtaggatgaggttttccagttcatctgcagagcgcagcaggaaggcagcagactcccggtagcccgcgatgagctgccgcacggcgctgatctccgtggggctgagctgagcggtgggcacgggcctgctggtgctggtgctggaaggggtgggcgtgggggtggtggaggtggtagaggccccgcctttcatgctgaggtccgtgggccctgtggagagggaagtagggtgagaagggagcagccaccctgcctggcatctgggaggtgtaccttccttggcactgtcataacctatggcctagtgcccactgtgagttgggcactgaagtccgtggctctggtccatctccctgatggctctatccctagtgcttagaatgggcctgcgggcgacagggttctcagagaatcctcagggtgatcttgcaaggatccggttttaggtgaggaagaggcggccttggggcaaaggaactcccaagatctgcctctcctcagtgtggtgagcagagcttgcgaatggcaaatactacttccattgaggaactgtgggacaagtgctaanagaaa

SEQ ID NO: 64084 - DNA, 1344 bp, Homo sapiens
ttttttttttttggtttataggagagatttatttgaagaaatattacaacatataaaaactacataaagtcttaatttccactcatacagtggtagatttgatataatgcataataaaaaacttttaaaatccagaatgcacaaagtactgcacaatttgatcactaaatcattagttgataagcgaacctcacacaacagcttcatgtcagccaaggccacaaacaccatgtaccacacatgtgaacggacagattgacatgttaaaaacacaacatcagtgcatgttggggattcctggtgccagaaacaggggtgacgggagggcagaactagtccttagcagcttcctcctcctttattttagctgaggcactctctcgggctttggccaacatacaaagcttgatctccaagccaatggctttggccaggggcggtggcacggcattgcccacctgccggtgcttgtccaggatgttgccgaagagccggtaggtgtcagggaagccctgggagcgggcacactcccgcacgctcaccacacggtgctgctctgggtggagcacgcggccctgcttgcccatgggctcggggttggtgacggttgtgctgaagaagccgtcccactcgagccttccatagaggccagcccagtggttgtgccggttcccggtgtggggcaggcaccaggggatgagggtgttgaactgcctggctgcggggtcgcaggctttgccggcttccacgcaggagcagaccccacggagggccccagagctgctgcggccgttcttcctgtcatggtgggtataccgcagcttcctggccatggtgccgtctgagagccgcacctcgatgttgggcagatcgcgccagtctgaccctggggccaaggggatgtgccgcatgcgggcagccaccaatgcactcatgtccttacagagtgtggggggcccagctgtcacctcatgtgagcagcatccgagcatccatggtgggctgggagctgggaacaccatggtgaccaggaagccccctggggctcacgcccatcgggaaagagacagtcagggatatcgcacttggctcgaggccacggcagggacctgaggcagcgcaggtgtaggagagcgtgggaatctaagctgagcctttagggtgggggaaggggagtggtgccaggggatggtgaaagggctggtcttggcatcctgggaaaacatgcggggagaggcagcaagggggaaggcagtggtgggtgggcagtggcttgacaccattccagaccaagtccaggactgcgggagctctgacacttcccatgaccatgcaagagagacc

SEQ ID NO: 64085 - DNA, 450 bp, Homo sapiens
tattgacgaccctagtccgtgtggtggaattcgcagcccgctgctgcccccgacttcctgcagctgccaacggagccaggccgcggccgagcagccgccgtggccgctgctgtggcctctgcagccgctgcacaggaggtgggccgcaggagagagggtcccccagtcagggcccgctctgctgaccatggggaggacgccctggcgctcccaccctacacaatgctcgagtttgcccagaagtatttccgagaccctcagaggagaccccaggatggcctcaggctgaaatccaaggagcctcgggagtccagaaccttggaggacatgctttgcttcaccaagactcccctccaggaatccctcatcgaactcagcgacagcagcctcagcaagatggccaccgacatgttcctagctgtaatgaggttcatgggggatgccccactg

SEQ ID NO: 64086 - DNA, 1420 bp, Homo sapiens
ttttttttttttctgagattttttaaacaaaaacattttatttcaaagggcagataagtattttgctagacacaactgaaaaaaacagccagagaacaattggagtttgtcttaataaataacaaaatgccatttatgtctcttaaacttcatatgacacaatacacatcttaaataaataacccagtctgttgctatgtattaaaaacagtcccaggtgtggtgtgtgttgtggagcgaagccggttgctgggcttggacccgccaatcccagtgccggtggggagaccgcttcccaaacctctgctgtgcccctgtgcctgagctgaacagcagcgccatggccccggagggcggcaggaaggccaggggctgggatgacggtgacttcggggcgctctgtggctggcaagcctgggtgcctccaaccggaggtgcttcctgcctcctcacccttggcttctcgacaattagtttttaggtcagtccggaacatcatgggtgctggaaaagcctctggggcgatgtggtgggtctgagctccgtcttggtttccaacctggttgtcggccttcttgatgttgtgtggcgctggctctctgcttctctgctggccggcactgtctggtgggctctggtgtcctgtttttccatgtggcacatacaggttctctgaagccacagccagcgcagtactcgctcactttgatgttctgtggctggaatgcctgagagggtcggggctacctgtgcaccccccccaccctcccggccttgttgtcacgcgtgcatttgggtggctgcatgggcacacgcctgtgaggccagggccggccgggtcttcggttctctggcttggctcaggcagcagttcctgcagacttttctcactgctgttcagcaatatgtctcctttaaaatagcaccaggggttctcaggttggcttctgtgtcttttccaggtgcgtgtgcaaaaggcaaagggaggtcactctttccatgcagggccctttgtctgaactgtccttgaaaggcagttgtgaagggtgggcccagaccccctccacgggactggggtggggtgtcactgttccttaaatggaacttggtcccccgtagctgaccctgggcagctcagctccttgtgtatgaggcggatcaggaacagtaaggcacaggcatctgcaaacatcagcatgtaaaacacattgctccagccggacggggagaggagcccagccagcagggggcccagggctgctcctacagagcccgtcccgtcaatgatggccgtcacggtggagagggcgtgcgcgttgcctttcagacttttatgagtccccaggtcggcggagacggcggtggtgatgagtgtgtagggcccactgaccagggctccgctgagcagcagcatgtcgat

SEQ ID NO: 64087 - DNA, 1582 bp, Homo sapiens
  misc_feature (1)...(1582): n = a,t,c or g
tgggagggtgaacaggggaattgcttggacccgggaggcggaggtttcaacgaaccaaggttgggcccttgccgttcagggtgggcaaccagagttaaaccctatttccaaaaaaaaaaaagtattccaaactccaaaatcaaaaacacttccagtcccaagcatttcagataaggaatattcaacctgtatgaatgttcctagggaaaaaaagacagccaaaatataagaccatgtataagaactaacttcagtagacagaaagaaaaaagtaccaggggaagaagaaagagaccgcattttaaaacaactatacaaatttgagctgtaagaaacactgacattttctataagcatgctagagcaaatgggagaaattcataagacgttttctagaaaataaaactaatataaaaaaacttatcaagatttgtccaaggaaaaagacgaagaaaagttaaatataatggcaagaaaacattcctaccaattttatttatccaggcatgtcttaaatatggctgtttgttacatacagtgattctgcagacatgttgacatgacagtgaaatacataaatatgtaatgagaaaaggcttaactgtggataaaacaaagtcattacaattaaagactcgagtttttggcatttccaattgtagtcagggcactgaggtcaaatttaactacaaattttgcattgtctacattgaacacatgattcttaaaagcctcatgttttatttcagaacaggcctcaggaagttgcagactgtgcaggaggttgtttagggcacaagtcatttctcccaatattaacttataggcagtctccaaaacaggaatattcttcaagctgagcattgcttgataaacagcatgggctacagcaacaacctctttttctttatgataacgcaagaatagtagtttagatgatggtataaacagtttttctacaaatgatgatggcagtttcgtatttatctgttcaacaatcagcgtgagtaaattcaagactgagatgatataattggtaccacaagtctggcaattctccagttggtctaatccatatgtaatgaccatgtcacaatgtatagtcatgctaggatccaagctgccgagcaaaacaccaacacactcattagcagctgtcaacacagcctcagaaaaaaacacctggtttgcagccgtcacacatctcattactctgtacagaacctgtgtctctgaagcagcggtttcccctcgaacttggccgacaccaccaggactcggaagctacaggagcaacggttgagggtcgtgtcctccacctcctaccgagcggaagaatatgaatggtgccgaacccgccccccgagctcttttccccttgtccggcggctcaactcaccacatgctccgcctccaggtcccgctgcagcttctcgcggaggtattcggcgctgagttccatggcggcagtccagctagaacggcagcccagcagggacacaaccccagctcgggcgccggcgaattccncgcntgtgctaggataacttaggntcctcagttggggggactctgggactcc

SEQ ID NO: 64088 - DNA, 4118 bp, Homo sapiens
gcagcagatacctggcctgcttccagctcatggagaatccggcgacgctctccgaaagcctcgcctccagaagcccatcacggggcacttggatgacttattcttcaccctgtacccctccctggagaagtttgaggaagagctgctggagctccacgtccaggaccacttccaggagggatgtggcccactggacggtggtgccctggagatcctggagcggcgcctgcgtgtgggcgtgcacaatggtctgggcttcgtgcagaggccgcaggtcgttgtactggtgcctgagatggatgtggccttgacgcgctcagctagcttcagcaggaaagtggtctcctcttccaagaccagctccgggagccaagctctggttttgagaagccgcctccgcctcccagagatggtcggccaccctgcatttgcggtcatcttccagctggagtacgtgttcagcagccctgcaggagtggacggcaatgcagcttcggtcacctctctgtccaacctggcatgcatgcacatggtccgctgggctgtttggaaccccttgctggaagctgattctggaagggtgaccctgcctctgcagggtgggatccagcccaacccctcgcactgtctggtctacaaggtaccctcagccagcatgagctctgaagaggtgaagcaggtggagtcgggtacactccggttccagttctcgctgggctcagaagaacacctggatgcacccacggagcctgtcagtggccccaaagtggagcggcggccttccaggaaaccacccacgtccccttcgagcccgccagcgccagtacctcgagttctcgctgccccgcagaactcacctgtgggaccagggttgtcaatttcccagctggcggcctccccgcggtccccgactcagcactgcttggccaggcctacttcacagctaccccatggctctcaggcctccccggcccaggcacaggagttcccgttggaggccggtatctcccacctggaagccgacctgagccagacctccctggtcctggaaacatccattgccgaacagttacaggagctgccgttcacgcctttgcatgcccctattgttgtgggaacccagaccaggagctctgcagggcagccctcgagagcctccatggtgctcctgcagtcctccggctttcccgagattctggatgccaataaacagccagccgaggctgtcagcgctacagaacctgtgacgtttaaccctcagaaggaagaatcagattgtctacaaagcaacgagatggtgctacagtttcttgcctttagcagagtggcccaggactgccgaggaacatcatggccaaagactgtgtatttcaccttccagttctaccgcttcccacccgcaacgacgccacgactgcagctggtccagctggatgaggccggccagcccagctctggcgccctgacccacatcctcgtgcctgtgagcagagatggcacctttgatgctgggtctcctggcttccagctgaggtacatggtgggccctgggttcctgaagccaggtgagcggcgctgctttgcccgctacctggccgtgcagaccctgcagattgacgtctgggacggagactccctgctgctcatcggatctgctgccgtccagatgaagcatctcctccgccaaggccggccggctgtgcaggcctcccacgagcttgaggtcgtggcaactgaatacgagcaggacaacatggtggtgagtggagacatgctggggtttggccgcgtcaagcccatcggcgtccactcggtggtgaagggccggctgcacctgactttggccaacgtgggtcacccgtgtgaacagaaagtgagaggttgtagcacattgccaccgtccagatctcgggtcatctcaaacgatggagccagccgcttctctggaggcagcctcctcacgactggaagctcaaggcgaaaacacgtggtgcaagcacagaagctggcggacgtggacagtgagctggctgccatgctactgacccatgcccggcagggcaaggggccccaggacgtcagccgcgagtcggatgccacccgcaggcgtaagctggagcggatgaggtctgtgcgcctgcaggaggccgggggagacttgggccggcgtgggacgagcgtgttggcgcagcagagcgtccgcacacagcacttgcgggacctacaggtcatcgccgcctaccgggaacgcacgaaggccgagagcatcgccagcctgctgagcctggccatcaccacggagcacacgctccacgccacgctgggggtcgccgagttctttgagtttgtgcttaagaacccccacaacacacagcacacggtgactgtggagatcgacaaccccgagctcagcgtcatcgtggacagtcaggagtggagggacttcaagggtgctgctggcctgcacacaccggtggaggaggacatgttccacctgcgtggcagcctggccccccagctctacctgcgcccccacgagaccgcccacgtccccttcaagttccagagcttctctgcagggcagctggccatggtgcaggcctctcctgggttgagcaacgagaagggcatggacgccgtgtcaccttggaagtccagcgcagtgcccactaaacacgccaaggtcttgttccgagcgagtggtggcaagcccatcgccgtgctctgcctgactgtggagctgcagccccacgtggtggaccaggtcttccgcttctatcacccggagctctccttcctgaagaaggccatccgcctgccgccctggcacacatttccaggtgctccggtgggaatgcttggtgaggaccccccagtccatgttcgctgcagcgacccgaacgtcatctgtgagacccagaatgtgggccccggggaaccacgggacatatttctgaaggtggccagtggtccaagcccggagatcaaagacttctttgtcatcatttactcggatcgctggctggcgacacccacacagacgtggcaggtctacctccactccctgcagcgcgtggatgtctcctgcgtcgcaggccagctgacccgcctgtcccttgtccttcgggggacacagacagtgaggaaagtgagagctttcacctctcatccccaggagctgaagacagaccccaaaggtgtcttcgtgctgccgcctcgtggggtgcaggacctgcatgttggcgtgaggccccttagggccggcagccgctttgtccatctcaacctggtggacgtggattgccaccagctggtggcctcctggctcgtgtgcctctgctgccgccagccgctcatctccaaggcctttgagatcatgttggctgcgggcgaagggaagggtgtcaacaagaggatcacctacaccaacccctacccctcccggaggacattccacctgcacagcgaccacccggagctgctgcggttcagagaggactccttccaggtcgggggtggagagacctacaccatcggcttgcagtttgcgcctagtcagagagtgggtgaggaggagatcctgatctacatcaatgaccatgaggacaaaaacgaagaggcattttgcgtgaaggtcatctaccagtgagggcttgagggtgacgtccttcctgcggcacccagctggggcctgtctgtgcccctcctgccctgcaggctgtcctccccgcctctctgcagcctttcacttcagtgcccacctggctgacctgtgcacttggctgaggaagcagagaccgagcgctggtcattttgtagtacctgcatccagcttagctgctgctgacacccagcaggcctgggttccgtgagcgcgaactccgtggtggtgggtctggctctggtgctgcccatctacgcatgtgggaccctcgttaatcgctgttgctcaaaatgtattttatgaatcatcctaaatgagaaaattatgtttttcttactggattttgtacaaacataatcctattatttgctatgcaatattttatgctggtattatatctgttttttaaattgttgaacaaaatactaaacttttacacgtctaaaaaaaaaaa

SEQ ID NO: 64089 - DNA, 2071 bp, Homo sapiens
ttttttttttttattcagaaggaagtgaaatcctatatcaaggtgcttagtgcatgtcaatacctagtgagggtattacagtcatactcctgagtctctggtcatgattgtcctttggccacttccaaactggaagccactgttattttcagcctttgaacctgaagcttgggcaagggagagccccgggtctgtcagtatggtggccacccgctcctgtctgtttccccactcagtgacctcataccaggtgggtggatgagggttgtggccaccgtttgcctggtttggggtggtgcccggtcggtctcctgctggccggggctgctgtcttcagcaaactttagggaaacccgggcgctgagatttcagctcttacgccccagaaggcctctaagaatcactagctcagtccttccccaccccagcctctagaggtcctggcccttgtgccatgactggccccacagtagtcattttgggaagaaacccaggaatgggcagaatgggagacaaagccttgatcttcagggcaacctagagtctgagccctcatcagccgaagccatatgggcacagggaccagggaggctggcaggttctacagttactgcttcccttgtgagtcaggtcagccctgggtactccccaccactctcaccatggtgagtgggagactctcatctgccaacacccttgctgcccccaagtatttcgaggaaggtggtgagaaaagtgctagctggtgagagagggctcgtgggccccctctactggctaaaaggtgttttacgggtgcagggctggccaggcactggggtgggcacccttaaggggcttgcagaaaagattttgggtgggcaggtgagacctagaaaacccagggcaagacactgggtgcttaaacagagaatcttccaggagcacagtggcccgccctggccatgggatgagtttttaatgtgaggcaaaatcagtccacaatacaaaatctaaaaatcacacccacttttcccacctggctcccggggaggggggaagctgggggtttcttttgcctgcagggtgtggggaggagcagaggagggccaagaaagggagaaggaaacagaggccacagaggcctggctggaggtatcctgctgccccctgccctgtcctggagctgcccttggcctcctgtgccctctaccggtgcacgcctgtgtgggcccagcccccatctgtctggtctggccctgagaggctcgggcaccagctgcatcatttctctttcttctccagccccttcgatgctgatgcctctgttccctctttggattctgtcactgccgctggatccttaggatttgactcctcataactgaacatctctgtcacttctcccttggccagcgccaccaggacaggaaaaccgatgcaggcggggaccaggtataggagggcaggctgagcatgcttgaagatgtgcatgatgaagatggtaaggcccaggccgaagatgtaggctgcaaagctggtgtagaagtaggtgtgggtattcttcttcaagctgatgtcaaagcgcagcagcaaggcaatgaagatccctggaatgacgacatctccaagtcccagcatggcaaagttgtttgcttcgaggcctttctccagcagatcctggggaaacaccaattttattggtgcctcgaaggacttggccactgtcaccatcacattggtgccaaatacccagaagacatcgtagatgaagagtccgcccagcaggatgcagccagtgctgacattgttgaggtgcaggagctctactccattaagggagaaggccaggccaaaaaggttgttggcaatccagtgcttcctcagcaggtaccagacgccaacgatgctgctcaggcccaggcacaccaggtccttggtgtcaaattcataattgatgatctcttccttgttttccccagaaccctgtgtgaagagcagctggtactgtcgatttggaaagctggctggaaaaaacttattcatgaaggggctgatggtgtgggacagggccagaattccaccgcaatgc

SEQ ID NO: 64090 - DNA, 469 bp, Homo sapiens
cagtgtggaggaactctgactggagcaggtataacgaggcccggcctcccaacaacggacagaagtgcacagagagcccctcggacgaggactacatcaagcagttccaagaggccagggaatattaaagagactgggatgaggtggaggacgctgcctctggttctggagcacacacgtgctgcactgacgtgccgactggcgccgagaccttcatagctgcggtcgtgtatatttgtatataccacatgagtatttctcatacattacgctaggggcgtgtgccacgcccaggggactgccttgtgaagccgccctcgccatctgcagagctccttgaaagtgcccctggggagcgatgtgggcagaaggatggggacaacttggaagccagaagaagaacctggaagccacagtgggtgcgactcaattcacacccggatccagagtttcaaagagaggcaaaggg

SEQ ID NO: 64091 - DNA, 1645 bp, Homo sapiens
ctccccacatcatgagtttagtgtcagatattatttacaaacattttaaaagcagggtcagcaggcccggaggattgcatgtccagtgggagtgagggaggggtggaggccactgagggtgggtcagcggtccccagggttctgtggcttcttccagactggcttggaaaaagtgcttttattttcttggagttcccccatgcagatgttaactttaggggcaaaggaaagacaaaggctacatttcatttctgagtctatagatgtatccgctattgggaagaggttagaggtcaatgactaggacagtatgtcccatgagaatcgagggaggattcttgtctgtatgtgagtgggaagtggtgaagcctcacagcgttgtcaggcaggtgtggggtggtgattggccttgacagagtacccaaccacccttcctcactgccctctcacgccatttctcctgggggctccacacaggtgtatgcccacgcaggcgcgacggttggaggggaagatgtatatcacctgcggccgcagaggggaggattacctgaaagagacacactgctacgatccaggcagcaacacttggcacacactggctgatgggcctgtgcggcgcgcctggcacggcatggcaaccctcctcaacaagctgtatgtgatcgggggcagcaacaacgatgccggatacaggagggacgtgcaccaggtggcctgctacagctgcacgtctggacagtggtcatctgtctgcccactccctgctgggcacggtgagcctggcattgctgtgctggacaacaggatctatgtgttaggtggccgctcacacaaccgcggcagccgcacaggctacgtgcacatttacgatgtggagaaggactgctgggaggaagggccccagctggacaactccatctcaggcctggcggcctgtgtgctcaccctgccccgctccctgctccttgagccgccccgcgggacccctgaccgcagccaggccgacccggactttgcctctgaggtgatgagtgtgtctgactgggaggagtttgacaactccagtgaggactaggctccctgtgcctggcatcagagggaagggaggctggggctgcagggcagtgaaacccacgcagcctaggccagagcactttactccaggcagggcccctgcccctgttggcccacagcttatgggccctgccctctttcttcacaccagccccttggcccagcctgccgcaggccatctcagggccatgcagatcccaggctgtggattacgtcactgcaggaactgcttctgaaaggctttggccttcctcagtgagccctggaggggttggccttctctcctccctgcctagatcagtccttctccaaaaggacctgggagctggcagcctgggcaggggggctgaggcacgtggtagccctctttctgtgaatggggtggggctgtgggggcagctggggttggaggatgagagctcctgaggggcagaggagcagagatgcatcagctcgcctgggactggctctgtgataaaaagacccctcccgctgggttttcagaccccatgttgttggtcaatgaaataaagcatcttacagaaggtgttaactgttaaaaaaaaaa

SEQ ID NO: 64092 - DNA, 7196 bp, Homo sapiens
cccacgcgtccgggccggggctcaagatggctttagccgggctctgcgccctgctcgcctgctgctgggggccggcggcggtgctggccacggccgccggcgacgtggatccatccaaggagctggagtgcaagctcaaaagcatcacggtgtcggcactgcccttcctgcgcgagaacgacctgagcatcatgcacagcccctcggcctcggagcccaagctcctcttctcggtgcgcaacgacttcccgggagaaatggtcgtggtggacgacctggagaacacggagctgccctacttcgtgctggagatctcagggaacacagaggatatccctttggtgcgctggaggcagcagtggctggagaatggcactttgctttttcacattcatcaccaagatggtgccccaagccttcctggacaagaccccactgaagaaccccaacatgagtcggcagaagaggagctgaggatcctccacatctcagtcatgggtggcatgatcgctctgctgctgtccatcttgtgcctggtgatgatcctgtatactcgccggcgctggtgcaaacgccgccgggtcccgcagccccagaagagtgccagtgctgaggcagccaatgagattcactacattccttctgtgctgatcggcgggcacggacgggagagcctgcgcaatgcccgcgtgcagggccacaactccagtggcaccctgagcatccgggagacacctatcctggacggctatgagtatgacatcactgatctgcgccaccatctgcagagggagtgcatgaacggaggggaggactttgccagccaggtcacgcgcaccctcgactccctgcagggctgcaatgaaaagtcggggatggacctcacaccaggaagtgacaatgccaagctgtcactgatgaacaagtataaagataatattatagccactagccctgtggactccaaccaccagcaagccacccttctctctcacacctccagcagccagagaaagcggatcaacaacaaagcaagagctggttccgccttcttgaaccctgaaggggattctggcacagaggcagaaaacgacccccagctgaccttttacacggatccttcaaggagcaggaggcgtagtagagtgggttctccccgaagtcctgtgaataagaccaccttgaccctgatcagcatcaccagctgtgtgattggcctcgtgtgctcctctcacgtcaactgccctctcgttgtcaagatcaccctgcatgtccctgagcacctgattgctgatgggagccgcttcatcttgctggaggggagccagctggatgccagtgactggctgaaccctgcccaagtggttctcttctctcagcagaactccagcggaccctgggccatggacctctgtgcccggcggctcctggacccctgtgaacaccaatgtgaccccgaaactggtaggcgggagcaccgggcagcgggggaatgcctctgctatgaaggctacatgaaggatccagtacataagcacctttgcattcggaacgaatgggggacaaaccaggggccatggccttacacaatatttcagcgaggctttgacctggttttgggagagcagccctctgataaaatatttagattcacccacactcttggggagggcatgtggttgcccctcagcaagagctttgtgattccaccagccgaactggccatcaatccatcagcaaagtgcaagacggacatgactgtgatggaggatgctgtggaggtcagagaggagctgatgacttcatcctccttcgacagcctggaggttctcttagattcctttgggccggtgcgcgactgcagcaaagataacgggggctgcagtaagaatttccgctgtatttcagatcgcaagctggactccactggttgcgtgtgcccatctggactcagtcccatgaaggacagctctggctgctatgaccgccacatcggggtggactgttccgacggcttcaacggcggctgtgagcagctgtgcctccagcagatggcgcccttcccggacgaccccaccttgtataacatcctcatgttctgtgggtgcatcgaggactacaagcttggtgtggatggacgctcttgccaactcatcacggagacctgtccagagggaagtgactgtggggaaagcagggagcttcccatgaaccagaccctctttggggagatgttctttggttacaacaaccattccaaggaagtggctgccggacaggtgctgaaaggaacattcaggcaaaacaactttgctcgtggtttagaccagcaactgccagatggtcttgtggtggccactgtgcccctggagaatcaatgcctagaggagatctcggagcccacccctgaccctgacttcctgactgggatggtgaacttcagtgaagtgtctgggtaccctgtgctgcagcactggaaggtccggtctgtgatgtaccacatcaaactcaaccaagtggccatctctcaggccctcagcaatgctctccactcgctggatggggctacatctcgtgcagattttgtggcgctgttggaccagttcggcaaccattacatccaggaagctatctacggctttgaggagtcctgttctatctggtacccaaacaagcaggtccagcggcgactctggctggagtatgaagacatcagtaaaggcaactccccatcagatgagtctgaggagcgggaaagagaccctaaggtgctgacattcccagaatacatcaccagcttgtcagactccggcaccaagcgcatggcggctggagtccgcatggagtgccagagcaagggacgatgcccctcgtcctgccccctgtgtcatgtgacatccagccctgacacccctgctgagccggttctgctggaggtgaccaaagcagcccccatctatgaactagtgaccaacaaccagacccagaggctcttgcaggaggctaccatgagctctctctggtgctcagggactggagatgtcatcgaggactggtgtcgatgtgactccactgcttttggagctgatggactccccacctgtgcgcctctcccacagcctgtgctgagactctccacggttcacgagcccagcagcactcttgtggtcctggagtgggaacactcagagccaccaatcggggtgcagattgtagattacctcctccgtcaagagaaagtcactgacaggatggaccactccaaagtggagacagaaacagtgctgagctttgtggacgacatcatctctggagcaaagtctccttgtgcaatgccatctcaggtgccggacaagcagctcaccaccatctctctgatcatacgatgcctggaacctgacaccatttacatgttcacgctgtggggagtggacaacacaggacggcgctccaggccaagcgacgtgatcgtgaagaccccatgccccgtggtggatgatgtcaaggctcaagaaatagcagacaagatctacaatctcttcaatggctacactagtgggaaggagcagcagaccgcctacaacaccctcctggatctgggttcccccaccttacaccgggtcctctaccactataaccagcactatgagagttttggggaattcacctggcgatgtgaggatgagttaggtcccaggaaagctggtctcatcctttcccagcttggggacctcagcagttggtgcaatggactccttcaggaacccaagataagcttgcggcgcagctcactcaagtacctggggtgccgctacagcgagatcaaaccctacggacttgactgggcggagctcagccgggacctcaggaagacgtgtgaggagcagaccctgagtatcccctacaacgactatggggacagcaaagagatctagcaccataaggccagggagctgctgccagaatgaagtaggaaagaggagggatccatctgggttggtctgtggatttttaatattttttaatggaacatgaaaacctccacagcaacatcgaaaccagggagaaagtgatccttgctccctgcagaacttcttcagtatgatgttctccatctgcatgattgggaaatctgccagccagtggcttcatgcagtgccatatttctttagaggattactttggggtttgctttgccattaatttgttccattcatttttttttccctgagaagtttaccaaaatgctcaagagctctgccgtgctccccatgaaaagtctattaagtaggcaccctgtgctcactcagttcctaaatccattgcaactgggagcagaggtgaggccagaaagttgttaggcctgccgcaggccccaccctcaagcattcctcaggaagcgtctcactctgggagccttggccctgctcacagagagagacaatagaaaattgaggaaggtggcccttgtctgtgtctcctggttttcttcctaggccttgctatcactatttccatacccgaaaggtgaaaccagctttcattataggccccagtgggccacttgggttttgagatccttccttattttaagccaggactgggattaaatctccctctgtcagatctctgtcccttcctctgaacaacatgatctttgagagggaacaagatgccatctgtcaactgcaccttcagaaaagtctacctgggagactagttagcagtccacattcaagagaagacttggagtttattgttttttaaaaaaaccatgcttcctttggatagacttctccagcctaccaatatatatccatgtgcctggattatctttaacccccacacctcttaccttggacaggtaaggcttggccgatgtctgattgggaccaggaggggtcaacactttcatatcagtgttacagtgaactaaagctattattgatcacaaaaaacttctgttcatccccaccttgctaaattttgcttgtgtttgctagtttttgcaaatcgtttctctgatgaccataagcaggaggattccaccatggtcactgcccatccagtcacagggattctgtgtagggaagcaccactgattgcagttaacatctagagtgttgtttccatcccactgcccaagcattggcatggtcatgaatggtggcccagccaacaggaagcccagcctttcagaaagagcctgggcaaggccctgttgactagcaatggccttagctgtcccacacaactcagtggcctgaacacacaccttcagccaccatgcctttgaccagggctcctcatctggaaacatatgagaaaggtcagcaaacagatgcaagacctataaggctagtcattgagctatattggttttttttctaaatagtagtagtgacagataacatttattgagtgcttgctgtatgccagggcgctgatgtaagcactttaggtatcattgaattctcacagcaactcctgaggaaagtgctattcttgtctccattttagtcttgagggaaatcgaggcaaagagaggttatacaacttgcctcaaatcccttgtgcactgtaactcacactgagtttcagtgtgatattcaggctgttggtctccaggggcacaggatcttaggctactctggggatacccagttctggttttcagtatcatctgggcacacaactgtccaagctctcagccccacaggggaacctggcccagaggagctttaccttttccccaaggcatctgtggcatggacatgtcctctgtgcaatggaaggaggaggggcgaaagtacgccctttagcctttggagctagagcacccttgggacccctagttccactgcacatggccctcctccccaccctcatgactgggaaggaagcctgtgatgaggctgagataaagcacaggggggtttcactctcctctctccttctttccaaacactgaaggatttatttcaaactctctaatgcacctgcctcaggagattcccctactttcaaagcaaagatcagcagaaaaattggctgtcccacctgtggcaaatgctggagcctcagttaaagtgcctcaaggggcaaatatttcaccattgccagagaagatgtgacaggccaatcagacagggcccagagcatctctttgctgctactgttttgccatccttctattcatatctgtgcagaacacggtgttttaagcttgagtgaaaggagggtgaggctgccgatgccttcctgcccagaagtggatgatgtgggagttgacaggccagggagagggtgaagcaggtatcagagtcactcctctgtaccctctccttctgtttttattttaggcacactatcttcctctctcctatctttccctcaatctcccaagttcctctaccttctttatctttgtcttttacttcttctttctgtgaccctccttttttggcctcctctttccccaagactttcttcctcctgtttctcgttgagttctccccactgaatgtgtgtatgtatgtacacacacacacacgtgtgcacacacaatgcacacaactcctatgactggctcctacttacattcaagttaaaaaggctgatatgaacagggcaggggaaaatcttaggatggttgtacaattgactggaggattttttccccttggaagacactattgatctcaacctgctgacttttcctaatgcttacctgaaggaacccatcctggctagaaagggtgatgggtactgggaccgggtattccaacccttggagttttcaagctgcccaaacaggtccttaaggggaggtgccttatatccccacccaacactctccccagactccccatgtcccccaagacctctggagtttccctcttgaatgtacatgaacccactgtaatagcattagacttttaattgagtgtgcaatcgttttccatggagtttggtccgttcattattttttagttaactacacttcttgatattcaaatgttctattaaaaaaactgagtatgaagaaaaacactttactactgcagaaggaagaaagaatataatatgaccatcttcaggtataacagtgttgtttaaaagagaattattgtatgattataaaagatgaaataattaactgaataataaaacaaagctattagtaagcaaaaaaa

SEQ ID NO: 64093 - DNA, 2115 bp, Homo sapiens
ttttttttttttaatttcatttagtttattaatatgatccaaacagatttagcttaagagatgaggacaggacataaaacaagatttggctgagctatataaagaaaaccaaaagagtgacaagattttcaattggtgacaatttaaagtcatttattaactaatataaaaataaatctacaatagaaccatgacttaaactgagccagtatgtggtacatgtgtcacccaaagtcagcaaggaaccattcagaacttacaccctcctggactggctcacacggcctgtctttgatctggaacctcatataagtcacctcacagcactgggtttgcagccagctacattttttctcctcagcctatgatcagttattaatacataccatttctatgtttcccatagcctctttcttttcagatagtgacagagctctagaaaaaactcatctggccagtactaaacagggaaggtgaaaaaaagtactttaagatgggtgtggggtcatttggggtaccaacagactcagataaacaagggaaccagagtgggcatcaacaaaaagcattgaggtaaggggcccagtggtaattcacagaaaagaccagaactggacaatattaaagtcaggaagaatggctgttacacttgaaaagtcacactagaagaacaacaaagaagaagaaaactggaatgaacagtagtcccttttatattttttaaaaggaaggaattttttaaagaaatataaaagtcaagtcaaaaagtgaaatagcaacaatgagtatttaaataaaacagaatgtagtaggaaagaaagaattcttttattcccacatgacagcccaattttttaaaatggttatcttaagtcaggccagttttattttattgaccatgtatatataacatcagatatttctaagaaagagaagagaacctgattgatgtctctcatgtaacatggaaaggaaaaaggagggagggaaaatggggaagaaaagtctccacactcttcatgcccaaagtggacacagtctttaacctgtacttcaaatgacaggttcagatcatagaaaacattgtcaagtccaacagaattttgatcacaagctcttggtgctcagcgtgcagctgagtagcagaaggcaaacaagcaagttgatggagaaatctctgtgcagggaagaggaagaagacgtgccacacaccaaaggttctgctttatagggtctttctatatctggaggtaatgctgtcattccttgaatcgaccactcagcattgtctgtcttggaacatctcacattcactggcaggctgaggaccagcttgttgaaggagagaccttcctttttagtccatttaaacttattcatagcatccatgaaagaaaggtttttatattgcttgggacttttgataatgaaaggccaggtcgtgactggtctgtagatctccttaaccccaatgaactgaagttgttccataatgtctggaatacttgcacatcgagtaagattaattcttgggtaataaagaaggtatgagagacacatttcactcctggtgcttagtcctccccaagtcatctcagctctatctttcgtgttgtagcgacactcagtaattaggttatctcctggtaagattgtttgttcttcctttagatactgaaactcctggaaattgaagtcaaaatcatcatcataggcaagtaatttcatttccttcccttttcgaaaatgacgcagcctgatgcctctgccagccaggtgagcatggagaagaacagcaaacacatgaattccacttggcttttcggcttccagagcctcttccaggcactccaaagtgcagtgaccctcagactggaactcaggcatccctggagggatggtatggaagaggctcacccagaggccagcctcaatcaccccagcatcatatttccttatatccattgtgtaaaataacctcagtccagaattatctattaagccttcctcataagtgggattatcataatggacttctaggagcacataatgcggatctaatggagtgccaagggataatccaacatgaggtggataagaaaagccctctccccc

SEQ ID NO: 64094 - DNA, 1137 bp, Homo sapiens
gtggtggaattcccgccttgaaaaaaggaaagctctgcttttgttgccgaaccaggaggttttccttcttcacttggtcttatacctgtcagttctgtaagaggccggtgtgctcacagtgttgcaaaaagatgcggctgccctccaaaccatactccactcttcctatcttttcattgggaccttctgctctgcaaagaggggaaagtagtatgaggtcagaaaaaccctccactgcccatcatcggccacttcggagcattgccaggttctcctcaaaatctaagtctatggacaaatcagatgaagaactccagtttcccaaagagttgatggaggactggagcaccatggaggtgtgtgtggactgcaagaagttcatttcggaaatcatcagttcaagccggcgcagtctggtgttggccaacaaaagggcccgattgaaaaggaaaacgcagtctttctacatgtcctcgccaggcccctcggagtactgcccttcagagaggacgatcagtgagatctgagcctcgtgcctttcagctgcttttgtgctacgagtcagcgtccgtgcgcgaggacactgagccgggctggctctcctttctgtggttttatttaatgggcttgaatttgcattagatcagatttttgccgcatcacattgttccacagactgaatgctgtgttcgtatcgattgatgaaacgtgacaggtccgccaattgctcgtttgcactgagagaggacaacagtttgaaacttacttttgtgtgtgtgtggctttggaagccagtagctacttccttagttcagttctttactgttcctcgaataatctcctgactaaggcaaaaaaaaaaagcttctcctacgagaatcagtctaacagagatgccgatgtcagcacagccctaagcagtaagtcatattggcatttccacgtgactgtgtttctatcccgtgtacagagagatccagagccctacactccacgacctgggggctcacagcacagaacctagaagcacctgctgacactcttcaactgatttttaaatgttgttgcttggagataaaaattacataagggactttttgcctgcattctagtgcaaaacatctgaagagctgtaca

SEQ ID NO: 64095 - DNA, 3434 bp, Homo sapiens
caaaaaggctattacctgtggggaaaaggaaaagcaagatctcattaagagtcttgccatgttgaaggacggcttccgcactgacagggggtctcactcagacctgtggtccagcagcagctctctggagagttcgagtttcccgctaccgaaacagtacctggatgtgagctcccagacagacatctcgggaagcttcggcatcaacagcaacaatcagttggcagagaaggtcagattgcgccttcgatatgaagaggctaagagaaggatcgccaacctgaagatccagctggccaagcttgacagtgaggcctggcctggggtgctggactcagagagggaccggctgatccttatcaacgagaaggaggagctgctgaaggagatgcgcttcatcagcccccgcaagtggacccagggggaggtggagcagctggagatggcccggaagcggctggaaaaggacctgcaggcagcccgggacacccagagcaaggcgctgacggagaggttaaagttaaacagtaagaggaaccagcttgtgagggaactggaagaagccacccggcaggtggcaactctgcactcccagctgaaaagtctctcaagcagcatgcagtccctgtcctcaggcagcagccccggatccctcacgtccagccggggctccctggttgcatccagcctggactcctccacttcagccagcttcactgacctctactatgacccctttgagcagctggactcagagctgcagagcaaggtggagttcctgctcctggagggggccaccggcttccggccctcgggctgcatcaccaccatccacgaggatgaggtggccaagacccagaaggcagagggaggtggccgcctgcaggctctgcgttccctgtctggcaccccaaagtccatgacctccctatccccacgttcctctctctcctccccctccccaccctgttcccctctcatggctgaccccctcctggctggtgatgccttcctcaactccttggagtttgaagacccggagctgagtgccactctttgtgaactgagccttggtaacagcgcccaggaaagataccggctggaggaaccaggaacggagggcaagcagctgggccaagctgtgaatacggcccaggggtgtggcctgaaagtggcctgtgtctcagccgccgtatcggacgagtcagtggctggagacagtggtgtgtacgaggcttccgtgcagagactgggtgcttcagaagctgctgcatttgacagtgacgaatcggaagcagtgggtgcgacccgaattcagattgccctgaagtatgatgagaagaataagcaatttgcaatattaatcatccagctgagtaacctttctgctctgttgcagcaacaagaccagaaagtgaatatccgcgtggctgtccttccttgctctgaaagcacaacctgcctgttccggacccggcctctggacgcctcagacactctagtgttcaatgaggtgttctgggtatccatgtcctatccagcccttcaccagaagaccttaagagtcgatgtctgtaccaccgacaggagccatctggaagagtgcctgggaggcgcccagatcagcctggcggaggtctgccggtctggggagaggtcgactcgctggtacaaccttctcagctacaaatacttgaagaaacagagcagggagctcaagccagtgggagtcatggcccctgcctcagggcctgccagcacggacgctgtgtctgctctgttggaacagacagcagtggagctggagaagaggcaggagggcaggagcagcacacagacactggaagacagctggaggtatgaggagaccagtgagaatgaggcagtagccgaggaagaggaggaggaggtggaggaggagggagaagaggatgttttcaccgagaaagcctcacctgatatggatgggtacccagcattaaaggtggacaaagagaccaacacggagaccccggccccatcccccacagtggtgcgacctaaggaccggagagtgggcaccccgtcccaggggccatttcttcgagggagcaccatcatccgctctaagaccttctccccaggaccccagagccagtacgtgtgccggctgaatcggagtgatagtgacagctccactctgtccaaaaagccaccttttgttcgaaactccctggagcgacgcagcgtccggatgaagcggccgtccccacccccacagccttcctcggtcaagtcgctgcgctccgagcgtctgatccgtacctcgctggacctggagttagacctgcaggcgacaagaacctggcacagccaattgacccaggagatctcggtgctgaaggagctcaaggagcagctggaacaagccaagagccacggggagaaggagctgccacagtggttgcgtgaggacgagcgtttccgcctgctgctgaggatgctggagaagcggatggaccgagcggagcacatgggtgagcttcagacagacaagatgatgagggcagctgccaaggatgtgcacaggctccgaggccagagctgtaaggaacccccagaagttcagtctttcagggagaagatggcatttttcacccggcctcggatgaatatcccagctctctctgcagatgacgtctaatcgccagaaaagtatttcctttgttccactgaccaggctgtgaacattgactgtggctaaagttatttatgtggtgttatatgaaggtactgagtcacaagtcctctagtgctcttgttggtttgaagatgaaccgactttttagtttgggtcctactgttgttattaaaaacagaacaaaaacaaaacacacacacacacaaaaacagaaacaaaaaaaaccagcattaaaataataagattgtatagtttgtatatttaggagtgtatttttgggaaagaaaatttaaatgaactaaagcagtattgagttgctgctcttcttaaaatcgtttagattttttttggtttgtacagctccaccttttagaggtcttactgcaataagaagtaatgcctgggggacggtaatcctaataggacgtcccgcacttgtcacagtacagctaatttttcctagttaacatattttgtacaatattaaaaaaatgcacagaaaccattgggggggattcagaggtgcatccacggatcttcttgagctgtgacgtgtttttatgtggctgcccaacgtggagcgggcagtgtgataggctgggtgggctaagcagcctagtctatgtgggtgacaggccacgctggtctcagatgcccagtgaagccactaacatgagtgaggggagggctgtggggaactccattcagttttatctccatcaataaagtggcctttcaaaaagaaaaaaaaaaa

SEQ ID NO: 64096 - DNA, 1373 bp, Homo sapiens
accacattcgaggactcgtccgcgcggtgcaattcctgctcacagctgcccagctgaaagccaagggggagctgagctttgaacaggaccagctggtggctgggggccagctgggcgagctgcacaacgggacacagtatcgtgaggtccgccagttctgctcgggctctggccaccaccttgtgcgcttctacttcctcactcgtgtttactccgagtaccttgaggatgttctggaagagctgacatatggacctgccccggacctggtgatcatcaactcctgcctctgggatctctccagatatggtcgctgctcaatggagagctaccgggagaacctggagcgggtgtttgtgcgcatggaccaagtattgccagactcctgcctgctggtgtggaacatggcgatgcccctcggggaacgtatcactgggggtttcctcctgccagagctccagcccctggcaggctccctgcggcgggatgtggttgaagggaacttctacagtgctacgctggccggggaccactgctttgatgtcctagacctccactttcacttccggcatgcagtacagcaccgtcatcgggatggtgtccactgggaccagcatgcacaccgccacctctcacacctgcttctgacccatgtggctgacgcctggggcgtggagctgcccaagcgtggctatccccctgacccgtggattgaggactgggcagagatgaatcatccattccagggaagccataggcagaccccagacttcggggagcacctggccttgctcccacccccaccttcttctttgcctcctcccatgccttttccctacccacttcctcagccctcgccacctcccctcttcccacccctgccccaggataccccttttttcccaggccagcccttcccaccccatgaattcttcaactataatccagtggaggacttctcgatgccaccccacttaggatgtggccctggagtgaactttgtgcctggccctctgccacctccaatccctggccctaatccccatggtcagcactggggcccagtggtccaccgggggatgccacgctatgttcctaacagcccctaccatgtgcggagaatgggggggccctgcaggcagcggctcagacactcagagagactgatccacacatacaaactggacagacggcctcctgcccattcggggacatggcctgggtagactggatcttgggctgggactggatgtgccaatggcccttcagggcctgcctggcacctcaggtactgggctagggtgtctgctatgcctggtattgttcttgtccattgctgtcaccaataaaggcatggaagaacaaaaaaaaaa

SEQ ID NO: 64097 - DNA, 1088 bp, Homo sapiens
aaagtcctttgataaaaccacgagaggagatactgtatggagacatgaggagatactgtgtggagacgaggagatactgtatggagacataccatgggcccttcaaggagcacctctgtatgggctggcaaatccctttcactcatctagaaagaagcagacacttgtcatcatgggaatattttattgggtataagtgttttaggtaattgataactgatttttctactgtttttaagtgattacttcaaatgtgatttgaagcattgtttggcctgaagctttaagaccagtttcttaagcttttccctgagtttcagcagcttacggtttcagtgaataagcagagcgcctggttttgaattgtctgttgtttgtttgaaaatctgaatgtgtctttcaaaggctgctgtgatttctttggataaaatcagatttcgtatcccttagagagcttccactcctgcttcacctttccaaaaactagacctaaggtagaagccacctcgacagctcaaagccagagttagaacaatcatactgaatagatacaatagtttatctggtgcgtatttggagaaaggcatgacaatcaatacgaggcagcgcagctcggagtcacaggcccgactcggtttgaggctccgcggaccataattagctatcacatcaaacaggttctgtagcctctctcggcttttttcataaaacaggaacaataacagcccctccctctgaggaggtgcgtggaaagcagggtgacgtaggcaagtgtgaaatgccgtgcggggttatcttttagtagaagagtatcctttttgtaaaatgtcttccttctcccttccaccttcttaacttcacttttggtctattaagctcatgaaccatagaggtatctcggtggcccctcattaccatctgctgttctttcagctgtttagctacatctttggctgaggaaccagacacttcaatccatgtcttagagaagaatgcacatgaccccaacatgaagatgatataaacaacgacatggacaggatcctcaaagatggcgcccatggactcaggaggagaaagatagtaac

SEQ ID NO: 64098 - DNA, 386 bp, Homo sapiens
cataaaggatctataagagaagcaagaaaaacgcactcccactaattctcatatggaaaaatcagggttttgaagacttcaggagctacagagatgctagcaccccagctctgcttgaattttaaattacattaatatgtattccctttttatatagctactcccgagcccggagaggacccacgcgtgacccgggccaagtacttcattcgagatgagtttctggtgagtcgagcctgtctttagtttcctctcttgttcctcctctttttctcatggatgtaaatttacttaattccaaattcaggggttcagctacccagttccatggttttagttcacgcacatccagtgtgggatttgagctctttgcgcccctctttttg

SEQ ID NO: 64099 - DNA, 744 bp, Homo sapiens
  misc_feature (1)...(744): n = a,t,c or g
aattgcctccagctcattagccactgaatgggtgaaaggaaagacggtggaggaagccttgactatcaaaaacacagatatcgccaaggagctctgccttcctcccgtgaaactgcactgctccatgctggctgaagatgcaatcaaggccgccctggctgattacaaattgaaacaagaacccaaaaaaggagaggcagagaagaaatgagccctccctcggcgaagcctccagcaggccacaccagctgtttcccacctgctgtgcagtcaccttagatgttcagaagccgcttcctctccactgaagagctatgagatacgcacaatacttgctgttcacgttatgactctcatgcaagcaaaatacacagtttcattgttctgaatcctgtggtttctttcagcccacttttatcgccttaacctagttaatgtatattttgaattgtgtgtatgacctcagaactgaaattgataatgaagttgcaagttttgatagcccgtgaagtgcataagtatctaattttacctgaattgatttggggggaaattaccagtagaatgccttggtctgaatatttgatagaaccaattgttgtacataaaacagatctgcgcatatatatatatgtatnnnnnnnnnnnnnngggggggccgttttaaaggatccttgggggggcccaagtttacgcgggcttgcaaggtaatagttttttccttatagggggtcgttttataac

SEQ ID NO: 64100 - DNA, 1005 bp, Homo sapiens
  misc_feature (1)...(1005): n = a,t,c or g
ttttttttagcctttgtctcttctttatttgcggatataattatgtaccgcactctaaattagagatagatttttttctgatatacatttcatcttattcaccacgagcacaccacacgcacagtagaacagttccacacctgataaattgcacaagatgagagtttagattcctgaaaaccggcaggcaagctggccccgccgcggcttctcgccttccggcttcgttgaaggaaattgcccacccaaaatggatttcccagtcagcctttcccgctgcagggttgaaacgtctccggaatgggaagcgctcttgctggaaatggctggacgctgtagattccgagctctggatggatgtgaaatattcccccaaggtcaagttgccacgcctgcgagctgcgccccctctccctcccttcccaaccccctcgatgactggaaccaaagtgtcggggccccacttggaaggacagagaaccctgcccgcaaatgcaccccgcctccccccaaaaccagggtgttgtggaaaagaaaggacaacagaaacgcagacgcgatggatcgtgaatccctgtcccctcccatcccccccatccccgaataatcagaaactaggaaccagagatgtttaaagcttggcctcccaagcgcggcggcagggcgcactgggctggtgggggcggggtgaggggagaagggagagagcgcagaagcgcggcgggggctcgcccttgcgccctagtcctccgcgttggttcggtaggcttcgatgaggccctcgagggagtgcacgaagccggacacgctgcagatgccgccgatgacgaagatggcgacgtcgaagaagacttggtgccacagcagcaagcgccagagcaggcgcaggtgaaagaggctgggcagcaagaaacagaggccgggtgaattccgccgcnctgtctaaacgtgtctagncganggcttcagggnctggctnnncnggcctctccttnnnnangaaac

SEQ ID NO: 64101 - DNA, 1729 bp, Homo sapiens
cccacgcgtccgggaagtgaagacaataacatgtgccttgaaacagtatttgaggagtcttccagagcctcttatgacctatgagttacatggagatttcattgttccagccaaaagcggcagcccagaatctcgtgttaatgcgatccatttcttggtacacaaactgccagagaagaataaagagatgttggatattttggtgaaacacttaacaaatgtttcaaatcactccaagcagaacctgatgactgtggcaaacttaggagtggtgtttggaccaactctgatgaggccacaggaagaaactgtcgctgccctcatggacttgaagtttcagaatattgttgtggaaatcttaattgaaaaccatgaaaagatttttcggacgccgcccgatactacattccctgagcccacctgcctgtcagcatcacccccaaatgcgccaccaaggcagtcgaagagacaaggccagagaaccaagaggcccgtggccgtctacaatctttgtctggagctggaagatggtgacaatccttacccttccaaggaggacacccctaccagcagtctggactcactttcctccccgtctcccgtgactacagctgtccctgggcctcctggaccagacaaaaaccaccttctggcagatggagggagctttggagactgggcatccactatcccaggccagacccgatcgtctatggtccagtggcttaacccacagtctccaaccacaacaagctccaactcagctgtgacacctctttcacccgggtcgtcccctttccccttttctcctcctgctactgtagcggacaagccacctgaaagcatccgcagtcggaaggctcgagccgtgtatccgtgtgaagcagaacacagctcggaattatcttttgaaataggagcaatttttgaggatgtacaaacctccagggaacctggctggctagaagggactctgaacggcaagagggggctgattccacagaactacgtcaagctgctgtagctcctggcctcagagcccctgctgaccctggcacccagggacctgcctgggggcagagagctgtcttcctcctccgaggctctgggctgcacccacaggtacctccacacttgggagttaccatcatcacagtcagccctgggggtggggggtggtgggcagggatgggacgcaccacacagaactgtgattgtggatcaggaggggaatgtcaggattcgcaaaatggacttttcatttgtcaagtattgggacttgtgatttttaattatccagcatatagaatgagagggagggcagccttctgccacctgtgtcgcctccactggcagtcacgccaccagagccaccctggctccctctcctccctgagcacctgctgctgcgattttaaagggaactgtactactcgcagtgataggtttgcagagtgtgtgcttggctgtggcagcctagcttggagaagctgctgttggtgcaagggagatggtctcaagtcagagggaagcagagacgcgcgtctcaagcctgcccttcctagacggccacctgcaggaccccacactcactgcactggcagcgtgcactggcgtatttgtaacaggcttctcggtgctcctcacccgtgtgctgttttccaaacaccacctttttgcctcaaggtctctgtaaatgaaataaactgtaatttactaaaagtcgacg

SEQ ID NO: 64102 - DNA, 1242 bp, Homo sapiens
cgtccacgcgtccgaggcgagggaggaagaatggccctggcctttgcatgaggctctccgcatggaccctctggaggccatccagctggaactggacactgtgaatgctcaggccgacagggccttccaacagctggagcacaagtttgggcggatgcgtcgacactacctggagcggaggaactacatcattcagaatatcccgggcttctggatgactgcttttcgaaaccacccccagttgtccgccatgattaggggccaagatgcagagatgttaaggtacataaccaatttagaggtgaaggaactcagacaccctagaaccggttgcaagttcaagttcttctttagaagaaacccctacttcagaaacaagctgattgtcaaggaatatgaggtaagatcctccggccgagtggtgtctctttctactccaattatatggcgcagggggcatgaaccccagtccttcattcgcagaaaccaagacctcatctgcagcttcttcacttggttttcagaccacagccttccagagtccgacaaaattgctgagattattaaagaggatctgtggccaaatccactgcaatactacctgttgcgtgaaggagtccgtagagcccgacgtcgcccgctaagggagcctgtagagatccccaggccctttgggttccagtctggttaacatttgcccttgggaatactcctgcacaaggtctcctaccaccttctgctggacctgtgcttgggcatcagcaatgagtatgccttctattgtgctttgtttttgctgacttttctgcaccctgtttcctttggatattcagttctctcaacctcaagattgagacggtggtgggtatgcttctccacttccatatgaccttcatgctgttctggaatatcacatgctacgaggtcatccttcacactacttgtaagccaagcaaatgatactgtagattgtactgcctttatctgcactgcttggaccctgtttattcccagggcctctgaactggttgctgtcacttggatttctagctttgggagcctgttccacctactcagctctgcattgagcagtatgggcacatgccctgtggacagttactggacgttaatgaactcagaggagaaaagcagtgagccacttgttctgtgtgatttatggtacttcattgctcttccttcacctctagtcactttctattgctacctgccctacattggctc

SEQ ID NO: 64103 - DNA, 902 bp, Homo sapiens
tttttcaaagggtctttttttttaataaggtttttcaagaagacattagtgaaaatttaaacatctatatggccaagaaaagttaatttcttctacagcatccataagaaacactcagtaaatggcccattatacagctttaatttcaatatattttcttcaagttcagtttacatacagacactatgaacacgattctttgaaataccattatacaggaatgttgtattatttaggtttcttctctgttacagctcacctcacactggggtgaaagagatttgaactgagatttgcagccatcaaattactgttagttagattgatgggtggcattgtcacagaacctccgcaatgtggattttctttcaagccattacagttagtgctgggattgatagggtttggtggttcaatggttacaagttttgtatctggagacataggatgaacattttcatttgcatcctgttgaccaagtccaccttcatactctttcttttttggttctgagatatctcctcttcctcctttgactttaataactctgactttgatctccttgggctttttctctttttctatttcctttcccaaaactgaactacttagcagtgtattggtataaactgtttttctttcatctttcctgagttcattttctttagaactctcttttggctttattaatgaattgacttttgcttcctgcagtaatttagctttcagttctggcatgaatccactttcaaaacaattttatggagtaaatccaaatcagaactactaggaagatagggatttccagtggccatctcaatgatcatacagcccaaagcccagatatccacaggtctggctgaaactcacatccaggcgaggcgctcacgcctcgtgccacc

SEQ ID NO: 64104 - DNA, 1100 bp, Homo sapiens
ttttttttttttaagagatttacttcatctttattaacagtaccatagtattccactgtctagtatactataagtgatctatataccaataatgaatacttaagggtgtttcaaatcttttattattagaaaagtgctgccagaaacatccttgccatgcttctgtatgtactggtgctagtgtttctatcagataaatttttagacatgaagtgaattactaggcataggaaatataatttacacttttgatagatactgagtttttgctcatttgctacatgaagcagaggcagagtattctgtgtggggtttgggacaggaacactgacccctgaagtcgagcctgggggtctaacatagtggtcatttgtccagcctgttttatggaaggaactggactctgagctttggggaatttcctgcaagataaatgtatatcccacctatactggtaacaggtaagttatgcgcaaagatgaaaagacaaagccctagctagatcagctcttgctctcagcactacaatggccagcggtaattctttcagttaaaatgacaattaatacagtttcattgaagcttcaaacagagcagccagatcctcttctgactggggacagggtgcaagcttggtgaccctttcctggggcagcgttcctttcactagtgcggggatatcagctttggagtaaccaacagctgctaggccatcatcaacatccagatcgaataagaatttccggagcgtgtctgccaacaccagccctgcatcttggatcctggcagtgcgggtgtcggctcctagaagacataaagtgctgactgtagggagagaggaagaaacgggctctgggtggagttcagtcacaagatcagtgaatacaccatgcacacccacggggtctccctaacgcccagcacggggccatcgtgtgcctccccaggagggcccaagttggctgggggagctcacttagctctgacatttcggaggggctgccaagtcctacatacttgccccttgtgtggtaggaagaagaggaacaaagacaagaagagaggtgcagaacaaggcaagaaagtcggctggtgctggg

SEQ ID NO: 64105 - DNA, 1536 bp, Homo sapiens
  misc_feature (1)...(1536): n = a,t,c or g
tttttgccattggtttaatctttgtattgtggaacaaaggaaaaaaggactgacaccagtttagcctttgagtgtgcagagctttggccttccttccaacccatcagccccaaatccaagatttcatagcccctaacacccacccaagcagcttccctcacacatgccctttggttttcttcctctcttctatggttccttagggaaaggagccttctttaaggaatgaaaagctaactacagcccagtctggcctccagcatgcccagggtcagcttcaaccctccacttggagggcgagggaggagggcaaagggcatgggagaggtagggctgccctccaggagccttccccttccctaggagccagtcaggattggggaggaaggcagaggggtcctagccagctgtcacatagaggaataggggctgggagtggggatgacaagaagtacaaagaaagagaaagtttggggagatggataacaagctcagctgtgtcagtgatgtggaggggaggtatggtgggggaccagccatggccctatccaaccccaggctccacaggccccaaattggctttgcaaatccaaacattttaaggaagtggtttagggatggaagagaaacacggtagaggtctgtgctgtggattttcatctagggtggtgggaacaccagagatgtctcctctgccattgttttagttggctcctggacctcatcccagcagagggagggtgactgtcagcaggtcagtcccaccgccactgtccccctcgcagtgggcctctgtgtctcaggcctggccaggctccctgcccctcagagctcctcgtggacccgctcctcgtcctcatctgacttcagcttgagctcgtcgactgtgatcttgccgtcctggttgcggtcctggttctggaacatgtctcctatggttttctcagggtcctgcccaggcatgaggcgtcctttgccctcactcacttgagccttgatgaaggtggagaactcctccggagggacctcgccatccttgttgaggtccatgtcttcaaacaggttggcaggagggtccttgtgccacacaaacaggtagcctgtgggcagcccatcctcccgggacaccagctccacctcaaacagcagcacagcactgcctgggactccccgggctccactctccccgtgggccaggtgcgggggcacgatgagctgccgcctctctcccacacacatgccctgcaggcccgtgtccaggccttcgatcaccttgttggccccgagagtcgcctcctggggggccccgtagtcatgcctgggggagagcagatgcccaggtcagcagccaccctgtcccctgccagcgcacacccctctccctntgaggtgggcccagaacaagccctcagttccgcagttactcccactgctgactcgggnnnngcagcagagtgcaggggcacagctgaacagacgtggggttcccttctcatcttgccggacgcgtggctcggcccggatattcgaggcggt

SEQ ID NO: 64106 - DNA, 1323 bp, Homo sapiens
ttttttttgaaatgaaatgaatcatttaatgagaatcttcaaactgtggcactggctgagtactaagcaaatccaggggaagacgtgaagcccaccaaggcgcacagcctcaactccggtgcctgcccctgatctgaaatacaacatccaagagctcgaggcctttttaccacccgtttgtggagcacctgcacctttctgacaacaactctcaagccaactttcagagagaaaacatgaagggaaaaaatagatttcctttggccagacagctctttcttcctcaataaataggaaccacacttggaacaaagagacagcgtgagctcggtgggggaagcacaagctttattggctgaaagttcttctcaggagcctggtctgctgggactgcatgttcctggatgggctcccccaggcctaagctccaggtttcctctggccttccgaaggattttgtgggttacgaccaattgatcaaagatgactttttcctggcgcttgctcagctgcaaaagcttcatggtgttttgcaacttcttttcttgttcaaacaattttttatgtagtttggtgacctctgccttcatttctccaatctgctcacagtgaagggggcactggccatcctcggggagtgagactctccagagaagcttcagccgcctgtaggcctcttccagggtcagcttggccgtgctcacactgctcacaaacttgctcagtggtgctgggtgtggaccctttgttcccagctcttgacttgtggagctgggagcctcttgggtttgaatgtccatttcagcaaggagcctctgtccctggctgatctgtttgagcagggcctcatagtcctcaatcaggcccaggacatggcggccattcttgctggcccacaggtggtggccagtgaccaggcgggacacacacggagtgctagttgccgaactgccactgtcgcaggagagggagtccgtgtcattcccagagagtggaggagtctctgaaactgattttggtgtcactgcctgggaggaatcaaacagatcaaatgaattatcactttccatgggatatttgtcaccatcgtgtttgtcaggctgaaggggcacctcagggatggacacggcttggacagccagagtgagggctccttcctgtgccttctctgccccccttgccagctgttccttgagcctgctctgcagagtgctgctggtttcgatgctcctttctagttgcaagcgcagagcctggatctccatcaggaggctgtgcaggtccctgaaaggatcctgccccttccaacgaattcgagcctct

SEQ ID NO: 64107 - DNA, 2255 bp, Homo sapiens
cagggactgatcagctgggtatttttctgcaggatatgcactgataagcaacatagcttgggcatgtggaatttgtgccagttccactctcccgtcaccatcaccccctggaaggaggtaaggaaagtcctcccagagtaaatgacattgaatctgagacaccaagaacatgtaggctgtagctcagcaagatgagaggaggtgtccagatgaaaggagtagtatacacaaatgcccagattcaggggaaacacaggcccacagatcccacacagcctcatttctaagaaaaatattttgttctgaaggacgaaaatgaccttcaaagaccttgggatggatgacttgggtatttactcttgcgatgtaacagacactgatggaatagcatcaagctacttaatagatgaggaagaattgaaacgtttacttgctctcagccatgaacacaagttcccaactgtcccagttaaatcagagttggcagttgaaattttggagaaaggccaggtccggttttggatgcaggctgagaaactgtctggcaatgccaaagtcaactacatatttaacgagaaggaaatttttgaaggcccgaaatataaaatgcatattgaccgaaacactggcatcatcgaaatgttcatggaaaagctacaggatgaggatgagggaacgtacactttccagcttcaagatggaaaagcaactaaccattctactgttgttctcgttggagatgttttcaaaaagctccagaaagaagctgaattccagcggcaagaatggatcaggaaacaaggtcctcactttgttgagtatttgagctgggaagtgactggtgaatgtaatgtactattgaaatgcaaggtggcaaatattaagaaggagactcatattgtgtggtacaaagatgagagggagatatcagtggatgaaaagcatgactttaaggatggtatatgtaccctgcttataacagagttttccaagaaagatgctgggatttatgaagttatcctgaaagatgaccgaggaaaagataagagcagactgaagcttgtggatgaagcctttaaggaactgatgatggaagtatgcaaaaaaatagctttgtctgctacagacctgaaaatccagagcacagccgagggcatccaactgtactcttttgtaacttactatgtggaggatttgaaagttaactggtcccacaatgggtccgccattaggtactcagacagagttaagaccggggtcactggagagcagatctggctacaaatcaacgagcccaccccgaatgacaaagggaagtatgtcatggagctctttgatggcaaaactggacatcagaagacagtggatctctctggacaagcatacgatgaggcttatgctgaattccagaggttgaaacaagctgccattgccgagaaaaatcgtgcccgggtgttgggaggtctcccagacgtggtcaccatccaggaggggaaggcccttaatctcacttgcaacgtgtggggagacccgcctccggaggtgtcgtggttgaagaacgagaaggccctggcctcagacgaccactgcaacctcaagttcgaggctgggaggaccgcgtacttcaccatcaacggcgtgagcaccgctgactcgggcaaatacgggctggttgtgaagaacaagtatggctcggagaccagcgacttcaccgtcagcgtgttcatcccagaggaggaggcgaggatggccgccttggagtccctgaaaggcggcaagaaggccaagtgaccggaggtgcgaggagagccagccggcctgtgtgacttgggtgtgaatggtttgggttaaggatgagacgtcttcatgctttctcctccctattattttctggcttgaggggaaaataatgtcaggtctttcactcatataaaaaagcaccaactaatgacactttaattgtttttctttatctacaaaattatgtgttaagaaaataccattcatagcatgaagattaggaaacagttttaaggagaagacttgaatgaagttggagggacattgaatgatggtcagagggcagacgaatgtgtcgtggggcgaattgggatttgctgcagctgtgaagccatggccgtgtctcgtgtgttgttacagaggtgatgtgcttttcgacgggcgcctcgtggcttggaacctcctctgtatgaataaacagttttcacgtctgtcctcttccccgaaaaaaaaaa

SEQ ID NO: 64108 - DNA, 3114 bp, Homo sapiens
aatgaatgccaccagatctgaagagcagttccatgttataaaccacgcagagcaaactcttcgtaaaatggagaactacttgaaagagaaacaactatgtgatgtgctactgattgcaggacacctccgcatcccagcccataggttggttctcagcgcagtgtctgattattttgctgcaatgtttactaatgatgtgcttgaagccaaacaagaagaggtcaggatggaaggagtagatccaaatgcactaaattccttggtgcagtatgcttacacaggagtcctgcaattgaaagaagataccattgaaagtttgctggctgcagcttgtcttctgcagctgactcaggtcattgatgtttgctccaattttctcataaagcagctccatccttcaaactgcttagggattcgatcatttggagatgcccaaggctgtacagaacttctgaacgtggcacacaaatacactatggaacacttcattgaggtaataaaaaaccaagaattcctcctgcttccagctaatgaaatttcaaaacttctgtgcagtgatgacattaatgtgcctgatgaagagaccatttttcatgctctaatgcagtgggtggggcatgatgtgcagaataggcaaggagaactggggatgctgctttcttacatcagactgccattactcccaccacagttactggcagatcttgaaaccagttccatgtttactggtgatcttgagtgtcagaagctcctgatggaagctatgaagtatcatcttttgcctgagagaagatccatgatgcaaagccctcggacaaagcctagaaaatcaactgtgggggcactttatgctgtaggaggcatggatgctatgaaaggtactactactattgaaaaatatgacctcaggaccaacagttggctacatattggcaccatgaatggccgtaggcttcaatttggagtcgcagttattgataataagctctatgtcgtgggaggaagagacggtttaaaaactttgaatacagtggaatgttttaatccagttggcaaaatctggactgtgatgcctcccatgtcaacacatcggcacggcttaggtgtagccactcttgaaggaccaatgtatgctgtaggtggtcatgatggatggagctatctaaatactgtagaaagatgggaccctgagggacgacagtggaattacgtagccagtatgtcaactcctagaagcacagttggtgttgttgcattaaacaacaaattatatgctattggtggacgtgatggaagttcctgcctcaaatcaatggaatactttgacccacacactaacaagtggagtttgtgtgctccaatgtccaaaagacgtggaggtgtgggagttgccacatacaatggattcttatatgttgtaggggggcatgatgcccctgcttccaaccattgctccaggctttctgactgtgtggaacggtatgatccaaaaggtgattcatggtcaactgtggcacctctgagtgttcctcgagatgctgttgctgtgtgccctcttggagacaaactctacgtggttggaggatatgacggacatacttatttgaacacagttgagtcatatgatgcacagagaaatgaatggaaagaggaagttcctgttaacattggaagagctggtgcatgtgttgtagtggtgaagctaccctaaagctatctatctttatcaaatggaatgaaactagataatttcaagaaactgagtaggacaaagggagaaagaaatacatgttctttttcctgcaattaataatcagactggaaaattgttgtatcattttaatttgtagttacaattgctttcattcgtgaagccgaaacgtttttaaacatgaattacatatgaattattaagcatatgtgctttcgcagctgataatataaaaggaaatcccacagtctagatatagccccattactacaaaatgctaaaatatttaatgaaaattgatggtggccacagtgtgcaggttataaaagcattaatacatttcaaggtaagagccttaaaagttaaaaacattttcagtttttttttaaaaaacgtactcttattatctggaacatagaaatataaaaggtaacatctaaagcttagaatagtgtgatttttagtaagccattattctcctattcaaataatatcccaaagagctaaacaattccttacatttaccaagaggaaagcttttactgtgttgaggctaaaaaaaataatggctctttgacaaaacttgttatgttgatcgcggtatgtcaaaatttttacaggtttgctcatctgccagagcacacatataaatttggtatttcttaacatattatcttgttagatttgttaccagtaaaatattactgtaatttcatatacacagtctatacaatgaaataatgaatatttatcatattgatacaaactgtgacctcagcttcagagtgtcagggcctcacttgtatagaatgtaatgttctcctcaaacatttatgttaactctataaacaaatatcgttaagttaaacaagttttcaaaaacaaaacaatttttaaagtaccttaaaattgaggatgttactcagtgttaacacatgggaacaccaaaatattcaataagcctggtcaattctatagttatcttttttgtaccaacacatgcttttctgttactgttatattatccagtagaaaatgttaggatatgtgtgctatataaaaaaaaaaaaagacttgttaagttttaaaataacaaaaatggctagttgaatagtattttatgtgtaattcttccatttattctggtttaattatacaactaagatgaaatattgaaaaaccctttgtgaaagtaacttttcaagtaaatgcacaactttagaatttctacaaataagttcttttaaacagtctttttattgtggattgtgaaatcaaaatctggagaaatgcttataaaatatactactagcttttaagttttaagaaagaagaacgtaagttgtacaaagatatttgtactttgacaaactgaatttaaataaactttatttcctctcaaa

SEQ ID NO: 64109 - DNA, 1732 bp, Homo sapiens
ttttttttttttccagtagtaaacgtctttattcttccgtgacgtcgcacacccaagccacctcccgcggactctccgctggcagtcccacccagtgagggtagaggcggtggagggcccacccaaggccggctcttccaagcaccacaaatcctctcctcgcccaggtccctttccccctttctggccttcgtggggacaccttcagagtccccaaggaaggctgtgctgatagcctcactcaacccagcttttcaaagttctgcaggaggcaaagggcaagcccagagattagggttagagaccaaagacaagcggtcgttacccctaatatccaaggggatggggacgggagggggctttttgtaaaaatgcccctgaggtatagaaccggcaggcaggcaggctcggaacaaaacaccctgaaccagccccgaagactgctgctcccagactcctttctgcttcagtggtagatgaggccagggcagagggttttcatcatgtagctatgaaaggaagcccccaacccggtcagtcaggcaatgaggggctgtttgaagcacaactggaacccctcacaaaggccatgtctgtccgaaacttcatgttggtgggtggctggcggcggagcagtgactccgtctggtcttggggtagaggctcatcatagatggtggagatgagccccaagccatttctacggggcctcttcagttgcccaaatggctgtagcttctctccatggtaccccaatccacgcttgcatctggggtgttggccatcactatccagggcctcaggcacccctgagcacctgcagcccaggccctggccctcagcccagccctgccgctccatcaccttccgcccaatgcccttggtgtggcgctcaaaggtgcccacctggcgttcgatcacagagccatcttcctgtccatctcggagtctctgttccagacgcatttggacagagtctcgggcatccttgtctccaccatctctgtcatagtacacactcatgtccacatcccagtcatcggctgtctgttcatcaaaatctccttcttcctcctgccagaactgggcatcagtataaaacaccaggccagagccacccttctcccacttgagctcaatctcctcctcaaagagctgctcagtggtccgctcctgcccggtcacgtcctcatgcagcgcttcatgccgttcccattcctcaccccggtcatcgtcctcatctgagtgagactcttcttcctcttccttccccacttcttcctcaggctctccacaggggctggctggtatatctgccaggtaggttccttggggtatttcttcaccctctgctgtatacacaagctcttcctgctccacagtctctgagtcctcatactcaaaaggcacattgccgtagcgccgggaggaacctgtcttggggaactggagctgcagctgggtgatgatccgagggggtaggcggcaggcccggatcaactccaaaaagacccgcaggggagtccccacattccctctgggcatcagcactggtgggttcagctccggcagttgcttcaggtcagccagggtgaaggcttcattctctgccttccaactctgcagttccttccgggtcttgaagggaaaggagcccagacctgatgcctccgtaggtagccgaagtctgcggatgagacagcgacccggcctcgtgccaagcttggcgtaa

SEQ ID NO: 64110 - DNA, 864 bp, Homo sapiens
acttgatgccctgttatagccacgaggttccaggacctggctagaagcagagacaccaggacagaaaagacagtgttctgctttcatggagttcacagaagagtcgaggagagcttcacatttttcatccattcttaaaattgagccagtttagccctaggaggtgggcaggctctgaggaatcatcaatcaagagaagagaacatcgccagaaacaccatgctgcagtacaaaaattctataaaaataccttttttgagtcattaacataaaatgaagaaaacagcagcagccaagaagagagatgttgaaatttaagagaggaagacagagaagaaaaatccactggataccttatgtgtaattcaccaatctgttggaacacttctgccacgtgtgaagagttttggcagaccaaatccacatgcctgaagtgatgcccaccaacaaagacataaaaattttcaacatttcaacagccatgttggaatcatctgcagaataccgaaaaagtgcccagttggagatttcataaaaataacaggcaatcacacacgttgcaggaactgtgtacagtactgagaacaccccaatcttgaccatcagtctttctaacttgtctgtctttgtcccatccttttgaagatttgaccgaattttgaacaaggccaccaaacctgcagcaatgaacaaagttccaatgaccaaataagtaaagaggggagccaccacgaacccggtgagggcatcgagattttggtttccaacatagcacaagccagtcagttcatctgcatccaccagtctcataatcaagatgacaatggttttcactggcgggatggcccaggctgcaatgtgaaa

SEQ ID NO: 64111 - DNA, 1097 bp, Homo sapiens
  misc_feature (1)...(1097): n = a,t,c or g
ttttaaaaaaaacaaagcttttgatcattcccttgtcaacataattggcagatctactctcaaacacacttaagagtattccacacaacatgttcggaattcagatttattgatttccatcgtattgactttaaaaatggtatgaagcttgactgcaaggaagggaactggtaattttaagttaaaattaagctaatggtgaaagtacatcacctctggcttcagtcaccacatcacctcagattgaatatagattttttatgaacaaagttccagaactctgaaatccagggatgctgcaggcctctcccggcaatgtccttcactttgggtcagtctcctgggccagaggtgaaagtgctttcaaaaatactgccatttccccagcacagtgtctttgattgcatccacatattgagttggaacccagtacacccagtagtaagaggcttccgtggggcccaactgaaacgccatcatgtggtagtcttcatgtccttcgataggttcactgaccacattttttatggagcccatgggcaatttctcagtccgctctttagtgccaatccacagctggtcttgttctagtttaaaggtgagtctcacttttcctccagatttattgtacatgccggacagcggtaccgttggcaggcgctcttgggcccccttaacagatggcatcacatcttcaggttttcctttatccaacactttcctgtgttgtttctgcctgcagagaggctccttcttgttctcttcggcctttgcatcctgctgcgcagcatctttgggtgtgttgactgctaaaacatcattgatggtggagccaccccccatgatcttggccccgctggtcacttttatttctctcaatgttttatcctcgggggcgagtcccttatacatgactttctgcatggcaggcgggagacctgtaatcgagtgtatattctgtttcagctcggagcctgtgctgtccagggggaacttctctctctctctctctctctctctctctctctctctgtctctcacctcgtgccgaattcctgcaggcggtgtcaaatnncccnngccggcccgtagacatc

SEQ ID NO: 64112 - DNA, 2061 bp, Homo sapiens
ctcggacccacagagccggcccctgctgctgctcgggcagctgcaccacctgcaccgcgtgccctggagccacgtccgcgggaagctgcagccccgggtcaccgaggagctctggcaggctgccctgagcacgctcaaccccaaccccacggacagctgtcccctctacctgaactacgccaccgtggctgccctgccctgcagggtgagccggcacaacagcccctcggccgcccacttcatcacgcggctggtgcggacctgcctgccgcccggagcgcatcgctgcattgtgatggtctgcgagcagccggaggtctttgcttccgcctgtgccctggcccgggccttcccgctgttcacccaccgctcaggtgcctctcggcgcttggagaagaagacggtcaccgtggagtttttcctggtgggacaagacaacgggccggtggaggtgtccacattgcagtgcttagcgaatgccacagacggcgtgcggctagcagcccgcatcgtggacacaccctgcaatgagatgaacaccgacaccttcctcgaggagattaacaaagttggaaaggagctggggatcatcccaaccatcatccgggatgaggaactgaagacgagaggatttggaggaatctatggggttggcaaagccgccctgcatcccccagccctggccgtcctcagccacaccccagatggagccacgcagaccatcgcctgggtgggcaaaggcatcgtctatgacactggaggcctcagcatcaaagggaagactaccatgccggggatgaagcgagactgcgggggtgctgcggccgtcctgggggccttcagagccgcaatcaagcagggtttcaaagacaacctccacgctgtgttctgcttggctgagaactcggtggggcccaatgcgacaaggccagatgacatccacctgctgtactcagggaagacggtggaaatcaacaacacggatgccgagggcaggctggtgctggcagatggcgtgtcctatgcttgcaaggacctgggggccgacatcatcctggacatggccaccctgaccggggctcagggcattgccacagggaagtaccacgccgcggtgctcaccaacagcgctgagtgggaggccgcctgtgtgaaggcgggcaggaagtgtggggacctggtgcacccgctggtctactgccccgagctgcacttcagcgagttcacctcagctgtggcggacatgaagaactcagtggcggaccgagacaacagccccagctcctgtgctggcctcttcatcgcctcacacatcggcttcgactggcccggagtctgggtccacctggacattgctgcaccggtgcatgctggtgagcgagccacaggcttcggtgtggccctcctgctggcgctcttcggccgtgcctctgaggaccctctgctgaacctggtgtccccactgggctgtgaggtggatgtcgaggagggggacgtggggagggactccaagagacgcaggcttgtgtgagcctcctgcctcggccctgacaaacggggatcttttacctcactttgcactgattaattttaagcaattgaaagattgcccttcatatgggttttggtttgtctttctggtcgtcagcgtggtggtggaaacagctgaagttttaggagacagcttagggtttggtgcgggccacggggaggggaccgggaagcgctggggcttgtttctgtttgttacttacaggactgagacatcttctgtaaactgctacccctggggccttctgcaccccggggtgaggcctcctgcctgcctggtgccctgtcccagccccaggtcctgtgcagggcacctgcgtggctgacagccaggctcttactccagccggggctgccagcgcatccagccagcccagccctgtgaaagatggagctgacttgctgcaggggacctgatttatagggcaagagaagtcacactccggcctctcagaattcacttgaggttcaattaaatacagtcacaccgccccctcaaaaaaaaaaaaa

SEQ ID NO: 64113 - DNA, 2247 bp, Homo sapiens
ttggtaaactgcttttagggatactggctgacttcaagtggattaataccttgtatctttatgttgctaccttaatcatcatgggcctagccttgtgtgcaattccatttgccaaaagctatgtcacattggcgttgctttctgggatcctagggtttcttactggtaattggtccatctttccatatgtgaccacgaagactgtgggaattgaaaaattagcccatgcctatgggatattaatgttctttgctggacttggaaatagcctaggaccacccatcgttggttggttttatgactggacccagacctatgatattgcattttattttagtggcttctgcgtcctgctgggaggttttattctgctgctggcagccttgccctcttgggatacatgcaacaagcaactccccaagccagctccaacaactttcttgtacaaagttgcctctaatgtttagaagaatattggaagacactatttttgctattttataccatatagcaacgatattttaacagattctcaagcaaattttctagagtcaagactattttctcatagcaaaatttcacaatgactgactctgaatgaattatttttttttatatatcctattttttatgtagtgtatgcgtagcctctatctcgtatttttttctatttctcctccccacaccatcaatgggactattctgttttgctgttattcactagttcttaacattgtaaaaagtttgaccagcctcagaaggctttctctgtgtaaagaagtataatttctctgccgactccatttaatccactgcaaggcacctagagagactgctcctattttaaaagtgatgcaagcatcatgataagatatgtgtgaagcccactaggaaataaatcattctcttctctatgtttgacttgctagtaaacagaagacttcaagccagccaggaaattaaagtggcgactaaaacagccttaagaattgcagtggagcaaattggtcattttttaaaaaaatatattttaacctacagtcaccagttttcattattctatttacctcactgaagtactcgcatgttgtttggtacccactgagcaactgtttcagttcctaaggtatttgctgagatgtgggtgaactccaaatggagaagtagtcactgtagactttcttcatggttgaccactccaaccttgctcacttttgcttcttggccatccactcagctgatgtttcctgggaagagctaattttacctgtttccaaattggaaacacatttctcaatcattccgttctggcaaatgggaaacatccatttgctttgggcacagtggggatgggctgcaagttcttgcatatcctcccagtgaagcatttatttgctactatcagattttaccactatcaaatataattcaagggcagaattaaacgtgagtgtgtgtgtgtgtgtgtgtgtgtgctatgcatgctctaagtctgcatgggatatgggaatggaaaagggcaataagaaattaatacccttatgcaggtgcatttaaccttaagaaaaatgtccttgggataaactccaatgtttaatacattgattttttttctaaagaaatgggttttaaactttggtatgcatcagaattccctatagatctttttgaaaatataggtacctgggtatcacacatagaacttttaattctgctggtgtaggctgttgcccaaacatctataattttactgagctcttcaagtgattctgataacacagcctggattgagaatttttataagattggcaatggaaaaacatttattcttttaaataataatttttttaaaacccaagaggtcaggggattttataaaccaatagccaagtgttctttaaataggaggcacccttcccattgtgccaaaatcatcttttcatttattttgaaatttgtatgattattttatacttgtatgttgcctttcttcgaaggcgcctgaagcactttataaacacaaatcctcacaatacctctgtgaggtaggtaaatagtacttttctatgtagtaaacctggaatatggagaatttcataacagttcattctacttaataatgcaataatggagctccaagttgtcttggacttctacaccacactcagacttctggaaagttttctgtacctcattctttagtccctgtcaaggttagtaaataaaataagtgacataaaaaaaaaa

SEQ ID NO: 64114 - DNA, 2365 bp, Homo sapiens
gcggggtctgaagcccatttgaaggtcaggaggcccgagttgctggcggtgatcaaactgctgaacgagaaggagcaggagctgcgggagactgagcacttgctgcacgatgagaatgaagatttaaggaaacttgcagagaatgaaatcactttgtgtcaaaaagaaataactcagctgaagcatcagattatcttacttttggttccctcagaagaaacagatgaaaatgatttgatcctggaagtaactgcaggagttggaggtcaggaggcaatgttgtttacatcagagatatttgatatgtatcagcaatatgctgcatttaaaagatggcattttgaaaccctggaatattttccaagtgaactaggtggccttagacatgcatctgccagcattgggggttcagaagcctataggcacatgaaatttgaaggaggtgttcacagagtacaaagagtgccaaagacagaaaagcaaggccgcgtccatactagcaccatgactgtagcaatattaccccagcctactgagattaatctggtgattaatccgaaagatttgagaattgacactaagcgagccagtggagctggggggcagcatgtaaataccacggacagtgctgtccggatagttcatcttccaacaggtgttgtttctgaatgtcaacaagagagatctcagctgaaaaataaagagctggctatgacaaagttacgtgcaaaactgtacagcatgcatctagaagaagaaataaataaaagacagaatgctagaaaaattcagattggaagtaaaggaagatcagagaaaataagaacatataattttccacagaaccgggtcacagatcacagaataaacaagacgctgcatgatcttgaaacttttatgcaaggagattatctactggatgaacttgtacagtcattgaaggaatacgccgattatgaatctttagtagaaattatttcccaaaaagtttaagttgatttgttatttatagactttcgtagcttagaaaaattctacagtacatccacatagggtgaaagtacccttactctcttgaaaaacgttgagttaacacagttggaggtaatatgcatattctgaagtcatagataatttacacagatctctctcaatgcattagcaaaaatcatacaatatacagatggtcctcgatttacattgtggttaattcccaataaacccatcataagttaaaaatgcatataacgttagcaacacagcagtctcctaattaatgacagcttgacttaacaattttccaactttaccatggtgtgaaagaggtatgattcctaagccctaaggagctcctcagcttgaaatggggctgcatccctataaacccatcataaagtcaaaaaatcctaaaacataagttggtgaccatctgtaatcatgatgtggtggtaaatcttggacgctaccttacaataactagacaaaggaaaatcatcctttgtcctgttctgtgtaaatatttaatgaatgatcaaaacttcagtttaaatattatgaaaaactttaaacataaagtagtagaaataagacagtaaatactgtatcctaatatccagtcaggatacagaaaccataccattaacttgaacagggataattttaatataaaaaactgttaactgataatggtattaacttttaagagggatgaaagagagctatgatgtcctaggactgagagtaccccaggaaagaatacccttgaaagggtctccccttccccatggtgaagtcaggcctaatggagagagtggctacagcctactcagtgattgggaaattccctgtcttgccctgggccagagctggtgtaccgctggtggatcaggtcttacaagcaaagaacctcacactcccaactggtaagccagaagcctcttgctagggtgtgagcaaaacttggacaggaactctcagtagatgtttgtgtttgtcaagattctccagacaaacttccttaaaaggattggcttgtgttgttattattaagtctaacaagtccaaaagctggagtgtgaggcaggaggctggaaacccaggaaagctgatggtgcaaggtccagtccaaaggtatctgttggaggattctcttgttctgggaagaggacggtctttttttctcttcagaccttcacctgactggatcaagcccactaacatcgaggaggacagtctgcattactcagagttcactgattgatttaaatgtcaatctcatataaaacaccctcacagaaacacctagaataatgtttgaccttataattggaaaatcagagcaaaagttaaatctctaaaaaaaaaa

SEQ ID NO: 64115 - DNA, 2547 bp, Homo sapiens
ttttttttttttatatatatatatatatttatttatttttaaaaactccaggggatgtcccaaagttagtaaacagttctgtttcttgtcccttttatggctgcatgcagtttcaattgttcagtacaacagatgaggcatttaaaaggtctccaacgtcaagaaacactaactcatctctggcatatcatattttttaaggcagaagtattttctgtaatggttactaccggaggtgtttactgggttaatttttaggttaaccaggaaccacacatcccataggataattccatttaactgaggtttatatccgtaagagcattaccatagaaaaatttccctttagcaatttcaagagacctcagccaccaatatacctaccttctttacaatataaagtgaaatattactttagatgaaaattttttgtatcttacttagaaaaaattaagttgatatttaaaagaattttgatttttaatcaccttccacaacgatttgatataccttaaactccactttcattttttataagagaatcactttcaagggaaaaaaatggatgttactatattttaaaatctgctttataaaaaagtgtataaatgtcaatctgccagatatacttcctatccccaacacagctgtaacactgactaatggggtcatgaccatgaagcaaattttacttcctaaatagaaatgtgtaggtggcagaaagcgtatttttcagcaggagtgattctgttggatctctttacaatgtcagagcagttgttagaaatgttagtattttattcggtttcttgctgtgaaggattatcacaatgttgaagtgatggctgttcacccagtcgtcatcaccgtcatcatctcaatcttgggaatcatcagcagtgtcccccacacagagagacaggtatagtggtgcagtttagtgacagggaatccagtcttagatcctgtttatatcacatttttgtgaatttacacaaaattccatttatagctttaaaactgtactacataacacattactatactactacaaaatatccttctctataaatgcactgaatattttcttgggcattttattaggccttttttagcattattacaaatgctaacaacaagatacttcaaaccaccaaatataaagtcagcttcttaattttctgaaatttagttatttgagttaataagaattctgtaggaatactgacccatctcttttcatccaaccttcaaaatagttaagcctatttgcccatctcacctaaccttcaaaatagttaaaacaaaaacaaacccaaactagctatatataacaagaatctttcaattcccaaactattgaaagaccctaagtcagccaatctatgaaattatacaagatgaaggtgaaaaagctgtgcttttttttaaaccattaaacccagttcttttctcttaaagttgtaagaaaatggaaaatctgtttttaaatcatgcaaagatttaaataagcatttttctatctgctctaagaaactgtttcttatcttacaattttaaatattcataacactcaaactacttttttgtggccatttatgtttttgacactagattgtatggtattatttagccaagatgtattataatgctaaattatgtataaaatatgatttctggaatttgtccatcttctattgaagtgccattattattgccaggggaactaaaaaagaaaaaaacagtcttgcttgcagcaggtgtctcatgcactactttcttcaatccttttgtgccatagtgggaatctggacctttgagtgttgcacatgctgtgtagcacacattgggcaggatctctatgggttccttgaacatgaccctgaatgtgttagctgtcccatcacaactaaagccggtatcattctgtcccagggtttgctttttctcatattcaatgatctgtatattcacttgataatctgtagggccatgaatagatccatacaagccaaatccaactatagagatccttctattaactgtgaatctgattcgatcactcgtcccactgtaaccccagcggctttctacttgctggaatctattgatgcagcattcctttcccctgagacagcatcttggtcggtcaatgtattcaactcggggtttagggttgacagtaaaatgaagaaagaggtttaccacttcacgatctgacaaaattccagattgagcaggacctgctgcaaattcctcaattgtcatcagtgggaaccggattaaggaaagtgcttttcctagaactttttgtttattcccaaaagtcacaggtaattgttgtctctgacattctgcttctgcccagcgtacaacagctccaaaaagtcgactttctcgaatactgagtgtgtctctctctaaaactgcacagagtgtatctataggcaaaatacaaaataaacccaattagaaatattttagctctctaaccaagcaataccaacagacacacttatattaagttttcagatctcaacaaaaaat

SEQ ID NO: 64116 - DNA, 1034 bp, Homo sapiens
ctatgaaattaaataaacataattactaggtccttaaggaatgaattttatttttgtgtttccagttcctgtaactatgtgcctagtacatagcatgtgctcagtgtttgttgaaaggaaaaggtctgaagttgattctatcgtcaaagaaaatatttcagtataaagcatgtagtttataccaagaagcctttttaaacttaaggtctcttttttcataacatgtacatataaattttaaaagaaaacttaaaaatacagtagctgcttctaaatgcagatattgtaacttagctattattttcagaattccacaaggcatatgcccagttggtcgatcttggcactcactaacaccagtttcttcagatcatctttttctctttggaggatttaccactgataaacagccactaagtaagtccttgaaaaatatgataatgaaatcatcatatatcatccatatctaatagctgaaaatgagtctattagagactgatgagacggcttatagggttggttggaaggtttgaaattaattttgatcctgtaacatagctgtaattgtactatatggcatacttctgttcaataaagaacctggagcacttaagagccctgctgaagggctacaacatgcaaagggcttacttggctaattgcaggtgggggaaaaaaaagaaaatatactctctgtatctgctcatgatctattacctttcttgccaaagctgtgccctttaaatgtcaatgtcatattgacagactaacatacttcatttctttgcttgaatcaggtgatgcctggacttactgcatcagtaaaaatgaatggatacaatttaatcatccatataccgaaaaaccaaggtatttaaaagcaattcatatactgaatatgcataagacataagaattgaggttttggctgcattatatccagcattcttatttataaaaatctcagcattcactaaggtttgaaatacttctcaaagaaaagaaaaccaatgttatcctagtatcaaatgatc

SEQ ID NO: 64117 - DNA, 6986 bp, Homo sapiens
gcagcccaggcggagcgggaggagctggcagcggggcgcatgccaggcgggggtcctcagggcgccccagccgccgccggcggcggcggcgtgagccaccgcgcaggcagccgggattgcttaccacctgcagcgtgctttcggaggcggcggctggcacggaggccgggctacatgagaagctcgacagggcctgggatcgggttcctttccccagcagtgggcacactgttccggttcccaggaggggtgtctggcgaggagtcccaccactcggagtccagggccagacagtgtggccttgactcgagaggcctcttggtccggagccctgtttccaagagtgcagcagcccctactgtgacctctgtgagaggaacctcggcgcactttgggattcagctcagaggtggcaccagattgcctgacaggcttagctggccgtgtggccctgggagtgctgggtggcagcaagagtttgcagccatggatagttctgagaccctggacgccagctgggaggcagcctgcagcgatggagcaaggcgtgtccgggcagcaggctctctgccatcagcagagttgagtagcaacagctgcagccctggctgtggccctgaggtccccccaacccctcctggctctcacagtgcctttacctcaagctttagctttattcggctctcgcttggctctgccggggaacgtggagaagcagaaggctgcccaccatccagagaggctgagtcccattgccagagcccccaggagatgggagccaaagctgccagcttggacgggcctcacgaggacccgcgatgtctctctcagcccttcagtctcttggctacacgggtctctgcagacttggcccaggccgcaaggaacagctccaggccagagcgtgacatgcattctttaccagacatggaccctggctcctccagttctctggatccctcactggctggctgtggtggtgatgggagcagcggctcaggggatgcccactcttgggacaccctgctcaggaaatgggagccagtgctgcgggactgcctgctgagaaaccggaggcagatggaggtaatatccttaagattaaaacttcagaaacttcaggaagatgcagttgagaatgatgattatgataaagctgagacgttacaacaaagattagaagacctggaacaagagaaaatcagcctgcactttcaacttccttcaaggcagccagctcttagcagtttcctgggtcacctggcagcacaagtccaggctgccttgcgccgtggggccactcagcaggccagcggagatgacacccacaccccactgagaatggagccgaggctgttggaacccactgctcaggacagcttgcacgtgtccatcacgagacgagactggcttcttcaggaaaagcagcagctacagaaagaaatcgaagctctccaagcaaggatgtttgtgctggaagccaaagatcaacagctgagaagggaaatagaggagcaagagcagcaactccagtggcagggctgcgacctgaccccactggtgggccagctgtccctgggtcagctgcaggaggtcagcaaggccttgcaggacaccctggcctcagccggtcagattcccttccatgcagagccaccggaaaccataaggagcctccaggaaagaataaaatccctcaacttgtcacttaaagaaatcactactaaggtgtgtatgagtgagaaattctgcagcaccctgaggaagaaagttaacgatattgaaacccaactaccagccttgcttgaagccaaaatgcatgccatatcaggaaaccatttctggacggctaaagacctcaccgaggagattagatcattaacatcagacagagaagggctggagggactcctcagcaagctgttggtgttgagttccaggaatgtcaaaaagctgggaagtgttaaagaagattacaacagactgagaagagaagtggagcaccaggagactgcctatgaaacaagtgtgaaggaaaatactatgaagtacatggaaacacttaagaataaactgtgcagctgcaagtgtccactgcttgggaaagtgtgggaagctgacttggaagcttgtcgattgcttatccagtgcctacagctccaggaagccaggggaagcctgtctgtagaagatgagaggcagatggatgacttagagggagctgctcctcctattccccccaggctccactccgaggataaaaggaagacccctttgaaggaatcttacatcctttctgcagaacttggagaaaagtgtgaagacataggcaagaagctattgtacttggaagatcaacttcacacagcaatccacagtcatgatgaagatctcattcagtctctcaggagggagctccagatggtgaaggaaactctgcaggccatgatcctgcagctccagccagcaaaggaggcgggagaaagagaagctgcagcttcctgcatgacagctggtgtccacgaagcacaagcctgaggagtgacgggatgggggagggaggtgggccaccatgtttggacccggggggctgctcttccctcccccgccatagctaagatgcctgaatcaattacggagatacagagccttgaggtctttcagtggaaaggtggttcatgttcattctcatcagtgtgaaactgaggagtctgcaatttggaatatggagagagagactgatttgctgaatttccttctaaatgtcactcaaaaatttcttttccatgtcattcttgggaatgtcttccacaggatttgagaatagtttcatctcagcccccattagagagaagttggggtgaattctggaaaaatgtctctttttcctgtgccatttgccttctgctgcaacgaaaatatttcctgattcaagattctataaaaaggaaaccaagcataagactctgtcatcatacctgttacacgttcctacaggtgcacaatctaagagagctaattaacctcagagtctggagttaacagcttttcaccttacttctcctgtgatctaatattatcttagaaaaattaatatgcaatttccaaaagatattttggtaagacaacaacctcccagtgatatgccacctttcaattttccttttgtggcaatgattgcatctgaagaaaggatccctgagagtctctgtttcatcaggacattctgaaatttacccacagtgaggctgtggatggatcaggggacctgtataaaatgtttgagcctgttccattttcccgtggaacctgtttcactcaatgccaggcagtgcagcatttaggaaagcagtgcagtactcagtaaggcagtgcagtactcagtaacacaatacagtactcaggcagtgcagtactcagtaagacagtgcagtgctcagtaaggcagtgcaatactcagtaacagtgtagtactcagtaacagtgaagtactcagtaatacagtacagtattcagtaaggcagtgaagtactcagtaatacaatacagtactcagttaggcagtgcagtactcaggaatgcagcacagtactcaggcagtgcaatactcagtgcggtactcagtaacacagtgcagtactcagtaacagtgcagtactcagtaacagtgcagtactcagtaaggcagtgcagtactcagtaacacagtgcagtactcagtaatacagtacagtactcagtaaggcagtatggtactcagtaaagcaatgcaatgctcagtaacacagtgcagtgctcaataaggcagtgcagtgctcagtaaggcagtgaattgcttagtaacacagtgtagtgctcagtaggacagcatagtactcagtaacacagggcagctagtactcagtactataagtactgagtacttatataggcaatgtagtactcagtaaatcagtgcagtactcagtaatgcaagggcatttcaggctcctgctgggctgcttctttggcccagctgggactcctattgagacagctgcaaaacaggctgatttcaattaggcagcacttcccaaagtgcactgaggaaggtggccccaagagaagctctctaaacaaaggagtaccctctctggtcaagtacctttggtaaatacaccataccataatatctgcttggagaaccacaatgcacattagcatattagtctgagagagaacttatagtaaggaaactcacttgattttatctaacctcaaactttccaagtttaatggatcgtgaatttttttcatgtaactcctattcatatcccatagatctagtattgtacagcactgcattctctgaggaagtcccagtccaaactctgatttacatcactttagaaaccacactcacacttttgcagagtgttgagcttaataactacctgccacagattggtaaatttaatccagtggttgttctgtttgtgcttctgttctcatttatgtgtttagggatagtgaggttcctgccttcactaggatccacggatatgagaccatttttgtcatttcctgaagtcacactggcgtttccagaaggcatctggtgctttgctcagccttccatgctgtgcagcacttctgtcctcagtcaaggagatggccatgcttaagccagcaattggctggggtccaggaaacaaagcaaaagcacaatatgtgaatgtgctgattgtgttccctatggctttatctcgagcaaaatacactctacatattttaataataagtataattagcttgctcctggacttcattttcaatgatgaaccaaattcctgaattatttataattgtgtctaaagaaaattatgaactggtcacatggcacttggaatccttgagttaattccagtgaagcaaaacttgggaagagtcaggattggccacattgccagtaacaaattcctacttcgacatatgtcttttcaaaaagcctcccagacacaagacatcttaaccgtcactagcccaagtgttttgtattactcagacaccatcatgaaataattctgtgaggtcatgatgtatttgaaaattctgcaagttaataactgccttgaattgtttgaacccgaaataagggttctttggtacctctagtagatagtgtgttcatttccctgctgcaaattttgaagtatttgggcaggtgagtcatgttttaaccacaagccataactcatctgttgtctttgcttggtcttagagtatcattcagaaagtccgctaagggccagcgtgcttcttctggctacacaaccttctcaggacaagcccactgtcttaagccactttgaccctgggagacacaggactgtgtatcctcaatcatactatacagcagtttttgtcaggggaacataaaaatatccaagagaggttagggcttagatttaaaagcatcaaaacaacaacaatggaaatttatgttggcgatagccaagaccacaagcaaaagcacatactggaaatgatgagttagaatctgatttgactgggatgttttatgagaatgtaagtgtgatattatactgtctgccttgctggaatgctggctttcaaatggtcacccatttttctttcactggcctgagttaggacatgctatcagtaatagtcccagttccatccaactttctgaaatttcatttttttttttgagatggagtctctctctgtcacccaagttggagtgcaggggccccgcaatctcggctcactgcaacctctacctcccaggttcaagctattctactgcctcagcctcccaagtagctggggttacaggcatttgccaccgggccctgatgatttttgtatttttagtagagacagggcttcaccatgttggctaggagggtctcaaactcctgacctcaggcgatccacccccacctcggcttcccaaagtgctgagattacaggtgtgagccaccgcacccggccaactttctgaaatttcaaaactgaattgatccttctccaaattagtatatactattggaaacttgtctttccctgcagtaaggctggtttccccaccccagaaacatgtaacggttggtaccatgctaagcccttgccatgctaagccctttacagtcatatcctataatccccatatcaaccttataaggaaggtgtttgtagatgatgcaactgagccttaagaggactaattccctttttctaaggcacagagctggtaaaatgtgaagtaatagtgaacctaacagtcagagacaggcagcatgctcttaactagtgctcttcctaaagttcctttaatgtccttttgagattttgagccatggaacttacttgttcacctggctaagaactcatggccactgtggaaatcttggttagggagtcaaagaaactgagcctggggcaaacgaggcttcccacactgcccaggggagcctcaactgtgaagtctaggctcagacaggcaatcaacaaacctattcaccccaccatcatcctgatctaaccattccccagtcatcccaggaaaaccactcacagcctgacactgggctgactttcttgaagatcctcatccaattggtgtttttcagaagtgttccaatattatgaattctgtgttgtggagaaaagcaaccatgcatttactggtcaatgccttcttgtatatgtaattcaatacttttacttttaatatcctcaccttatctaatctttgaattttgtcatgtaatttattgcttcattaaggttactttttgttatacaaaataaaagctgatatccaaggcatggtgcatcttgatgattttttgtcctttgaagtatggatgatagaaaaatgtatcaggtttattcatctcatctttctgttacaggatgattaattgtacagttacatcacatgaaacatttataataaagtcatgctttagaattgc

SEQ ID NO: 64118 - DNA, 1364 bp, Homo sapiens
ccatggcacgtcccaacaaattcctcctttggttttgctgctttgcctggctgtgttttcctattagccttggttctcaggcttctgggggagaagctcagattgctgctagtgctgagttggaatctggggctatgccttggtccttgctgcagcatatagatgagagagacagagctggcctccttcccgcgcttttcaaagttctatctgttgggcgaggagggtcacctaggctgcagccagactccagagctttgcactacatgaagaagctctataagacatatgctaccaaggaagggattcctaaatccaatagaagtcacctctacaacactgttcggctcttcaccccctgtacccggcacaagcaggctcctggagaccaggtaacaggaatccttccatcagtggaactgctatttaacctggatcgcattactactgttgaacacttactcaagtcagtcttgctgtacaatatcaacaactcagtttctttttcctctgctgtcaaatgtgtgtgcaatctaatgataaaggagccaaagtcttctagcaggactctcggcagagctccatactcatttacctttaactcacagtttgaatttggaaagaaacacaaatggattcagattgatgtgaccagcctccttcaacctttagtggcctccaacaagagaagtattcacatgtctataaattttacttgcatgaaagaccagctggagcatccttcagcacagaatggtttgtttaacatgactctggtgtccccctcactgatcttatatttgaatgacacaagtgctcaggcttatcacagctggtattcccttcactataaaaggaggccttcccagggtcctgaccaggagagaagtctgtctgcctatcctgtgggagaagaggctgctgaggatgggagatcttcccatcaccgtcaccgcagaggtcaggaaactgtcagttctgaattgaagaagcccttgggcccagcttccttcaatctgagtgaatacttcagacaatttcttcttccccaaaatgagtgtgagctccatgactttagacttagctttagtcagctgaagtgggacaactggattgtggctccgcacaggtacaaccctcgatactgtaaaggggactgtccaagggcagttggacatcggtatggctctccagttcacaccatggtacagaacatcatctatgagaagctggactcctcagtgccaagaccgtcatgtgtacctgccaaatacagccccttgagtgttttgaccattgagcccgatggctcaattgcctataaagagtacgaagatatgatagctacaaagtgcacctgtcgt

SEQ ID NO: 64119 - DNA, 1556 bp, Homo sapiens
  misc_feature (1)...(1556): n = a,t,c or g
ctttgcatatccatggtgcccccaaacctgctcaaaatcatcaacctgctgggttttcctggagaccgcctacaggggctttcttcactgatgtatgcaagcgaaagtaaggacatgaaggcccctttagctacattagctctgctctggtatcatactgtagtccgcccgttttttgccttggatggcagtgataacaaggcaggcctggatgaagctaaggaaattctccttaaaaaagaagctgcttatccaaattcttccctctttatgtttttcaagggacggatacaacgactagagtgtcaaatcaacagtgccttgacatctttccacactgctttggaacttgcagtagaccagagagaaattcaacatgtctgtctgtatgaaattggttggtgcagcatgatagagctcaatttcaaggatgcatttgattcctttgagaggctaaaaaatgagtccaggtggtcccagtgctattatgcctacttgactgcagtttgtcagggagccactggtgatgtggatggggcacagattgtctttaaagaagttcagaaactcttcaaaaggaaaaacaatcagattgaacagttctcggtgaaaaaggcagagcgatttcggaagcaaaccccaaccaaagcgctctgtgtgttggcgtctattgaagtgttgtacttgtggaaagctcttccaaactgttccttccccaacctgcagaggatgagtcaagcttgccatgaagtggatgactcatctgttgttggattaaagtatttgcttcttggtgccatacacaaatgtctaggaaactcagaagatgctgttcagtacttccagcgagctgttaaagatgaattgtgtcgtcagaataatttatatgttcagccgtatgcctgttatgaacttggctgtcttctattagacaaaccagagactgtaggaagaggcagagctctacttcttcaagcaaaggaggatttctctggctacgactttgaaaacagattgcatgtccgcatccatgctgctctggcctctctgagggaattggttcctcagtgacagacccggaacacccgcttccgtccctccccacccaagggtccgccactttaaaaataaacgccagaggaccaaaagctctttgtgaaagatggggctttttcattctggaaaacccaccttgntgcccaggggacacattttcccccagttaagctgacatatttaaagatctcctcttttaaacatgtagctgaaaagtaataatgatgttgaggaggatgatgatggtaataataactaaccacctggggagagggttaagtgaccttgctcaaacgttttagttttgtgatttattatttttaaaataaaatcaaacggaacatccaacccaagatcctgtaggaacacctaccttaagcacatatctgaatgggtaacatgatgaggtacctgtaaaattattaacaatatcatgacatagcatttatatttgtgttttgaaaaaataaaagtgctttctagtgttttactttatcctc

SEQ ID NO: 64120 - DNA, 2150 bp, Homo sapiens
agaggcgccgtcttcccgggtcccgagcactctgtgccggaggaatcagtgacattcgaagacgttgccgtggttttcacagatgaagagtggagtcgtctggtccccatacagagggacctctacaaggaggtgatgctggagaactataacagcattgtgtcattgggccttccagttcctcaacctgatgtgattttccaattgaagagaggggacaagccgtggatggtagatcttcatgggtctgaggagagagaatggccagagagtgtctctctagactgggaaactaagcctgagattcacgatgcttcagacaaaaaatcagaaggatcattgagggaatgccttggaaggcaaagtcctctgtgtcctaaatttgaagttcatacacccaatggcaggatgggaacagaaaagcaaagcccttcaggggagactcgtaagaaatccctctcccgggacaaaggcttgcggcgacggtcagccctgtccagggaaattctcactaaagagagacaccaggaatgcagtgactgtgggaagaccttttttgaccactcatccctcacccgccatcagaggactcacactggggagaagccctacgactgccgcgagtgtgggaaagccttcagccacaggagcagcctcagcagacatctgatgtcacacactggggagagcccctacgagtgcagtgtgtgctcaaaagccttctttgaccgttcgtccctaactgtccatcagcgaattcacactggagagaaaccctttcagtgcaacgagtgtggaaaagccttttttgaccgttcatcccttactcgacaccagagaattcacactggagaaagtccttatgaatgtcatcagtgtgggaaagcctttagccagaaaagtattcttactcgccatcagctaatccacactggcaggaagccttatgagtgtaacgagtgcgggaaagctttctatggtgtctcgtctctgaatagacatcagaaagctcatgctggggaccctcgctatcagtgtaacgagtgtggcaaagctttctttgaccgctcatcccttacacagcatcagaagatccacactggagacaagccatatgaatgcagcgaatgcgggaaagcctttagccagcggtgccggctcacgcggcatcagcgtgtccacacgggagagaagccctttgaatgcactgtgtgtgggaaagttttcagttcaaaatcttctgttattcaacatcaacggcgttacgccaaacagggaatagactgagttgggcaaaagcttgggtaggacaagaacttccatacaaatttgagatagatctcgcctgtcttaaagctgccatttgctcattctacccactctggctgccgttgtcctgtcctgcttctgcgccagagtgtttaataagcactcccttcctgctgtgttacagaactgtaggggaggccatggaaatgactctaaagatacaaaattttgaagaggtttgtcagacaataggatagatgttaggaggagacacacctcttgtctgagaacctaggccccaggtatcactgcactttaagaaactggaggctgcaacaggagggaaaggcagaatgatatcacagcagtactatttttttttttcaaaacatttgttttgatggctgttagtccccctctcttggagcattttggggcactaatcttgttctcttgtgtcccagcttttagacctcttacttccactgctagtagctagcacttactgagcacctgcaatgaggtaaagactcagctaagggttttacaggaagtagattaattgatcctgtcaccaaccatatgaagtaggcactgttaccatctgcatctccagatgagcaccctgaggtttagagagattaaatcacttgcccaagggtgaaccagctggtaaaaggtgatgccaggtcttgaagacaggtccaccttcaaaatctattctctttaccattatgctcgatggtttgtttgttttataatttatgtatatgtattatcctctcaactagattgtaagcacttggaggtgtgacttacaggtctttgtatctcacacagtgccttgctaataggtgctcaataaatatttatatgagtga

SEQ ID NO: 64121 - DNA, 1011 bp, Homo sapiens
  misc_feature (1)...(1011): n = a,t,c or g
ttttttttttttatgttaatttttcggttattttatttttgaaaaatatttcccaaaagaggtaaggaatatgatgtaggcataggggtatccaagggagagaatacagtcacgggttctaaccggccagtaaaccctcttcttcatccctctttcctgcttatcactagagacagaaatgaaaaaccatggcttcaggctgctaaaagcctaaaacaaaacaaagtagagaaacaacaacaacaacaacaacaacaacgataacaacaacaaaataaggctgttgggacaaggcaagctggtcagccaaatcctctgttgttgttgatggcttcttgaagcgcttcttcaactgtttccattgtagaatatttagggaggaagaggacactgaaacatgtcagtgctcttatagggtctctttcattccaactttcaggacagcaaaatgttattttcatattatttaaatctttcatttgtagtctgtcagttcctgtaagaaatacaaggaattttttcttttcttccagagtcaatttgtggaaagccttccaaaacatcactatggtgggatgtgaactgttatatcctggttcataacgtgcattcttttcaaatgttttccaatcataatctgtatttccaacaatcacatccttcagttcttcggggtggaataatttgataatgtcttcgtcgcacattttataaaatcctctccgaaattcttcataaaccgcctttacagagtcgttgaaaatgtaattgatatacttagaaacatagtctctcttgttagtctggttgacagttatgctacttccattaggaattaagtttgtgtcgtttctgtcccagtgcacattacaatggatgtaaaatacttcctcaaagttatcaccttcatcatccagaagtgtttgcaaattctttcccaactcaggaatgagttcttgantttcgccacggttatctatgatctcgatttnnngctcccctggccatcct

SEQ ID NO: 64122 - DNA, 2255 bp, Homo sapiens
taagtccactgaataaaaactatgaaattgcactctgtgtcaaccatccactaggatagaataccgaaatctgtgcatgcaaaaataggagatgggcccatttgcacacaattcgtagttatgcagtctgctatataaatatgttcacatgcactgtgtgtatgaaaatagatggtctgtgttcagacaaaagtaaaacatttttttcaaattgttatatttaaaggttttctgggagaaatttatgaaacgcaggctgtgtctatttgacatcagaaatttccactttaaaccaaaataataagaaactttaatctgtatatttacaacctttgttgagtacacttcccccttatttatacgtctgcatttccttccgagcttcacatctttctaaaatgcagcttggttttaaaataaaagaacattcattttgtgattctaaacaagcttcagtaaataccaccagtatagtactggtgaatttctcagcataaaatcgacatacctaaaaagttaataaaattcagctcttttccaatttcattgttatgcctattgaagtattaattgccaggtttgatttttagtgaagcttggagtccatactttgagcagaccaagtgaagggaagaacagaaagaaactcaggagtagagtaatatcacttctcacttacaccactttcaggcacatccaaagagttcctagatacttggaaaatgtctgaaaatttttaagtaaaatactaaacttttcagtgtttagctcaactttttgttcatttggaagtttctctccatccgaggacttaagccagttttggatttgtaagccctgagtacaatacacttcctggaggcatcctcactgctgttgaagcaaaggatatgcatggggtggaaggacggcttcgaacctgggactcatatgccttgagaacaaatagattgttacagccttgggctgctgcgtaatcacagttcctcgaggctcttcctgagcacatgcccaagcatctgcctctggagagactgactccaaatgcaggtgcttccattggagctaggtcggaggctgctttatatgacgaactccagaaatggatgccagaatacggaggccaaacgttctgagtcctggactgaacagcacctacttgtggtctggacagcttaacccagagttcctggaagaataaatgctgttagcatctggttaatttactggcagacagaagcctacttacagtggctttcaactttttgaccacatctttactgtggaatctcatcaaagacttggaagcaggggtggtgagaggggcctggggcgtggtgtggagggtcgagttctttgtcgtcccacagtcacccccaggaccaccttgcgaagccgaaaatacacatctgcattttaccgacaaggaacgccactcagaaagctgcagacatttgcctgaggtcacgcttacagtgggcagatgaactggatgtaaatacaggagcggcagagaggacaggcatggaaaggaggcctgtctcccacggagaactcctctagtgccagcagacacgcatggtggaacacatgtgagcaggacaggagggccatctctctggaacgcctgcctgcacccacgcgctgaccgccagcagcggagagaggggccaggcagatggagcactcgtgggtctcccggcgcagagcctgcacttggattttctcccattcctcttctgtgatctcatggccacatttttcttccaactgctgaagaacacttcgatttatggccaagcactgatcgatttctgcaaagagctcttcaatgttggtgttgtatgagcacaggatgcggtggctgatttctgtgaactttttttcaaagaatttttttcttaacttggcatctgtgggaggtactgttttcctcaggtttctgtaccactttctaacaacacatcctctccagtaggcttggattctggtcacacacttgattctgaacaggcgggccccatcgtgtatcactcgggtttgatactggttctttctacagagaggacaggttttcttatttgtgaacttttcaaaagcctgaagacatgctttgtggaacacatgggagcatgaaagcagcacctgaggacgaagctcgaattcttctttacagatggggcatggttgcacggagtccccttgcaggagagagcgctgtttcaccttctcccattcatctgatgacagtggag

SEQ ID NO: 64123 - DNA, 931 bp, Homo sapiens
  misc_feature (1)...(931): n = a,t,c or g
tctcctggggcgggggcaggcatggacagctgggccatgggaccctggaggcagagctggagccacggctgttggaggcgttgcagggcctagtcatggctgaggtggccgcggggggctggcattctgtgtgtgtgagtgagactggggatatttatatctggggctggaatgaatcagggcagctggccctgcccaccaggaacctggcagaggatggagagactgtcgcaagggaagccacagaactgaatgaagatggttctcaggtgaagagaacgggtggggctgaggatggagcccctgcccccttcatagctgtccagcccttcccggcattactggatctccccatgggctcagatgcagtcaaggccagctgtggatcccggcacacagctgtggtgacacgtgagtggggctgggaggcactccgctccactcgagctggtgcctacggaagggggtgtggtcgacggaaaaacttctgtcttaaggcttctgtggctcatacagagcagctaccttgctcagtggataagccccaacccccgtgttgtttcacagtagttccccagcctgtcaggcccagannnnnnnnnnnnnnnnnnnnaggctgatgctttctgtcctccctgcacggccacagacacattccctgcccgccgccgcctctgacagcagggactgtccagtctggcatggaagactgcggcgctcggtagcatggcacacaggaagatccgccactttttccctcgggatcctctgccatgccacgtgtgatcagccagttgttaagagaatatgttgttccatgccaggcagatctcatgaggattgtaatatgctagctgtgggctatgccaagctgggctggacagatgccttgccaaagaaccgtagtgacaactatcgattgtccttttgg

SEQ ID NO: 64124 - DNA, 997 bp, Homo sapiens
  misc_feature (1)...(997): n = a,t,c or g
ttttgtgagacgaccactttattaaatcaccaggggttcaaaacatttgaaaagaaaactatgactgggaaattactggtgtgtgtccgacaccggggctttgggtgggttaagggtttgctttgaagctcaccgagaacttcaacatgggcttttcccggggcctcaggaggcaaatggagctggggaaaccccggagccgaaggcggttcactcccccgtcggggacgatggtgagcctggcgtgagtgatgacatcttggagctctagggtcaggctatcgaacagatgactttggttgggagacaacttggtcactggaagcagtggtttccacttgtgggccgggagaatccacttttgcctgatcacggcttcttcctgagttgtcaggatgcacccatccactttacagctgtcaggagcattgccttcaaaatattttgtgtcaatttcaattcgagttattactccaggatgtgccaatcggaaaactgcccattcacaacccggaaccaagagaatgccattctcatcattttctaatattggtggccggtccagccttcttgcagtttcccaaccatccgccatagactttgccccgccaactcctattatattgtttgggtgcccaaacttagcattactaaatcctacacagacacccccaaaagcgatggccactaggtctgcaggttctttggggtcagttgcagtccagtctttttgtccagtaccgaatactataagtcgtgcaattccaccatctgtgttgttcacttctgtaccactcttgtatcgtctctacctagaagaggtctgggcacatagtaggcattgaagtttttttcattaaatgaacaactccaaggtcaaacagcattcgggaaattcaccatacagataatgtttcgtgctagaaataagcatcgctgactcccacacagacgaattccacggcatatgcgcngctaactgggtnannnacccgcc

SEQ ID NO: 64125 - DNA, 1986 bp, Homo sapiens
gggattccaactcgggactccccgcttctggggagaccggtgaggcccccgcgacatggccctcccatccccaagcctctcgtgcagatctccgctctgtgggacttgattgcgggctgcgggcccgtggctcctgcaggcagagagaggacgggagaggagacggctacgaggcttggccgcaggtagctacggtgctcccccaacaaggaaccggaaaccctcttcgtttgttgatctaaatatacaaaaataaaactagttgctgggttctcagacggagtctctgcggcattaggaggcccacccttattttctcttttcttcacgcaggaatcaggtccctgggcctggggggcggcaaaaggagatggcggtgggtcaagtgggcgcgcaggctcagacctggggcttctgagcccacgcccaggcatctcggacctctcacttctgaggccacctcctgccctttagaatgaagggctggcacagttctgccaggatgcacgtttagcgacttctgtcagactgaagcatcccctcgccgcaagcgcctgaagtgtgagaggcactgttctaagtgctttaatttgcacttgtttaatcctcacaggagtcaacttgaatgggcacacttattcccactttacagaagaggaaactggggcacagaaagactgagtaattgctcagggggcatgctccaagaaagagggagagacaggatttggacccagacaggctggctccctagtgctctggactttggtgtggatgatccaactcaagccttctcctttttccctcctatgtgatcttgcatgcgtttgtgcagagaatgagaaggcagatcaaagttacagatgctgcgagaacatcgccaagcagaatcttgggtgctgtccccacctctctgtacctgctccctcccagagaagccagcctccacttgctgtcccgggccttctctatctgagaaaagttgaaggagcacatgtccttgcgcaggaagaggctgttcagcgtgaccgccccgatcaagaagaagagctgcttcaccgcctgcctcacaagctcggggtccaggccgttctggcacatggtggtgtaaaagtagctcagctgttgcaggacggaggtcatggtgtagccgtccgtgtcgtctatgctagaggagcgcttccggaagcctgtgggcttcaggccggaaatgccctgcaggctctcatactccagcattcccggaactgcggagagacagggaggctgtgctgacacgccaggagacacacgcggaacgttcccgacgctcttcggtttgtttcaggagatgggacatttttctacaagagtcagtggatgtacttatgatagagaaagcaaaagaatcaagggtttgggacaccagggtgtgtgtcagggttagggatggacggctgtttccagcggggctgcagctcctcttgtaggtttgaagcagcacgtttttcagcttcacaggaaagaaagctgcttagcatgacaaatcatggcctgggcattaaagcctaaagtatttaaatttcaggaaattaaggaaagtatacaagaattcgaatggggctttaggatttcaaaaatacttggctacgccaagaagtagaagtaccacataaatagcagtagtagaagtttccccaagttttttccttcaggataaatcatccttatataaagaaaactaccaacagcgtactattatttatggaatcattataagcaagcaaagaattaaaaggcagatatctacatgattatatttccttggctttttaaacaatgttacacataatcacacattacacataccaagtttatgttttaaaaagtcttaatgttactataaatattttttggtcatccattctcttcttacctattatcggttggatattcttttccattaggataataaaaagatgatatattcgtatagccacatgtatt

SEQ ID NO: 64126 - DNA, 3870 bp, Homo sapiens
gacattagtccgtgtggtggaattcgcctagtgtggggctgagggtgcgggtcgctatggcggtggacatcacgctgctattccgggccagcgtcaagaccgtgaagacgcggaacaaggcgctgggagtggcggtgggcggcggggtcgatggcagccgggacgagctgttccgccggagcccccggcccaagggcgacttctccagccgggcccgcgaagtgatttctcacattggcaaactgagagattttcttctggaacacaggaaagattatattaatgcttatagccataccatgtctgaatatgggaggatgacagacacagaacgagaccagatagaccaggatgcccagatattcatgaggacctgttcagaagcaattcagcaactacgaacagaagctcacaaggagatacattcccagcaagtgaaggagcacaggaccgctgttttggatttcattgaagattacttgaaaagagtatgtaaactttactcagaacagagagccatccgagttaaaagagtggtggataagaaaagattatctaagctggaaccagaaccaaatacaaagacaagagaatccacatcttctgagaaagtttcacagagtccttcaaaagactctgaagaaaaccctgccactgaagaacgtccagaaaaaattttggctgaaacacaacctgaattgggaacgtggggagatggcaaaggcgaagatgagttatccccagaagaaatacaaatgtttgaacaggaaaatcagcgactaattggtgaaatgaacagcttgtttgatgaagtgaggcaaatcgaagggagagtggttgagatttccagactccaagagatattcacggaaaaggttttgcaacaggaagctgagattgacagcattcaccagttagttgtgggggcaactgaaaatatcaaggaaggcaacgaagacataagagaggccattaaaaacaacgctggcttccgcgtgtggatcctcttcttcctcgtgatgtgctccttctccttgctcttcctcgactggtacgacagctagccagggccacgggggcccagcacgagagtcctcatgggcactcacagactgcgtgctttcatgtacttccagtgctggagcatggtatgaccagattttatcacagtgccatttgaagggaaaggagttcagacagacagacgtattccccaaaaagggataccccaggccgatggtgttcagccatttagcagctgaaaaaggaaacagtgcacaccaatgggaggcagcctgcgtagccctcatcaggcaagacagactgaatgcaggagtgggtgattagctgctccttgaacttgaggctgccttggcagcaggggcacagcaggcctcaagagcccctaattgtctcagggttcaaaggaagacactgacctttcccatcccggtagcttcagggaagatcatagttaataacgtctctcaacaaatgattacttctttgtttccttgtggcttcttgtctgtctgagtcaacgaatacacagacttactggattatagaagagaaaattcacatctgccttgttaatctaataaatataattacagccccttaatgtgttgtcaatgagtctaagttgacaaattcagtggcagcccagccacctcctatcaatcaatcagggaagaaatgcaggggagactggggccctcagtgaggggctgcctggcattactcctccaaagactgctgcccccagagcaggcagggggtgtgggagggccagtttcccgccactgggtccaaggagcctttgttcaaaggaagaagtgggccacggaagaacgggcctgcttctctcgtgcctgtgcttctgacctccaggaactgtaaacaggaacacctatgtgtaactgaaggcatgagacatctgtacaggaagcatcccagcgcccacatgggcatgagacagtctgcactgcgcctggtgaaatgcgtgtgtgtacagacagtccactgggcagcacaggtatcctcatgttctttatttgcacagagtgaaatgtcagaagttacatgtaaatgaattcacagtcaataaagtccacgtctacctggaaataccaggctcggcctctgcactgtgcgcacacgggcttcacttgtgtctatttcagatgcgcagggaagctttcggcactgatttattgctcttgagtcattttcccacagcttaacaccacccttctcaggcacacggcctgctgatgcacaccgctgcgccaaggtcacgggtctgtgtctccagacacccttgatgagaaaatacattttctgtcttagaagcacatttcaggaaacaagagtggcgctgaccacggtcaccatgcctgttcacaacacatctcacactatttgtcgtttatttctgatctaaaaaactgaaacttttgacacgtacaccagaaacaacacattcaataacatagaagaaatgtctgcgaatgtcttttctatttgttttacacacttttagttcatctaactggcagttttgtaaacataaactttaatatcaagattcaaactggaacaattttcttacaaagattgtgagttgaaatttgtcattttgtttgcacggtgccacaccagtcccccacccccaccccacagcctttcctgcctgtttcccacatcaagggatatcagtttcatagaataaaaattaaagtagctcaagcttaccagaaattacatttccacttttcccacccagctcatttctttaaaaactaatggggctattggtgcaaatttattcataatagaagtgaaccagagggccagtgggggctctttcctatcagcacatcacagagcagacagactacctgcagggagagttctgcacctcacggggcccgggcgttctcttcccaggcccttttcccttcacatggtttgccagttttacacacatgggggcaaaccccagctgtctccacccagatggggtgtgcccctccctccttaccaagatgccagagtcagaggggagggagtagtcaatccacaccgagcctgccacattgcagggccgtccacccgactcaggagtcagcacaggagggtggggggtcttttcctcgtctctatgccacttacttactacagtgcaccttggcagcagtcagcactgttacccgctgatggccgaggaagaaatgcgaagtaggcttgctcttagcacagcgagagatcactctagatatggctatggaggaaggtttgcagacagcagggtcggttcagaaaatcaattccacaaaatgcatttatctgagatccaaacccttcgcatatccagtgtaaatttatttttttacagcatccaataaatcccagtaaaggagctaaatgaagatcttaacatgaaaagtggtgtcagagctctttaggcaatgctgaaatgcacttgattttatgcccgtgggtggtcggcagcaagttttatttgcaaagcagcattagcaaacagaagcaattgcaccgtaaatgagtaacctctaaagtatcagtaattatatttaatgaaatgtccctcaaagtccctttgttatttgcaagtgacacattgtaaggaacttgcccatcccgctaagctgacttctcagccgcttcagtctcctgctcggacagcttctcttctgacagaactgacatccagggcgatacggagcgcgtgatgctctgcttggccaggttgtagtggtttatgactgtgtaaaatttctcccgggcactggagtcttgctccgcgtagtagctctccaagccttctgggatgcactgggtgtt

SEQ ID NO: 64127 - DNA, 1635 bp, Homo sapiens
acgccgccgtaagtttggatactctacagcggccgcaatacattgggtgtgatatacctaaggttactccctgtgatgttctgaatggtgagcacttgtttctgctgactgtggtcgccagggatcgttacccacttgacacgacaggagaaaacaggtcacagattaactggcagccacacagtgcatatgtatggtaatatggggggaagggtagcacacagtcaaatcatctgcccaagtgcatgctgagtggatacagatcacaggctgagcacctgggggcagggctttaaatcttggactaaattcactcatgagccctccaggatatctgctggcaggtgcacggaggatgtacatagcacatgtgtttgataatgcagtccaattggggagtggataaagtgcatttattttcttctatgtttgtttttgtaaaaaggagaaaggaagcaaaagactccttcctttcagacccagtgtccactgagcttggagggggtggagccgggaccagccccctaggaaaaggtgtaggaatagaaggcaatggcattggcgctatagtccatggggaggaggtgcccgatgtgcctggcccctaggctggccccacccagagcggaggagtgcctcagcttcatcagggtgaagctggagaagaagttctgagcctggatctctctgccctgggtcagcgccaaaagaaaaccttccttcagcagctcccagctcttccacacagagcccacgcacaggatggggagtccaatcttgccctggaacaagaccgggtcaatctcgggcaacactgctacgatgtgtctgcccagcatctccccagccttcctgaagatatagcgggaaagggggtctccctgctgagcaccttctgcaattttccggcaaaacccagcaaacctgcatttatcaaagtccctatacaggtgagtgagtatccctagccgatctggcacctggaaatagtggaacatggcctgtttgacgtagccgatatcatgaggagccgcctctaggttgtcaatggagtcaaacactattttcactgcttggtgtgcgatccagtaggctgaaccctcatcacccatcatatggccccagccgccgcagccactctcggagccatcagggttgatgagcctgcagttggagcctgttccagatatgagcacaactccaccatccggtgtagctgtggcgatggagccggcggcatcggtggtgattaagtagctttcactcaggtagggaaatcggtccctcagctcctcgatcaggatcctccccgcgtcctcctggtccccaccgctcagagataggcccaagcttcgcagcggtaccagaggatccacccctgctttccgtttggccctgttcaccatctcattgatcctctccacacacttgtctgtcccgatcagccagtggtttgtgctcagtccatctgcttctgccaggatcttcccatcctctgagactaaaaggacctcggatcgtgtgcctcccccctctacacccccatagatcgcggccatgctgctgctaccgtcgctgctggtcccgccgtttgcgtctctccccgcctgacacctccttccctccagcacgaaa

SEQ ID NO: 64128 - DNA, 2507 bp, Homo sapiens
  misc_feature (1)...(2507): n = a,t,c or g
ttttttttttttgagacggagtctcgctctgtggcccaggctggagtgcagtggcgcgatctcggctcactgcaagctccgcctcccgggttcacgccattctcctgcctcagcctcccgagtagctgggactacaggcgcccgctaccacgcccggctaattttttgtatttttagtagagacggggtttcaccgtgttagccaggatggtctcgatctcctgacctcgtgatccgcccgcctcggcctcccaaagtgctgggattacaggcgtgagccactgcgcctagcccatgtttgttttttataaaagcatgcccttacatgagaatgaaagtaatcctttcatggtgtacaggaccccagctttagggtcttttgataactattttggctattaagccttttcccccttttagtgcctagaaaaagtagaggttgtatggataagtgccccttaatagccaagacttcttgaggactaaacctcaatttccttttataaaatgatgatggcaatagtccctacctcagtggtctgttgtgaggattcagtaaaataataaagtgcttatcatgctgcctggtatatatgaagtgttgatgttaactgttactattagttgtatgtcacaatagtaataataagctatctttcacataagaaaatattgctcttgatccatcaccaaagtgtgtgtactctgaactgtatcatcaggagaggttaaaggatttgctcagaacaaataaaaaacctctccctattatgaccaatgtttttaatgaaaatctcatattttggctttaaagtaaggtgcttggctttcattcataatctatttccactaaaaatatacatttgcttatggttccactaatatcacaattagtttatgagatgttggagatcttgtaatactccaggaagaggttatggaaaatttcataaaggaagtcccactggaaattaaagtaaacttttaatgcatatattttaaaaattcactttccattttactattttaaagtgcatgtaaaattcttttccattttttggtaggtaattaatttgaagaagggaaatacaatgctttactattactaccaacaggattttacacaagaaacattagtaacttaagctgtggatcctgtgaatgtacaactgacacagattttgtaaatccatactgggcctggaacttatgttgattataaaagtcaaagggtaattttcttttaaagatatattacttataaaatattcccgaagtatgaattgtgcttttagtttaggatatatgatttaaattgatgcacactgcagatgaatgtttacccctgctgtagatttaaagaacagcatagatatctcaagaaccccaaataaaattaatttttcccctccttgtataactccttaaggatttacatcacaaagctaatcaagaaaccctctactttaaccaagcagtttgtaaaagtaagtagcaggatacagaaatcctcaaacctatatataggtaaaattaaatgacttttccctttaggtagaagtccagcctctcaaattgcatttgagaatcaaagttttaactgttgttggagactgtggattgaggatgcactgctttggagtttctcagtaactgtatcttctttcagtgtggttttgataacttcagatactccattggttccaaggatgcaaggcaaacttaaaaacacttcactatttatatcataatatccctttgctaaagctgatacagaatggactttcttcttattgtttacaatactgtcaaccatgtcagctactgatagtccaacagaccaggatctttgaccttttactcttagcagttccatggctctgttggacagctgcacttgagaggtatgactcactacttcttcttggccactccatgtgagcactttgtcttctccttgctcgccaataacccatacttctttgcctgaagtctgtgccttcaaaacatttgtaataatatactgtaatctctgtgaatccagattacatccaattccgatcactcgatttgcaggaaatgtactcagtttccatgttacataggtcatgatttccactggttgagatgcaacgagcaggacactgtgttgactataatgtcccagagctgggacaagggctctgaacatatccacattgctctgtaccacatcaaggtacgactgagaactacccaaagagttgactgtgaagatcaccaccttggaatgagcagaggcagacaaatctttgctgatctccacattaggaaggttgaagatttcaaggtccatcgtggctcctttagtcccttctgagaggtctaagaggacaagcctgtctgcaataccctttgctgaaattgctaatgtgcaggcaataccgagttctccacctccaaccacagtaattttattgactgttttgaattccaccacagggactacggtctcgaggtnnagcccc

SEQ ID NO: 64129 - DNA, 2375 bp, Homo sapiens
accggccgcaatacagagcctgtgaattaagtacattctgaaatactgggaaaagatttcatatatcctgtacttgaacctaaattcctataaatggctgagttatattctctttctagagattaagttcacaatttgatttgtagactaatggttttattgattcaaagtatctttaaagagcagaaataggaaacaagcatacaccacacacacccctttagtttaagtgatatatcagatcaaagttgaattaatataataatctttagtgcttttaattgtattgtttgttttcagtagaccaatgaaaatacatagatccaactgcagaagaggttaggtaatgccggaatgattctctatcatatcggtgttttatttccaattatacagataaataagtgatgttgaaatccatgctatttctatcctcaaaataagataaatgtatggttacattctagcatctcatcaagagtcatcatgaaacaataatatatttactacttttgcaaaataatatataatagactcccacaggctataaagtttacttaattaattttggtaatgtggcactttacaatggcttttgggtcatatcatactctgttgctgctactactaataataataaaataacagtaaatgtaaagaagaaaccaaaagaaaataaattagatcacttgatagttctaaatattgttttggtttatccttgaactggaaatcaattctacatgatttggaaagaaaacaaacacatctttataattcagagtgtgtattttgaaggtgtaatatgatttatccaatgccagtgtgggtttgtcatgttctttttattcaatgtcaactggttccgtagctattaaagcacttaactgtttctgtgcacaggagaggaacagttccaaactggacaggcttctttggcggatgacttgatcgagccttttctgttcttttatatactctatcaattcatctcttgttcttttcactgcctcttccacagccttttcacttagtttctgctcttctattattgctgccttaacagtttcctgacttatttttctttgttcttgtatagctttttgaatttcctgagatactttttcttgatcttttgcatgttctgtcttccataattccctttcttcagcatgcgctttttctaaattttttctttcttcttctacgacttttaaaactgcatccttcattgcttctttttcaagctttgcagcggatactaatgcctctttatttctttgcctttcttcctccaaacacttttccaatatttccttctgttcttgagattgctgaatcaaagcttcctttattttttcttttaacagttccttctctgtatctagcatttcaaggagcctctgatgctgagcatttagcaactcctcacacttgtgtgcctgtttctcaattgcagaaatgtactgtttttcaatagcttctacttgttgcttaactgaagactgcagtagtgccttatattcatccacaataatgctgagggcttcgtgaccagctttcctcatgtcttccaattcttgtttatgtttttcctgaagttctttgtatctatcttgaaaagaaatggcctcttgctctttttcttttagaaagcctttttctaagacattatgcttttccatcaatgattccacatcctgtttaattctctgtttttcttcttcagatactttgagtttaatctccagacttgaaattttttgctgaagctgtatgttagatacattggctccaggatcctcagaatcatccacaagggcaattgttccattacttttttcatcagttaaacccaatggaaaaagtgagatatccagatgagtgtgtgttgattgctgaatctgtgcttttggaatagtttgactcacaatgctatttgctgcatgtgtattctctggtgatgaaataatggcatcagaagagaggcagccaatggaagaagagtggtcacggtccagtacaatctcaggagaagatggtgaaagatggactccagatactgcaggaaaggcagcccaaggaatagcaggagatgttgtttgggtttcaccacttccaccatcaaaagtctccgcagcctcaaaaccaccaaaatcatcatcatccattcttcaagtggcacctgctcccctctctcgctctccgctgccgccgctgcgccgctcacccacgctgcccggtgagccacccccagcacacagacccctacgcgtacacccgaggcacggccccaggcccttgaggggagaccgcggcccagccacacaggttggggtagcccacgcaccacccggcttcgaacacctacgaaa

SEQ ID NO: 64130 - DNA, 2528 bp, Homo sapiens
ttttttttttttctcatcaaaacatgatttattaattttaagcaagagtaagcatatgtgatagtggccagcttggggatagaactcttcctggttgatgcacagttcagcacctgttgggtcttggctgttgggatgataattcttttgggtgaggggaacagccgtggtcaaggctgcctgcacccccatccaggcacaggaccctgggcaaagtctcaaaagaggtagtgtttttactttcgcaccaacaatacaacataagtattgggtacaaaagaggagatttccttcccctctacctcaacgggcaaaaggccttccatcttcagaagaggcttgtgaggaccatcggttgatgacctcctagtgaattctggctcccattcagagcacagagaaacccacaaaaggggcctgtggctctggttccaggtctcaagggtacagcttggttacatccccaggccccaggctgattctcctgccatcatactgcaagccttcctgtaccactttgacccaggttgaggtctggcggaaaataacctcaaaggcaattaatacaaaaagcttcctgtaagctaagaggggttatcaactatatgtacttatttttccagagattgaagagagaagagaacgagccaaggcttggttttgttttatgttggtggcacatgtagacactttggcataacgaaccccatagagcctgcagcccaatccactctgttttggtttagaatgaagttttttttttaattatttttcttggaagtagggaggatttgaaagcttgaaaatcaagaatcaaaagacagtgaatctagaaggcatctgggagcagaacagagattgaagacgggtgggcacaggagaaagcgccaccatcgatcccggctgctgccctggaaatgtgattttcttaatagctgagttcatggttgcttgaggtcaggcctggctattcatttccagcgatgtctgaccagagaggactcatcattgacgacctcagggtcacgggggcgacgctgacaccggaacggcagcagcagcaggacgattaagacaaggaggatggctccacagacgctcatgagcgcataggacacaatccacaaaatgggctcgctcaaagactgagcggggacacagttgctggctacatcctctgttgagaaaggcccggaaatttcagacactgcagcacctgcaatttctgcacaggggctcgctgcgaagcccaccctcttctgggctctgtcgaagatgacgtagaagccctccatcaccgtggcaccgatcaccagcgcatttgtggatggggaaatgccgaatcggtaacattcataattcaggccggcccccatcatgggctgaatgtaaagctgaggcaggattgtgatacggaatgacctgctggagttctcatctctcaggtagatggagattttagggaagtaagaccaaggtgtttccgaattcgtccagcacgccagctgggacccagtccagaaaccatcagagaattctggaatcagagatgcgcgggccacagcttccaccaccgcatcaaacaccttctggggcaggcgcagcagcgtggtgccactgtccacgatggccttgtctgcgttatactctctgcagtccagattaaggctttggcctccaatttccaatttcagaatttctatctggtagtaccactcttccttaataggggtataccagatgtctcctttatacaaacttggttcaattccacccaagacaagactacctccgttggtcccagatccagcaacgggcaagccggctccacacatctgcatggagaaaacgttggggatgtttgcttgtgtcaccagggagtcgaagaaggtctccagagaacttgatggcttggcaagtgtggcataagctaggccaagtattccattccatttaatcccaggcaaaaagaaattctctgattcaaaaatagtggcaatgttgacaagaaaagaagtattgaagcctttggggatggtgacgaggtcttccccaacgaagcccgtccagcttccttgtgtgtacttcactgtgacgtcaaagcccttggagcggtatgtgctagacctctctgtgtcaaagtacgtgtctatgtaggagtgcggggttcctgccacggcaaagttactgcttccagtgtcaacgagaatctgtagcttctgcgggggggtcccgatcagcatctccaggtagtagccgcggccagagtccccctgcaggttgtctaccatggccaagaagttggcggcgcccgcgggggacgccagggcaggctccagggcgagcgccaagccgtcggcgtggcgctcggcaggggtcccgggtcccggggtgggcgcaactacgcggttcgtggccgcggccacccggaggggcagcgtgaagggcgcgggggccagctccggggcggcgcgcaggagccactgggccagcagaggcagcagcagcgcccgggccagtgcgcccat

SEQ ID NO: 64131 - DNA, 1734 bp, Homo sapiens
ccaccatgttgcagatgcctacacctcttcccagaaagtctctcccattcagattgatggggctggaaggacctggcaggacagtgacacggtcaagctgttggttgacctggagctgagctatgggtttgagaatggccagaaggctgctgtggtacaccacttcgaatccttccctgccggctccactttgatcttctataagtattgtgatcatgagaatgctgcctttaaagatgtggccctggtcctgactgttctgctagaggaggaaacattagaagcaagtgtaggcccaagggaaacggaagaaaaagtgagagacttactctgggccaagtttaccaactctgacactcccacctccttcaaccacatggactcagacaaattgagtgggctgtggagccgaatttcacacctggtactgccagtccagccagtgagtagcatagaagaacaggggtgccttttctaaagctaagcacagagttggttacagaaggtatatgtttatgaaaaagtttgtttaaagaccttccatttatatggaaggaggttgataaaatagcttgaggaaatagcctgaaaaacaaagatgagcttatcttagaaacaagtttttattttttattccttgtaaaatctttctaatctaagccttgacaaagctaaaaattaacctgactttttttctttggaccaaatcaggtttgaaatatcgatgatatatatgagaattttttttaaattctaaaatatagcaacattgcacaggaagatactcttacttcttagagtaactacagagtgattttttttttttcttgagggagactctgaaaaaccttttcgataatgtttggacttggactaaagcaattagaattatgaagcaatgataacctttaaaaaatttttctatcacatgttgaatattttcaaaccttactttaataatctaaagttacgggattatatcttatattaattttgcagttttgagtagtatgataaaagaaataagaattcaaaccattaagtacctacctaaatactacatgtaaggcactgtgcttttatttcattcagctgaggtataagcagctgtactcaaatgttcttaaaaatgagaaccagtggggaaattgtttataatcattggaaatgaagaaattccaattggctatatctttacttcagcttttcttgaacaatttacagcattgattttcaaactgtgtctactggcacccttcccctttgtatcagagcagttctgcttttaactgttttatatgttggggttctctatgagatttcattggaacaaagagtttcactgatattcgagtttgaaaaccattgattaagtgaaaaaacatcttagaagataggaaatatgtttaaaaaatgaatgtattaaatcttatgagtagggaagatgaaatacaggtttattgtatagatacattatttatgaaggataaagagcctatacatgaacagccagaatgtataagcctaggcatttactagccatgtctctgatgcttttgttcatttctgttaatcgtcatttctgtcccctctgcatggaattttatacttgtctagggtaagagtttgtagactctttcagcagaacagattttaataaccaatttatttgttttattttaaaaatttatttttgaataaccaatttaatagtaaattttatatgaacaaaaa

SEQ ID NO: 64132 - DNA, 3070 bp, Homo sapiens
tttttttttccctttcccagtttgacttttgccatctagagtttgtaaattaagtggtcagatctgatctagcttccttgagaggtgccttacttcaaaagttctcagactgaaaaaaaattcgcccattttttcaaatctttgatggtttcatttcgaatgttttagtctttgctcagtctggattcccttgctgtcttcctgtagccccatctgtgacttcctagaactccagcgccgttaccgcagcctcctggtcccctcagattttctgtccgtgcatctgagttggctatcagccttccccctgagccagcccttttccctccatcatccaagccggatccaggtctcttctgaaaaggaggcagctccagacgctggtgctgagcccatcactgcagacagtgaccccgcttatagttcaaaggtactgctgctctcttccccggggttggaggaattgtatcgttgttgcatgctctttgtggatgacatggctgagccaagggagacgccagagcatcctctgaagcagattaagtttttgctgggcaggaaagaagaggaggcagtgctggttgggggtgaatggtctccttccctggatggcctcgacccccaggctgacccgcaggtgctggtgcgtaccgccatccgctgtgcgcaggcccagactggcattgatttgagcggctgtaccaagtggtggcgctttgccgagtttcagtacctgcagccgggacccccccggcggcttcagacagtggtggtgtacctgccggatgtctggaccatcatgcctactttggaggagtgggaggccctgtgccagcagaaagctgcagaggcagctcccccaacccaggaggcacaaggggaaacggagcctactgaacaggcacctgatgccttggagcaagcagcagacacttctagacggaacgcagaaactccagaggccaccacacagcaggaaacggacactgatctcccagaggcccctccaccccccctagaacctgctgtcatcgcacgccctggctgtgtaaacctgtccctccatgggattgtggaggatcggaggccaaaggaaaggatctcttttgaggtgatggtgctggccgagctgtttctggagatgctccagagggattttggctatagagtttataagatgctactgagccttcctgaaaaggtcgtgtccccacctgaacctgagaaggaggaggcggccaaggaagaagccaccaaggaggaagaagccatcaaagaggaggtggtcaaggagcccaaggatgaggcacagaatgagggcccggctacagagtcagaggccccgctgaaggaggatgggcttttgcccaaaccactctcttctgggggagaggaagaagaaaaaccccggggcgaggcttctgaggacctgtgtgagatggccctggacccagaactgttgcttctgagggatgatggagaggaggagtttgcaggagcaaagctggaggattcggaggtccggtccgttgcctcaaaccagtcagagatggagttctcttcacttcaggacatgcccaaggagctggatccctctgctgtgctccccttagactgtctgcttgcttttgtgttctttgatgccaactggtgtggctacttgcaccggcgagacttagagaggatcctccttacccttgggatccggctcagtgcagagcaggccaagcagctggtcagcagggtggtgacccagaacatctgccagtaccggagccttcagtacagccgccaggagggcctggatggtggccttcccgaggaggtgctcttcggaaacctggacctgctgccccctcctgggaaaagcacgaagccaggtgctgcccccacagaacacaaagccttggtgtcccacaatggcagcctgattaacgtggggagcctgctgcagcgcgcggagcagcaggacagcggccggctctacctagagaacaagatccacacactggagctgaagctggaggagagccataaccgtttctcagccactgaagtaaccaataagacgctggcggcagagatgcaggagctgcgagtccggctggcggaggccgaggagaccgcccggacggcggagcgacagaagagccagctccagcggctgctgcaggagctccgcaggcgtctgacccccctgcagctggagatccagcgggtggtggaaaaggctgacagctgggtggagaaggaggagccggcacctagcaactgacggcctcgcacggaactgccatcctgtgagggcagcggtggcgcccggcaaagttggagcccttgcggtaccagaaagcagcgagagcgagacctgggagccagggcaggggtggctgaccccatgctcagcctctaggggacggcaggccatcaggctgggggctgtgctatgtgggatggatgtgtgaggaaccccggttccacttaacaactaaatacaacatcttttgcacccctagaatgtcattttgccctcaaccttggtatttctcctggggcccttttagtcttgtgctgactttctcctgtcctcttccagtttagaataagacaggggagaaaaaggcttttcgagtgtgggacaaggtctgatgtcagtgaacggaattgaagagcaagacatggagcctggctggggctaagcagccccctcctccggatggcacaggctctgctaggttccggacacaggcttctgggggaagggtctcccttggccatcacgggaatggagtccatgctagaaagagctcagtgttgggctgggtttgccagtagaacactgcgttccagtcaccccggtcttgccagaagaaaccagcacctctttcccgtggctcctgtgttcagaatgtggtattggctctggcccagccttctcccctgttacccataattcttgcctctttccataatccgtggtttcagtttgactttgtatataaagttggggttttttttttttttttgggcttgttttttaaataaaccaaagtcaaaaccaaaaaaaaaa

SEQ ID NO: 64133 - DNA, 1927 bp, Homo sapiens
  misc_feature (1)...(1927): n = a,t,c or g
tttttttttcaatgagaagataatttttaaagtggatgaaattgaaggtgcatgtaacattatcacagatttaaaatcatgcatattctccataaaacttttcaaatgcagttaaacacacacacacacacacacacacacacacacacacacacacaaaaccaagcaattataagtcctctgaagcatgtaactgtgattagctgctactctcagcaatataaaaatactttcaccacaattacattccagcctgtaatgtaattcaaaacaaacaagtcagagacatcgctcaaatgacagaaccaacaaatacagatgctttgcatcaaggaaatgaatctactgaagaaatgcaactgaggagcagcagcccctccagggcctggagctgagcttctggtggaacggcgaggcccccttctgggcagaggcacacagtgcgcccagagggctgtgcaaagctgccctgtagtcatggaggtgaactggggacttcctgctgtggataccctttccagtgttgtgttcaaaattttacattttagattttaaatttattatatggattataaaagaaataaccatttgtttcagattaaattgatcattctatttttcagtcagcattctcaccaccaaatggcacctatcccctttaccctgtgttccttatgctttttgccataactcttattgtcctccaataaactgtgtaatctatcatatccatctccccttgctagaatataagctccatgagggtgggataatttggttttttgctcaataacaattgtcccatttatgtctttatcttctaagactattcatcttcaaataagacataaataaggttttattatagcaatatgctataatttttaagtgacaactcaagcacttgttttaaaagtatgcattttttctaaatgctttataaaagcaaagtcttttctaaggaccatataattatggtctctatatacacaacttatatacaatttagagagaagtcacagcccccagtgccctggaagaacatcgtagctgcaaaaaatgaagaatctgattctgaaatgccagtcctggagaaggtgttctcagggtggcaaactgcagtccaaacacactccaggtccctgggtctggccacacattctctaagaagtcagcacttgcctggactgggcacttgtggctagaagggtatgcactacttgctaatttctaaaacctcaaaccttaattttcccccatcttaaaatgggaatcagcttctggaaaagctaataactgtttacaattgtcagacttctaaaaagtgctaatttgttcccttaacagagcaaatgatgagagacaccattttcctgcagattaaaaacaatatataaacatatgattcaacgatgtcaacagctttcagtctatgaatcttgtccaggtcactttgggtcacttggttctttcatcagaacatgttcaagatttctgacattcctttttccgaactttcgattttggtgcatttggattttcttgtttgtagaaggtctttaacatttccactgcttcctcagcccgatatccagggatacagtgggatgagagcagtggttctcaaccattgctgctcaggagaaccagttggaactctctggaaacacagcactgttggccccctgccttctgattcagatggtctggggcagggactgagcagagtcaggcacagaagcctccaggtgattctaacgggcagtccgggatgagaactgctgagttacaggcctcgaaggaaactgcaccgccctgaaatggtctcccagtgtttggtaggtcagcagaggcaatatttagaacagagccncaaccnccnnngtccnnngnanngncgacggtaaaagtaagagaagnccgctct

SEQ ID NO: 64134 - DNA, 1300 bp, Homo sapiens
gagtacattagtccagtgcggtggaattcgcgcggcgtcaagtgcgtgctggtcggcgacggcgcggtgggcaagacgagcctggtggtgagctacaccaccaacggctaccccaccgagtacatccctactgccttcgacaacttctccgcggtggtgtctgtggatgggcggcccgtgagactccaactctgtgacactgccggacaggatgaatttgacaagctgaggcctctctgctacaccaacacagacatcttcctgctctgcttcagtgtcgtgagcccctcatccttccagaacgtcagtgagaaatgggtgccggagattcgatgccactgtcccaaagcccccatcatcctagttggaacgcagtcggatctcagagaagatgtcaaagtcctcattgagttggacaaatgcaaagaaaagccagtgcctgaagaggcggctaagctgtgcgccgaggaaatcaaagccgcctcctacatcgagtgttcagccttgactcaaaaaaacctcaaagaggtctttgatgcagccatcgtcgctggcattcaatactcggacactcagcaacagccaaagaagtctaaaagcaggactccagataaaatgaaaaacctctccaagtcctggtggaagaagtactgctgtttcgtatgatgctggcaagacacccagaaaggctattttcagatgaaatcgatattagaagctatattagctgaaacaactccttttactgcgtagaacctatatcgagagtgtgtgtatatgtattataggaggagctctcaattttatgtattctttctgcctttaattttcttgtttgtttgagcttagggatgagatacttatgcaagatatttttgaagtaaattaaacatttttcacatctctggaaatttagagttctagacctctggttaatttatatctaatatgaagaagacacctctaatctggatgttaagaatgaagttctgctacattataatgtacagaagagcaaaagggaggaacactatggttaaccctctcttgattaagggctacttaatgcacagtgcattatgtacacaggtcaaccatggtaacaatagttcttagctttgaaactccatgcaaaccatgccttttttttaaggagcaaaaatctgagaaaaaaagtgagagacctctgcctacaaaacttcaaaccagtcacttttgtcaattgcttaattacccagttacttatgatttaaaaacaaccaacagaaaacatcccacagactgtatggcactctgtagt

SEQ ID NO: 64135 - DNA, 790 bp, Homo sapiens
ggaattcggacgagctccaagagggcctgagacggagcaatgaggactgtgccaagcagatgcaggtgctcctggcccaggtccagaactcagagcagctgctgcggaccctgcaagggaccgtgagccaggcccaggagcgggtgcagctgcagatggcggagctggtcaccacccacaagtgcctgcaccatgaggtaaagcggttgaatgaggaaaaccaagggctccgggccgagcagctgccatcctcagccccccagggctcgcagcaggagcagggcgaggaggaatcactgcccagctctgtgccagagctgcagcagctgctgtgctgcacgcggcaagaggcgagggcccggctgcaggcccaggagcacggggccgagcgcctgcggatcgagatcgtgacgctgcgggaggctctggaggaggagacagtggccagggccagcctggaggggcagctgagggtgcagcgggaggagacagaggtgctggaggcctccctgtgcagcctgaggacagagatggagcgggtgcagcaggaacagagcaaggcccagctcccagacctcctctcagaacagagggccaaggtgctgcggctgcaggcagagctggagaccagtgagcaggtgcagagggatttcgtgcgacaggcagctgccttctggtctgcatgacactaagacgcttgtccacagcggcgacccaggcctccaagcttgcacagaggcaaggccagacttttccgtcgtttattttcaataaataagcagctcagcgc

SEQ ID NO: 64136 - DNA, 2007 bp, Homo sapiens
atggcgttctggggttggcgcgccgcggcagccctccggctgtggggccgggtagttgaacgggtcgaggccgggggaggcgtggggccgtttcaggcctgcggctgtcggctggtgcttggcggcagggacgatgtgagtgcggggctgagaggcagccatggggcccgcggtgagcccttggacccggcgcgccccttgcagaggcctcccagacccgaggtgcccagggcattccggaggcagccgagggcagcagctcccagtttcttcttttcgagtattaaaggtggaagaaggtccatatctttttctgtgggtgcttcaagtgttgttggaagtggaggcagcagtgacaaggggaagctttccctgcaggatgtagctgagctgattcgggccagagcctgccagagggtggtggtcatggtgggggccggcatcagcacacccagtggcattccagacttcagatcgccggggagtggcctgtacagcaacctccagcagtacgatctcccgtaccccgaggccatttttgaactcccattcttctttcacaaccccaagccctttttcactttggccaaggagctgtaccctggaaactacaagcccaacgtcactcactactttctccggctgcttcatgacaaggggctgcttctgcggctctacacgcagaacatcgatgggcttgagagagtgtcgggcatccctgcctcaaagctggttgaagctcatggaacctttgcctctgccacctgcacagtctgccaaagacccttcccaggggaggacattcgggctgacgtgatggcagacagggttccccgctgcccggtctgcaccggcgttgtgaagcccgacattgtgttctttggggagccgctgccccagaggttcttgctgcatgtggttgatttccccatggcagatctgctgctcatccttgggacctccctggaggtggagccttttgccagcttgaccgaggccgtgcggagctcagttccccgactgctcatcaaccgggacttggtggggcccttggcttggcatcctcgcagcagggacgtggcccagctgggggacgtggttcatggcgtggaaagcctagtggagcttctgggctggacagaagagatgcgggaccttgtgcagcgggaaactgggaagcttgatggaccagacaaataggatgatggctgcccccacacaataaatggtaacataggagacatccacatcccaattctgacaagacctcatgcctgaagacagcttgggcaggtgaaaccagaatatgtgaactgagtggacacccgaggctgccactggaatgtcttctcaggccatgagctgcagtgactggtagggctgtgtttacagtcagggccaccccgtcacatatacaaaggagctgcctgcctgtttgctgtgttgaactcttcactctgctgaagctcctaatggaaaaagctttcttctgactgtgaccctcttgaactgaatcagaccaactggaatcccagaccgagtctgctttctgtgcctagttgaacggcaagctcggcatctgttggttacaagatccagacttgggctgagcggtccccagccctcttcatgttccgaagtgtagtcttgaggccctggtgccgcacttctagcatgttggtctcctttagtggggctatttttaatgagagaaaatctgttctttccagcatgaaatacatttagtctcctcaaagggactgcaggtgttgacatgagttggaaagggaaccctgggatacgtggcgtcccctctattggaacagtctgaggactgaaggcatttgtccctggatttattggagacggcccagctcctccctctgaaggtggtcacattctgttgactctccatactcagcctctcctccagaaacagatctgttccagaacattccagcactttctatctaaaatccttgtccccacactacgcccccctgtatt

SEQ ID NO: 64137 - DNA, 1420 bp, Homo sapiens
ccagatgctctggctgtggaaagtaagccaagtcgtaagagcgtatgcatcaaccctctgatgtcccccaagcttgccctgcaagtggatgcagatgggtttcctgttaagcccaagagtactgaaggaatgaagggaaggaaggggaagcaggtgtctgaaatcttgcctaaagcagaagttcagagtaaacgcaagagaacagaaggcagcagccctccagatagtaagaacaaggggcctacggtgaaagccagcaaagaaaagcatgctgatggagccaccaaaacccctgctgccaagaggccagctgcaagggacagaagcagccaaccccccaaaaagacgtctttgaaagagaataaagtgaagatccctaaaaagtccgctgggaagagctgccctccctccaggaaagaaaaagagaatacaaacaaaaggccttcccagtctattgcctcggaaacactgacgaaacctgcaaaacagaagggggccggtgaatcctcttcaaggcctcagaaagccacgaataggaagcagagtagtggaaagactcgggccagaccctcaacgaaaaccccagagagcagtgcagctcagagaaagcgaaagctgaaggcaaagctggactgttcgcacggcaaacggaggcggctggatgcaaagtgattggaaagatggtagccaagagtaaaactgttctatagaagtaaccttttattttgcattaactaaatctgcttttataagcttatcaagcctttcaaatttacagttaatggagaacaccgtaatttgagatgtcagaaaatgcatctcagatggagaagggaacttgcagagtccttctctgaggctaagggaagttatatattatattctggttgttccttgggttttaaacttggaaccaagcagttttcgtttttaaaagtacagggccttatttatcctttttgtttttaaatttacaaaagctaaaaagctgatctatgtgattaaaggcttgtattttatacttgatgcacaagcacttgtactgtagccgagaagaccaccatcatgcacataaaaggagcttttcagcagccaccctgcagcatctgcccacgaacagatgcccttctttgcaaaaccccagcagtgaacttccctctctgtcttgtttgtttgtttagatgatgtttgaaagctaaaccaaatcattttatggtatgcagaggatttataattataaaagattactatttctgttacccccttttaaaaaagatcatgttcattgttggtccctcctctcacctttgatgttttgtcatttgagagcatgtattctaaattatgtgcccatgggacaagagatatgtcacaagtgttaatttttgtttacaaactctaaaaaatcatttgcatcccc

SEQ ID NO: 64138 - DNA, 1615 bp, Homo sapiens
tttactgagaccctaggtagagcggcggaattccgcgcactgcctcaagcgctgcaagcagggcctgccagccttccgccagtcccagcccagccgcgaggtgctggcggacttccagcgccgcgagccctacaagttcctgcagttcgcttacttcaaggcaaataatctccccaaagccatcgccgctgctcacacctttctactgaagcatcctgatgacgaaatgatgaagaggaacatggcatattataagagcctgcctggtgccgaggactacattaaagacctggaaaccaagtcatatgaaagcctgttcatccgagcagtgcgggcatacaacggtgagaactggagaacatccatcacagacatggagctggcccttcccgacttcttcaaagccttttacgagtgtctcgcagcctgcgagggttccagggagatcaaggacttcaaggatttctacctttccatagcagatcattatgtagaagttctggaatgcaaaatacagtgtgaagagaacctcaccccagttataggaggctatccggttgagaaatttgtggctaccatgtatcattacttgcagtttgcctattataagttgaacgacctgaagaatgcagccccctgtgcagtcagctatctgctctttgatcagaatgacaaggtcatgcagcagaacctggtgtattaccagtaccacagggacacttggggcctctcggatgagcacttccagcccagacctgaagcagttcagttctttaatgtgaccacactccagaaggagctgtatgactttgctaaggaaaatataatggatgatgatgagggagaagttgtggaatatgtggatgacctcttggaactggaggagaccagctagcccacagcaaccaaagagacttcctcttggcgttcaggaaacacagattctttgtccttttcccaacagcccaggctgttgatacctcagagccttctctttactctccaaagtgaaagggaagcccccgtctctctaactgcatgtcatcaggggtgagcctgcctttcctatcttcacacctgccacctcatgttcacacctatctttctcaccttttttttgagatggagtctcgctctcttgcccaggctggagtgcaatggcacgttctcagctcactgcaacctccgcctcttgggttcaagcaattctgctgcatcagcctcccgagtacctgggattacaggcatgtgccaccacgcccggctaattttgtatttttagtagagacggggttttgccatgttggccaggctggtctcgaactcttgacttcagatgatccatctgccttggcctcccacagtgctgggattacaggcgtgagccaccatgcccggcctctttctcacctttacacctgtcttcttatcctcacatctgttttcacaccttcatccctgtcttcctcatgttcacacttgtcttccccatgttcatagctgcctttcttaccattttggtttgaagggcagtcttctctggcttgtttttttgtttttcccagaaaatcagtattattttttaaataagaaaaacattcctagaaaaaaaaaa

SEQ ID NO: 64139 - DNA, 2206 bp, Homo sapiens
ttttttttttttgtattcaatcgaaatatatttgtctaatatctacaaagtgtgaacaactggtcttaagaaagcagacaaaaggcacaaaattagtattactacagagaagcattcatgctatttggatttgataaatattggagtggcacagtaaaaaataaattaagcattcagcaaaaaccagatatttcattttttccttgctttgtattttcgtcactcctttgacctcatgtgtaaaggctaaaaactgaaatttaactgaaaccatggaatatttatgcaggcgttatgtatgttttagtcacagtgctttcttgcagagtttgggttaaccagagaggtgcacttgaggaaaaaataatccacaggaaattctcttctctttccccaaactaaatacaagattgaggctgtggttgtgcatgttttcatgtgcatgcatgtatttaacttctaaagccctttttcatcacaaaagaagtctccatatgattgactggttttctgatgtaaaagaagcaacttctcaaaaatgaatgactagcgctgtgaccatgagagacgggtggaaaactccttggtgggccttggctcttagttgtcccagaggtgctccatcctgcaaggctctggcataaatctttaacagcttcctgccaacccccatccagcaggaaatacttgcttatctttcttgggcgcggacagacaaaacactgaggtggggagggaggtgagaatcacaataattttgaaatgataaccacccatacttctaccaggaatgagccactttctcccttatggacagtgatcgggccatgccagttcaccttcattttgacaggagttgactaagtgagaatatctttgtgagtgtaaaacatttttggcaaagtgaaaaatagaaaaacttcaaacttcattgataaaaaggagcttatgattacccactttaaccttggtgagtgcagtatttaaatgtgtaatcatactcagatgtttacatagtgcatgtgtgtgaacgtatacggtgtgtacacacacgtgccccgaatggctcttgaataaattcattcctctagcagagtgtgggggtgcacttttcatagtatataatttctctctctctcatcatttcttggatgctaatacaaggtctcagtgaatgccaacaaaaccctgatactctactactttaatattcctacaaaaacagggctatactggaaagctctgcacctccaaccccatcagtgtgctttccagaggggattgaagtatacccgagccatcgccctcctggataaaatatttgggcttccatggtgtgcggaggttctcgcgcttccgttcctccacccgttgcttctcctccaggtgccgcttctgctcggtggctgcgtcaatgtcccccagccgcaggtatcgggtcacctcccgccagaggttcctggactccatgggtccctgcttctcaagaggtctgatcttcttgggatacactggcagtgtggttgtgtcgatgactttggtttctccattgttgtaggtgaactctaaagtaccattccattccccatgggctttacaaacaatggtgttggttgggttgtgcttcacttctgcggtaaccctgtggactttccctccatagaaaggcttcgtgtggaatatcactgtcgctgagtacccagtcttggcacagttgatgctgacttttcctccgagctccacccacgggatggtgagaatggaccgggcgtaggcactaggcagggtgaatacgtactcctccccgtgttccaggagcctcaacacaccttcccctatcatagagacccccacggacatgcccatgaacttgcttttggtccatacatgagtgttgacgcacagtctcttctcctcgcactcacagtagaagcaggagatgggtgggtgatgggacacttgctcagccacaaaccttagtttgtagcttttggaagggtcatcggccattgggtgttcgtgacagctggcaggagagcgggaagcagtcctcttaggcttgaccctgtccttgggaacttcccaggagcagtgaaatgtctcgcctatgatggggttgtagggcttcttggctaaagcgcccttgcggccctcgtgaaaggctgtgagataatactcaacgaagcaaatgactctctcctctggt

SEQ ID NO: 64140 - DNA, 804 bp, Homo sapiens
gggccaggtctcgggcctaaggggggtgcctaagcccctcagtggaggctccagctgccctctcgcccacggctacccagctgacccgcgacctgctgcggagccgtggcattgccggtctctacaagggactcggggccacgctgctcagggatgtccccttctctgtggtgtacttcccgctctttgccaacctgaaccagctgggccgcccggcgtccgaggagaagtcgcctttctacgtgtccttcctggccggctgtgtggctgggagtgccgccgctgtggccgtcaacccctgtgatgtggtgaagacgcggctccagtcacttcagcgaggcgtgaacgaggacacctactctgggatcctggactgtgccaggaagatcctgcggcacgagggcccctcggccttcctgaagggcgcctactgccgcgcgctggtcatcgcgccccttttcggcatcgcacaggtggtctacttcctgggcatcgcggagtccctgctggggctgctgcaggacccccaggcctgagcccagcacccgctccaccccagccagctgggcagggccggtgtggggctggagccaggcagctagcccaggacggagcaagggaagacccctccccagccctcccgtcggcaggggcagcagggggcagggtgcagggtccacataggtggtgcacacgcaagccccccggggtgctgcctgcaccgttgggatcaatgtctcatttatgtagaaaatgcagaaatctttacattcctcaagctagcccctgccccaatcctgccct

SEQ ID NO: 64141 - DNA, 1342 bp, Homo sapiens
  misc_feature (1)...(1342): n = a,t,c or g
gggtcacctgcaactgcacggatggccgggtggcccccagctgtctgacctgcgtcggccactgcagcaatggcggctcctgtaccatgaacagcaaaatgatgcctgagtgccagtgcccaccccacatgacagggccccggtgtgaggagcacgtcttcagccagcagcagccaggacatatagcctccatcctaatccctcnnnnnnnnnnnnnnnnnnnngttctggtggccggagtggtattctggtataagcggcgagtccaaggggctaagggcttccagcaccaacggatgaccaacggggccatgaacgtggagattggaaaccccacctacaagatgtacgaaggcggagagcctgatgatgtgggaggcctactggacgctgactttgccctggaccctgacaagcccaccaacttcaccaaccccgtgtatgccacactctacatggggggccatggcagtcgccactccctggccagcacggacgagaagcgagaactcctgggccggggccctgaggacgagataggggaccccttggcatagggccctgccccgtcggactgcccccagaaagcctcctgccccctgccagtgaagtccttcagtgagcccctccccagccagcccttccctggccccgccggatgtataaatgtaaaaatgaaggaattacattttatatgtgagcgagcaagccggcaagcgagcacagtattatttctccatcccctccctgcctgctccttggcacccccatgctgccttcagggagacaggcagggagggcttggggctgcacctcctaccctcccaccagaacgcaccccactgggagagctggtggtgcagccttcccctccctgtataagacactttgccaaggctctcccctctcgccccatccctgcttgcccgctcccacagcttcctgagggctaattctgggaagggagagttctttgctgcccctgtctggaagacgtggctctgggtgaggtaggcgggaaaggatggagtgttttagttcttgggggaggccaccccaaaccccagccccaactccaggggcacctatgagatggccatgctcaacccccctcccagacaggccctccctgtctccagggcccccaccgaggttcccagggctggagacttcctctggtaaacattcctccagcctcccctcccctggggacgccaaggaggtgggccacacccaggaagggaaagcgggcagccccgttttggggacgtgaacgttttaataatttttgctgaattcctttacaactaaataacacagatattgttataaataaaattgt

SEQ ID NO: 64142 - DNA, 1235 bp, Homo sapiens
ggccatcatctccggcatgaacatgagccctgtctccaggctgaagaagacctgggccaaagtgaggacggccaagtttttcatcctcgagcaccagatggacccaacggggaatttctgcaactacaggacagccctgcgcggggcggcccaccgctccctgacggcccacagcagccgagagaagattgtcattcctttcttcagcctgctcatcaaagacatctacttcctgaatgagggctgcgccaaccgccttcccaatggacacgtcaactttgagaaattcctggagctggccaagcaggtgggggagttcatcacctggaaacaagtggagtgtcccttcgagcaagacgccagcatcacccactacctgtacaccgcccccatcttcagtgaggatggtctttatttggcttcttatgaaagtgagagcccagagaaccaaacagaaaaagaaagatggaaagctctaagatcttctattttggggaagacatgaaagcgctgagctgagggacgaggaagagctggagcccgcagaagccgtccacagccctgcctcagtggcccagtgggcagaggccagggagtgcctcactattttgcaaatgccgaccctgtggcctgctgcccgccccccccccccccacaggggccatacgggcacaggaaaccttttatgggactttggccctggcaggacccagggcctccaaacgtgcgggcggcacatgccttggggacatcctgccttcaggaccggggggcctggtcagtctgtccatcctcggcaaggacacaacactgccccaaagggggggaccactgcaagctcgagaccttgcttggtgacatgtgccactttggccaccacccacagtctgtcaccacgtggcttgggaacttctggagccacagcaggcatcacggtgcgacgtgagatgcctgcgccagccccgagcccactggcagccactgccattccacccatggtccctcaccctgccctgccgacgagcttgtctctgcagccccaggtacccccttcctggatgctgctggccccaggagatagctttccggtgacagctgtggaacgcgtcagcaggacaaactggacacatggagttacagtgtgtacacggcagtcccgccacccagcccccttgtaaactctagtcactataaacacacccgtacgcctatccatgtccaccccaaaaaaaaaa

SEQ ID NO: 64143 - DNA, 682 bp, Homo sapiens
  misc_feature (1)...(682): n = a,t,c or g
cccatcggaacactattcagtgtggcggaattcctcgtggaacatcagagaagccacactggagagaagccctatgaatgcaatgactgtggcaaagttttcagccaaagcacacacctcatccagcaccagagaatccacacaggagagaagccctacaagtgcagcgagtgtgggaaggccttccacaacagttccagactcatccaccaccagaggctgcaccacggagagaaaccctacagatgcagcgattgcaagaaagccttcagccagagcacgtacttgattcagcaccggaggatccacaccggggagaagccctacaagtgcagcgagtgtgggaaggccttccggcacagttccaacatgtgtcagcatcagcggattcacctccgggaggacttctccatgtaacagtggcgcggtgtccgagggcagagtccagctgagcacttcctgcatgcgcccccggcacctgactctgccctttatgtattatccacacgatgttttcacagagtgaaaggacgtttctcattaaacaaacctcttttcttaaatcaaaagcagtgcatgttcattntagagaaattgagacaganaagtgggcaaaaaagaagcttctgtgatctctcccacttagaaaaaaaattcattgctgctgatttacgaatatttt

SEQ ID NO: 64144 - DNA, 697 bp, Homo sapiens
ttttttttttttaaaactaaaacatttggaggtaaagaatgtttctccttttgctttaggaagtgactaggtttctagaaatgctgtcgctttttttttttcctacctcaggacagcctttgtcactgaggatttctagggttagggcttcacaggaagcgtctccttgaacccagagtggttgggttgggcttctggcagtgccaccgagtactcagttgtggcaaaaagcagggtgtccagggtggtctcagtacacttggcgatgaagcgaatgaaaggcctcacgtcgccctcgttggcagcttccaacacgtggtagtagtcggaccgctgctccttgcggatggtgatgggcgggtagcccgcctgcatgaggatgaggttcatgagcagacgggaggtcctcccgttgccatcaatgaaagggtggatgtaaacgagtttataatgggctaaggctgcaaactccactgggtgcaggttcatggcttcctcggagttgagccactgtacaaactcctgcatctgcttttccacatcctgcggatggggagggatgtggtgtccgaccaggacctgtgttgtccgaaacctgccggcttccacggggtccacgtagcccagcacccgcctgtggatctccagcacgtcgctgatggtgacggagccgatgcgcgaaaccagagtcgtgttg

SEQ ID NO: 64145 - DNA, 2084 bp, Homo sapiens
gcgaggcggggccgccggggccgccatggagcccgactcggtgattgaggacaagaccatcgagctcatgtgttctgtgccaaggtctttgtggctaggctgcgccaacctggtagagagcatgtgcgcactgagttgcctgcagagcatgcccagtgtcagatgtctccagataagtaatggaacatcatctgtgatcgtctccagaaagaggccatcagaaggaaactatcaaaaagaaaaagacttgtgtattaaatattttgaccagtggtctgaatcagatcaagtggaatttgtggaacatcttatttcacgaatgtgtcattatcagcatggacatattaactcttacctgaagcccatgttgcagcgggactttattaccgctttaccagagcaaggcttagatcacatagcagaaaacattctttcgtacctggatgccaggtctctgtgtgcagcagagctggtatgtaaagaatggcagcgagtgatctcagaaggaatgctttggaagaagctgattgaacgaatggtacgcactgatcccctatggaaaggactttcagaaagaagagggtgggatcagtacctgtttaaaaacagacccacagatggccctccaaattcattttataggtcattatacccaaagattatccaggatatagagactatagaatctaactggcggtgtggacgacacaacttgcagaggattcagtgccgctctgaaaatagtaaaggtgtctactgtttacagtacgatgatgaaaaaattatcagtggcctacgagataattctattaagatatgggataaaaccagcctggaatgtttgaaagtgttaacaggacacacaggctctgtcctctgtctgcagtatgatgagcgtgtcattgtaactggctcttcagattctacggtgagagtgtgggatgtgaacacgggtgaagttcttaacacattgatccaccacaatgaggctgtattgcacttacgcttcagcaatggactgatggtgacctgttccaaggaccgctccattgctgtgtgggacatggcttctgcgaccgacatcactttacgccgtgtcctggttggccaccgggctgccgtcaatgtagtagactttgacgacaagtacatcgtgtctgcctctggtgacaggaccatcaaagtctggagcacgagcacctgtgaatttgttcgtactctcaatgggcacaagcggggcattgcctgtctccagtacagggatcgcctggttgttagtggatcatcagataataccattaggctctgggatattgaatgtggtgcctgtttaagagtcctagagggacatgaagaattggtccgatgcatccggtttgataacaagaggattgtcagtggggcctatgatgggaaaattaaagtttgggacttgcaagctgctcttgaccctcgagccccagcaagcacattgtgtttgcgcacattggtggaacattctggacgtgtgtttcggctccagtttgatgagtttcagatcatcagcagctcccatgatgacactattttgatttgggatttcttaaatgtgcctcccagtgcccagaatgagacccgttctccctccagaacatacacttacatctctagataacagtctgcactttcacccgtttcagggttttctagtcttgaactactgggtacggggctaccaaatgcctaagggagttcgttcacagctgagttatgaagctggaattggttctagacgctgggtagatgcaaagcagcctaactcttcaagtaccgacatttctcacctctgattccggctctcctttgagaaggagaccttagcttccccggcttcaagtagaacagaagcccgtttccttccctcatcagagaaaaaatctaatgtttcaaatgtaaattgttcatagaaaaggaacatagaatctgttttacagaagtaaatcgaccgtcaggagaagacttggcctctaatttatattgctttgcactttggtttgatattaagaaacagcattcttcttcagtgaaattttggggtgccaaac

SEQ ID NO: 64146 - DNA, 904 bp, Homo sapiens
accattagtccagtgcggtggaattcgcagcacctaccctcctgaaatagtggttcctaaatctgttaccttgggaacggtggttggaagttcaaagttcagaagtaaagaacgtgtccctgtgctctcctacctctacaaagagaacaatgctgccatttgccgctgtagccagcctctctctggattttacactcgctgtgtagatgatgagctcttgttggaggccattagccaaacaaacccagggagccagtttatgtatgttgtagacacaagaccaaagttgaatgccatggccaaccgagcagctgggaaggggtatgaaaatgaagacaactatgccaacattcgcttcagattcatgggcattgagaacatccatgtaatgcggagcagtctgcagaaactcttggaagtttgtgaattgaaaactccaacaatgagtgaatttcttagcggcctggagagctcagggtggttaagacacattaaagctattatggatgctggaattttcattacaaaggcagtgaaggtagaaaaggccagtgtcttagtccattgttctgatggatgggaccgcacagcacaagtctgctcagtggctagcatcctcctagatccattttataggacattcaaaggactcatgatcttgatagagaaggaatggatatccatgggccacaagttttcccaaaggtgtggccacctcgatggggactctaaagaagtgtcccctatcttcacccagttcctagactgtatctggcaattaatggaacagtttccctgtgcctttgagtttaatgaaaacttcctgctggagattcatgaccatgttttctcctgccagtttggaaacttccttggtaactgccagaaggatcgggaagatcta

SEQ ID NO: 64147 - DNA, 1417 bp, Homo sapiens
tttcgtgggcgagccgtgaagatggcggcagtggtggaggtggaggttggaggtggtgctgctggggaacgggagctggatgaggttgatatgtcagatctctctccagaagagcaatggagggtcgagcacgcacgcatgcatgccaagcaccgtggccatgaagctatgcatgctgaaatggtcctcatcctcatcgcaaccttggtggtggcccagctgctcctggtgcagtggaagcagaggcacccacgctcctacaatatggtgaccctctttcagatgtgggttgttcccctctatttcacagtgaagctgcactggtggaggttcctagtgatctggatcttgttctctgctgtcacagcctttgttaccttccgagccacccgaaaacctctagtacagacaaccccaaggttggtttataagtggttcctgctaatctataaaatcagctatgccactggcattgttggctacatggctgtcatgtttaccctctttggtcttaacttattattcaagatcaaaccagaagatgccatggactttggcatctcccttctcttctatggcctctactatggagttctggaacgggactttgcagaaatgtgtgcagactacatggcatctaccatagggttctacagcgagtcgggcatgcctaccaaacatctttcagacagtgtgtgtgctgtgtgtgggcagcagatctttgtggacgtcagtgaagaggggatcattgagaacacgtataggctgtcctgcaatcatgtcttccacgagttctgcatccgtggctggtgcatcgtgggaaagaagcaaacgtgtccctactgcaaagagaaggtagacctcaagaggatgttcagcaatccctgggagaggcctcacgtcatgtatgggcaactgctggactggcttcgatacttggtagcctggcagcctgtcatcattggtgtagtccaaggcatcaactacatcctgggcctggaatagtgatgaagagcatcagtggaaaacccaccccacacgccatggacctcagggcactctcctccctgcccacaaagacctcctgggtgggaaagactcaaaggggcgcttgggccactcaggacccctccggctgtgtcggactggggagggatatgatggagagccagccagtggggctgtcagcagtggggggctttttaaaagaaaactattttgatgaatatatttaaaaaacctttttttattgtggagcataggaattgcccccctccaggcttcaccctccctgcctaagcagggtgggggcagagccatgacatttttggtttaaaggagccttctcatctctggccgagaacactgctgggctcccaggtagctgaaggcctcagcccacccactcccttcttcc

SEQ ID NO: 64148 - DNA, 1561 bp, Homo sapiens
  misc_feature (1)...(1561): n = a,t,c or g
tcatataagaaaaggnaaataatatcaattttcagtactattatttagcactagagcccctccagttagaaaaacaattcttttaaatgtctttatgatttgaggtttcaataataactcatgaataggtgaaagtttgctatttatttagtcttagaaaaacactgaaagaaaaaggcaggaaatgtagtacgcagtgtggaagaatggagctggccacatgtagttttagcagctgcagaggaaactggctgagtctaaggttacatatttctgctcagtaagggtatccatggtgataactctcatgatgacggtagtcatcctggtaaccatcctggtatccttggtggtaactatggtaaccatagcctgcatactcatcttctgggcagcgcatccccagtgactgctgaatcgccatttcctgtctccgaagttgcatcgaatcaattaaatcgtacacaatcaccatggaccacattggggaaggataccaggatttgacatttccgtcttttccgactagaagcatggagaagtactccgggctcacttgaaaatagttacgaatgtctttcaccaaatgggctggtacgtcttctcgctcaacaacagagctcccattaattgggaacagttctaacactcccccaacttcctctccaacgcctaaaagcttcagaatggttatgtggcgcagaccaaaattgcacgcctgaccactgagggcagagagctgctgtgaataggcccagtcttcatcgttaggagcagagatcaccagcaacctcctcctccaccggaacctggataggaagttctccagggactgctttttgtcctctttgcaaacaatgccctccttcttctgcttctccatatctttgattcgggactggaaagtatcgatcagatcaaacacagacttcattgttattggtacctcatagtattgcttgactctcagatccacatctgttagcaccatgaagaagtcattgtaggtcattccgtactctttcctcagctcgctgatgagacgctggtctaccaagtcttcatcatccaccactcgcatgggcttctcattatctagctgaaagtggtcgattttcatggtgctgttgttgacagggccgaagatggtgatcacagagattttcctggtagccatcttgcagaaactttccagatattcatcacgttgttgcacatacatattgttctcagccttgggagcagtgatcagaaggagtcttcgtttgccttcaaaggaccccagcaggtcggccactgacttcttgggactctgcgtgaagtgtttgttggtgggtttctgatagccatcctgttctgttttacctccttttttcttcttgctcttctctttctcttgcttgctctttttctcagacttcttcatttgcttttcactcttaagtaacttgtctgcgttctcattcttcatcttttttttcttctccttctctggtttcaaaagcttttcatgctttttagactcctttgcttttttaaggggaacattccccacctgcag

SEQ ID NO: 64149 - DNA, 3452 bp, Homo sapiens
ttttttttttttaattagaaacaactattttattcagaaaagtataaacagttagcaattagaatcttcttatatacagacataacttgcagaaggttaagtctgaggacgctgttctgggtaatttttacagtcctttttagctctaagatccatgacactgcatttttatggccaaagggcaatcaattatgcacctggttgtctcaataggcagtaaaacctaatataaataaatgacaaatcatctgccataaaaaaatacgaaaaacttttgaaatgttaatttcaactccaatgaaacaaatacctaattaaaacaattatttattccctgctagaatataaagggaacaacaagcttgagctgcaaggctcaagctttgagagcacagaaagatttttaaactaataatgcattttaagtccaagaaatggagccagcccataatctcatgttggaattccctcaggcaaagctggaaaccccctcctgatattatttgcaatgcgattttttgttatttgggatttttaaaatgaccccaacttttctgtgcttagtttaggagtcccttaaaggaaaaagttgaaaaaaaaaaagatcccacatttcagttctaagtcaacgttagaatcaacttctccctctttttcctcttcctcttcttctcttccaagtggctagtagcatcagcaaaaaacataacttcactttttgcctcgcattccctcttgagataatcaagaccagccatattgaagccgataacatcccggacttggctgacttttgaaatagttgtttcccttaatttttctatcactggcacaagcatttgattgctagtgatctgtccaaagtgaatcctaaggaggaagaagaggcaccggcatataagttcaacatcagagcccagctgaatgaattcgttaaagagtttaagaatgtctgggacataagagaaaggcagcacaagtagagattcttccagctcactcgacttgatccctttaaaaatctctaatacataagctgaaggtgagatactgccataagccattaggatggggttgctgggaagtggaacctctttccctgcagctttacaaatggctttgtgttccttcatttttgcagtttcttctcggtacaactcaatagcctccataatcctctcagctgctttcactgtttcaatagttttctttccagtaaagtaactgtcaccttgagtctctcctggaactgctggttggtcttctttggccacactctcctcatattctgcttctctttccatctccctttcttcctcaagaataagaggctcccttgttctctcccaaagtctcagagatttgtcatgggacgatgatacaacatagtctccactggggcttacagccaaacaccatatttcctggtgatgaccctccagagtctgtatgtgttcaaatttgtctgcatcccactgtttaatcttatgatcttttccggcagtgaagaagaggtgagacttgggtacaaactgtaggtacatcacactgtcatcatgtgcaaagagagacttgtggcagtccccaaagtccaaaccccagattttcacattcctatcagcggagccagttgctatgagtgctccatcatgagagatgtccatgcatataacaggcagtttgtgtccatacagtgacagaaaaaactttaaagtatcaacgtagaaaattttcacagtacagtccagcaaagacacagccaatagcttttgattgggagagtaactgacacacagaacatcttcatctagttgcaaagttcgggtttgcttcacagaaagtctcttttgggtactattttcatctttcactaactcaaaatcccagaatttgacagatttatctgcaccacctgtcacaaagccacgctgatctggagagagggacatggaccacaaagctccatcatgtgcatctattgtctccagcagattccctgaagccaagtcataaagctgcagcttccctgtctttgttcctatgactacctgtctatcaccaggtacaaagaatgagcaaagtgcatattcacaggtcattgtgcgaatacactgcagtgtagacctgttccatattttaatggaatcagctgcagctgaaagaacagcaatattgtctgagctgaatgacaaagtccgcacatcactgcgatgacccccaatagtgattctgcttgtcctgacaggctgaggagtaggcaaggatggattcagtgaatacaattccaccaggttgttctgcagcaggaagacagcctttaactctccgtgaggtgaatgaatcaagtcaaaggacttgattttggcagaagtttttatattagtcacccgctggatttcatcttgcagactcatttcaacattaacctcaggatcttcctcctctcctttgctagaatgtaattttgctttctttctagctttcttcatcttcttatccattttcttctgaatttcctttttggaaaggatacaaaacaattctagcacagagtcagttccatggcaagcaagaatcctgcctgtcttgtcgactgcaaggtttacaactctgtctcttccttcccgcattatggaaccagcttttctgcatgaaaggattcgatcctcaggggcttcatccgtctcaaaggcaccatcctctgcctcaagagtatcttgtattccaggagaagatcctttgattttcttggggtctggttcttccgggtcttcaatctcttgcagataagctatgtcccataccctcagttcactgtctgaggccccagtgatgagtcgcttttcttctgacaacagaaccaacccccatacctcagtccggtggccaaccattgttttaaagcagtgctgagtatcaaggtcccaccatttcaccatggtatctttcccactagtaactagcaggttcttttctcgtagaaacaatgcttgtgtgatggcatccttgtgcccctttagacggtacagaccactttcattgatcacatcccatacaataatatctgtgtccttggacccagatgccagtctgcctcctagctgatcatacttcaaggtagtgatagctgctttgtgaccattgaaggtcacatttccttccccactcaggagactgaagattcggatcgacccatcctcatacccaacagctaagtgtagcccatctggggaggggcataagcaagtaacttcttgtttaagcccctgaaggataagaatcttctctcctttccttaagtcccagatgaaaacgtgttcacaagctggtactgccacataacgtcctttctcaccacgaagtgtcacaaagacaatattacctttttggctgccgataacgccaaagaccgcactagcaacatagcgtaggtactgcttggtgagccccat

SEQ ID NO: 64150 - DNA, 1491 bp, Homo sapiens
ttttttttttttttaacaactatcctattttaaagtttcagttagataaattatgtttcaaaaatctttacataaaaacctctaatctaccactcataaatcataaaatgtaactggtagtatatttatttttttacccaatcacattttagactcataataaaaatctactacttagagaaaataaatttgacaatttattcaaacattgttacataagaagttttaaagaaactgtaaataattcttaatactctcattttgattttccgacttctcaagactattttgtacttctttcaaacacacttcctgatgttgtgctttactgttcatttttgaaaacaagttgattttgctcttccatttttctttctaagctcagtttccagatctaatattttaatttgtaaagcactctctctagatgacattttctctatttcttcagcaaccttttgtcttccttcttctaaagcagcttccagttgtctggccaatgctgtatactctgcagatttctctttaaacttaagattgctgtgcttaagacattcttcttggtttgccagcttcttctcaagctctttattttctgcgtccatctgttctaatttttgttgaaggttttcacacttcagctgaataagacagttttcctcttccagagaaagctttgtcagaagattgtgatttccatcaaccttctctacatttttatttttggtttttgttatttggttatttttatgtagcaaattttcacatctgctttttactatttcagctgcttcttgcaacttttgtacctgagttttatacatttcaataagggttttctgttttttttctacttcttgcaattctgagagttcattttcaacagatacaacttcatccttcaaagcagcaagtgtagtctttaattttgtattctcaagattcagagtttcattttcatattcaattgagtgaacttttctaagaatttcttcacatgaattttttccatggtcttccattttcttcagatcttccaaaagattaatgatttgctttttcattgtttcaatctgtacttccaattcggttttttctattacaattttctcataatgacttttccaggcattggaagctgaaattgtttcagacaacttggcttcctgatctctaatttgggaagtaagcttttcaatagctcctgtaaaatggtcaagcctttgtttgtaaactttagatgccttttttaaagctacagttttttgcctacttgcttctttcatcactatagcctcattcttattcattcttgattgcaggttccacttggctatcttggtttctaagctcttttcactctgaaacaaacaagaaagttcttggatatgggcctccttttcaaataccttcttcttaagattcttgagcaaatataaaataagaattaggaatttcccaacttggataatattggctaactttataaaa

SEQ ID NO: 64151 - DNA, 721 bp, Homo sapiens
ttgcaccccttcgtagtccctagtccgtgcggtggaattccaaaaacaacgaccacctcaggtaggaatatatccaagcctgactcctgcggtttgaggcaaatagctgctccaaaagccaaagtggggccccctgtttcctgtttgaggcggaacagtgacaatagaaatcccagtgctgatcgagccgtatctcctcagaggatcaggcgtgtgtccagttctggtaagaataaaatagttcaatagtttatgagttaattgaatgtaaaattggacagtcatgattataggtctaatgccttctgtcactaaagcagttagccttttgtggatcagcatcctgagcacaggaggtagaaaaagaagatgacaacatatatcccttatctttgagcaaggcaaaggctagttgaggagagaggtataggtgtataaaccatcttataagctattcagaaggatgtgtacataaatatacaattgggtggctgatgtaaatttgaatcatttcattaagttttttcaaatggttaagtgcttaacaatgctgaagtgttgtacggtaggtccctagtgtgccctcaatacatgtgaagagattaattttttttttaattttactgaaagatgtatgatagatttaggagggatatgagggtgactaaaaagttaaatttttctaatgtgaacttttatttatgttggcttggatcttaca

SEQ ID NO: 64152 - DNA, 2234 bp, Homo sapiens
tttcgtctggggccagccaggagcctgagggtcggaagcccccaacacaagatgctgagctccttcctgagcccccagaatggcacctgggcagacaccttctctctgctcttggctcttgccgttgccctctacttgggctactactgggcatgtgtgcttcagacccacagggctttttgtgccagcaatactgaagatctagagacagtcgtgaaccacataaagcatcgttatccccaagctccactgctggccgtgggcatctcttttggagggatactggtgctgaatcacctggcacaggccaggcaggctgcagggctggtggcagcactgactctgtctgcatgctgggattcctttgagaccactcgctccctggaaaccccactcaactcactgctcttcaatcagcccctcactgctgggctctgccaacttgtggaacgcctatcctatggtaagacctgcaggcccgtacaatccgccagtttgatgagcgctacacatctgtggcctttggatatcaagactgtgttacctactacaaagcagcaagccctagaaccaagatagatgccatccggatccctgtgctctatctcagtgcagcagatgaccccttctccaccgtttgtgcccttcccaaacaggccgcccaacactccccgtacgttgcgctgctcatcacagcccggggtggccacatcggcttcctggaagggctgctcccgtggcagcactggtacatgagccgcctcttgcatcagtacgccaaagccatcttccaggacccagaggggctgcctgacctcagggctctcttaccttctgaggacagaaacagctgacaagagtaccatttggggtctcagttcactctttccttgtttattaaatatcaacttttcctgcctaatgggctgaggttcattttcccattcctcaaggtaagggtagactacctaggaacttattgcatctttaggccagctggcttagtgctacccatctgaacccccagattactacccaagtcttccttttgccccttcctgccctaacagcaagtaccaggccagtcccttccccagcaaatgccaggggcttcatgtgaagaggaactggccacaaggctgaggggaggaggagaaactgtttctgcaggaaggacagcagtgcctccaggctcttgggcatcttcacatgtttctagataaggacaagctcaactctggagcctctggtaggcagaagaaaggaggcagggagtatggcctgggcttcagataccgctgttctggatggatccacagatgacgaaggcaaggttcctgggacctggagtcacacagggccatagccaagccttttcactagaagggcaggcagtgcccattcatcttgtcagaggcaacctcagctgtggacccgaatggagtgagcaaagggagtccaggcctccactctgctctagagatggcagtgtccaggctcctgattcccaggaagcagggaagctaaaggaaacctggaaaggcactctggagcagcaggatggtcacaataataagcccgacacacagcaggagcaggagccacacaggaacactccgccgtgagggcaacagatgcagctggcaacgactgtccacagccacagagaacagggcagtttcatgggacccaaggagctctggaccacgacccttctcaggtagaaaggccacatccgtcaccacaatgccatgggcctccctcacgtagtagaggcactggagagagaaagctatgtagatggcaacagagccagtgactgtgcccaggcctaggaaggtgccggattcactgacatcgaggcaggagacgacttcatggccacaggacttggtccgaaggggcaagaagttggagccatcccaggctgtgaggtagcagggagggggctggcgcaggcgcttgtggggaatttgcactgtgaagagtcgcaggccagcaggctggtctggaacctgcccaaacctgcaggcctggtagcggtaaggtgtgctggaaaaggtgggtccattttcttgccagtgcagctgtgtcaccagctgatccttctgccacacagaggccttaaggtcccggcccacggttaccaacttgccatcaggccctaaagccaggtcttcaatctccccttcgtgggctttgaactccagaaccttctccaggctgggcacctt
